United States Patent Application Publication US 2023/0026259 A1 - sequence listing, part 56

SEQ ID NO: 151553 - DNA, 2327 bp, Homo sapiens
  Payload ID: 9835
  Gene Symbol: MANEAL
  Gene Name: mannosidase, endo-alpha-like
  Uniprot ID: Q5VSG8
  ENST ID: ENST00000397631
  CDS Start-End: 301-1053
tcttctttcgcgggtcacgcggcctgactcaggcccctgctcctgtggccccgaaactcgccgttcgctgggccttgcgttgcactcggcgtgcagttccccctcggctcgcggccacttggtccgcgccgcctgcgtcctgtgtgccgagcccgcccgcactgcggggacaggccgggcgccgcccacgccgcgctctgccgggcgcacagtctgcctgggaagcgcgcggccgggcgggcggccatggcgcggcacgctgggaggtagcgcggcggctgcaggagcgcacagtcggccatggcccggcggcggcgccgcgcctgcatcgctctgttcctggtgctgctcttcgccttcggcaccctcatgggtctgcgcacgctcaaggctccggacggactcccggcgctgggcccgggcctggagctggcgccctttgagcgacgcccagagggggcccccgcgcccgctgccagggccccggcagcccctgccgcgccgcccccgccgccgccgccgccccgcaccgcggaccctggcggctcccctgggccggcacccgcggaggccgagcccgcccccgtgcagagcctgcgcgtctactcggacctgcacgccttctactactcgtggtacgggagcccgcggcgcgagggccactacattcactgggaccacgtcatggtgccgcactgggaccccaagatctcggccagctacccccgcggccgccacagccccccagacgacttgggctccagcttctacccggagctggggccctacagctcccgggaccccgaagtgctgcgggagcatatgacccagctcaaggaagccgccatcggcgtcctggtcctgtcctggtacccacctggcatggctgatgataacggggagccctcagatgacctggtgcccgccattctggacaccgcccatcagtacagcatccaggtggccttccacatccaaccctacaagggccgggatgacatcactgtacatgacaacatcaagtacatcattgacacaactggaaagctgtgaagaacttttgtgatgccaacaacctcatgttcatccccagtgtggggcctggctacatagacaccagcattcggccctggaacaaccacaatacgcgcaacagggtcaatggcaagtactatgagacggccctgcaggcggccctgacagtgaggcccgagatcgtttccattacctccttcaatgagtggcacgagggcacccagattgagaaggccattcccaagaagacacccacccgcctgtatttggactacctgcctcaccagcccagcctgtacctggagctgacacgccgctgggcggagcacttcatcaaagagaaggagcagtggctcatgtgaggggcctgtaaatgggcgtgaggtgctgatgtccttgccttgctggaagatgtcaccatgtggggttcagctgaggttgtagccactcactcgttcccaggtcagaggtcagcagatgggtgtttctgggtgggccgtcaggcatgggcctgtgcaacacagagcccgttcctcaggcgagtggtgctgaggtgctctgtggtgatgggaacggcagaggctggcaggtgactgaacttagcccagggcagctccacatcctgggaacactttcatgtaaccccttctagttttgaactctgcagcaggctggtgctgtgtagtggccacccagtcaccacccttggaagggtgtcagggtctgggctcgcatgcaccctgctcccttctgccagcctgcatcctctcctcaggcctccttcccacatcatctgtcttctctaagttagggaaccatatttgagactttcaaaaagggaacttctaggtttaagctcctcccagtagattcctgaacccaattatcaggaaatcatcctgagcactcacaggttcatttaacactcactcatcaagcaccttcctatgtgctaggtgctggggaaaacttgaccaaggaagagttcctgtcctgaagcttccaggacccagctttccttttctggtgtggccttgtagctagtgcctgggcacaggtgtttttctttttgcagttttacctagtgctgggagttcagttctttttcctctagaaaaatacctctgtgctccagagcctaatttttcccagatgcatatttagctctagggagaggactaggaggaaatccccctccctttagctgcctgaactgactgaggcccactcactagagccatgttcagtgctactgtgattagtagtaattaaatatgaactggtattctcaa

SEQ ID NO: 151554 - DNA, 1015 bp, Homo sapiens
  Payload ID: 9835
  Gene Symbol: MANEAL
  Gene Name: mannosidase, endo-alpha-like
  ENST ID: ENST00000532512
  CDS Start-End: 1-393
gtctactcggacctgcacgccttctactactcgtggtacgggagcccgcggcgcgagggccactacattcactgggaccacgtcatggtgccgcactgggaccccaagatctcggccagctacccccgcggccgccacagccccccagacgacttgggctccagcttctacccggagctggggccctacagctcccgggaccccgaagtgctgcgggagcatatgacccagctcaaggaagccgccatcggcgtcctggtcctgtcctggtacccacctggcatggctgatgataacggggagccctcagatgacctggtgcccgccattctggacaccgcccatcagtacagcatccaggtatggctcccatggtgcattttaccgctataagaacagcatgggcaagagcctcccactcttttatatctacgactcatacctgacgtcccctgaggcctgggcccacctcctgacaccaaacgggccccattcgatccgcaacacgccctacgatggggtcttcatagcgctgctggtggaggagggccacacccacgatatcctggccgccggatttgacggcatgtacacctactttgcctccaatggtttctcctttggttcttcccatcagaactggaaagctgtgaagaacttttgtgatgccaacaacctcatgttcatccccagtgtggggcctggctacatagacaccagcattcggccctggaacaaccacaatacgcgcaacagggtcaatggcaagtactatgagacggccctgcaggcggccctgacagtgaggcccgagatcgtttccattacctccttcaatgagtggcacgagggcacccagattgagaaggccattcccaagaagacacccacccgcctgtatttggactacctgcctcaccagcccagcctgtacctggagctgacacgccgctgggcggagcacttcatcaaagagaaggagcagtggctcatgtgaggggcctgtaaatgggcg

SEQ ID NO: 151555 - DNA, 1294 bp, Homo sapiens
  Payload ID: 9835
  Gene Symbol: MANEAL
  Gene Name: mannosidase, endo-alpha-like
  ENST ID: ENST00000525897
  CDS Start-End: 258-1049
ttcttcagaggtaggcctgtggcttccaggtgggtgtggcactgtcctcccattccctttgttctactacttgctgaggcagtctaaagcctggctcccttccggcctggcgcgctacggttcccgcaggcgctccgcttcagcaccgcgggcgtggacagctccggggcgcgaggctctgggactcatctgcaggaagtgaacctggcaggaggcttgcttcaggcgtcctggtcctgtcctggtacccacctggcatggctgatgataacggggagccctcagatgacctggtgcccgccattctggacaccgcccatcagtacagcatccaggtggccttccacatccaaccctacaagggccgggatgacatcactgtacatgacaacatcaagtacatcattgacacgtatggctcccatggtgcattttaccgctataagaacagcatgggcaagagcctcccactcttttatatctacgactcatacctgacgtcccctgaggcctgggcccacctcctgacaccaaacgggccccattcgatccgcaacacgccctacgatggggtcttcatagcgctgctggtggaggagggccacacccacgatatcctggccgccggatttgacggcatgtacacctactttgcctccaatggtttctcctttggttcttcccatcagaactggaaagctgtgaagaacttttgtgatgccaacaacctcatgttcatccccagtgtggggcctggctacatagacaccagcattcggccctggaacaaccacaatacgcgcaacagggtcaatggcaagtactatgagacggccctgcaggcggccctgacagtgaggcccgagatcgtttccattacctccttcaatgagtggcacgagggcacccagattgagaaggccattcccaagaagacacccacccgcctgtatttggactacctgcctcaccagcccagcctgtacctggagctgacacgccgctgggcggagcacttcatcaaagagaaggagcagtggctcatgtgaggggcctgtaaatgggcgtgaggtgctgatgtccttgccttgctggaagatgtcaccatgtggggttcagctgaggttgtagccactcactcgttcccaggtcagaggtcagcagatgggtgtttctgggtgggccgtcaggcatgggcctgtgcaacacagagcccgttcctcaggcgagtggtgctgaggtgctctgtggtgatgggaacggcagaggctggcaggtgactgaacttagccca

SEQ ID NO: 151556 - DNA, 2761 bp, Homo sapiens
  Payload ID: 9836
  Gene Symbol: MGAT1
  Gene Name: mannosyl (alpha-1,3-)-glycoprotein beta-1,2-N -acetylglucosaminyltransferase
  Uniprot ID: P26572
  ENST ID: ENST00000307826
  CDS Start-End: 333-1670
cccctcagtccgccccgccccgccccgcctgccggggaagggccacgttgcccgcccggccgtccggccccggcgcgccgcagaaagggctggcgagtcgaaaggcgaggcggccgcggcagcgcttgggacgcgcctgggcaccgggctcgctccctgcgccccggagcaggccaagttcggggccaggacgtcgggaggacctggtgcatggctgcctcctaatcccatagtccagaggaggcatccctaggactgcgggcaagggagccgggcaagcccagggcagccttgaaccgtcccctggcctgccctccccggtgggggccaggatgctgaagaagcagtctgcagggcttgtgctgtggggcgctatcctctttgtggcctggaatgccctgctgctcctcttcttctggacgcgcccagcacctggcaggccaccctcagtcagcgctctcgatggcgaccccgccagcctcacccgggaagtgattcgcctggcccaagacgccgaggtggagctggagcggcagcgtgggctgctgcagcagatcggggatgccctgtcgagccagcgggggagggtgcccaccgcggcccctcccgcccagccgcgtgtgcctgtgacccccgcgccggcggtgattcccatcctggtcatcgcctgtgaccgcagcactgttcggcgctgcctggacaagctgctgcattatcggccctcggctgagctcttccccatcatcgttagccaggactgcgggcacgaggagacggcccaggccatcgcctcctacggcagcgcggtcacgcacatccggcagcccgacctgagcagcattgcggtgccgccggaccaccgcaagttccagggctactacaagatcgcgcgccactaccgctgggcgctgggccaggtcttccggcagtttcgcttccccgcggccgtggtggtggaggatgacctggaggtggccccggacttcttcgagtactttcgggccacctatccgctgctgaaggccgacccctccctgtggtgcgtctcggcctggaatgacaacggcaaggagcagatggtggacgccagcaggcctgagctgctctaccgcaccgactttttccctggcctgggctggctgctgttggccgagctctgggctgagctggagcccaagtggccaaaggccttctgggacgactggatgcggcggccggagcagcggcaggggcgggcctgcatacgccctgagatctcaagaacgatgacctttggccgcaagggtgtgagccacgggcagttctttgaccagcacctcaagtttatcaagctgaaccagcagtttgtgcacttcacccagctggacctgtcttacctgcagcgggaggcctatgaccgagatttcctcgcccgcgtctacggtgctccccagctgcaggtggagaaagtgaggaccaatgaccggaaggagctgggggaggtgcgggtgcagtatacgggcagggacagcttcaaggctttcgccaaggctctgggtgtcatggatgaccttaagtcgggggttccgagagctggctaccggggtattgtcaccttccagttccggggccgccgtgtccacctggcgcccccactgacgtgggagggctatgatcctagctggaattagcacctgcctgtccttcctgggcccctccttgccacatcatgagctgaggtgggaccacagtccccaggctgcatcggcctgcctgtgtttccctcttaggtgcatttatctttttgatttttccgagtggcatttaagtgcacaaatgataacaagaggattattctcccgttctcaagggagtcagatcaggggaactattctagggtatgttgcggggtattaagcaggaaaccactgtgtggtggggggcactgggcttgttggggccagaaatgtccacgtcctgagctttctcctggagcatgtgcagagagtttggcaacgttcgctctcttgaccagaccccttctccctgacctggctcttccagccagggcacgagccctccttctatacctgctccccttcccccagtggggactgagttatgggagaaggggacatatttgtggccaaaatgatactaaccaaaggggcttccttgtcagggcctggtggagttggtgggtcatcggggctcactgcctcctgcccttctctcctgtctgacccccacttagcccttctctccttgcagcctagcagtttatagttctgagatggaaagttgaagggggcaagcaagacctctcctcagcccatgcccagctgtcaggagagaggtgcagggaggaaggccttgtgctgggacaacctctctcttgccttacctcagagagggactatgccctgacccctcctttctgaaaatcagtgccctccctgttgctctaggaggctcctgctggcttggtagaagacagaattcgatctgcctgtccctttttcccctggggtttgacacacaggctcctctcagcatgaggtggagcagtgaccaggtggagcagtgaccaggacgcctctggcccagtgctgcccagcctccccgcccgctcccaggcgccccatgtcctcacaggccaggacgccatggcaggatggagaggacttggtggatttttgtttcttgcctgacctcagtttcatgaaagaaagtggaagctacagaattattttctaaaataaaggctgaattgtctgaaaaa

SEQ ID NO: 151557 - DNA, 8863 bp, Homo sapiens
  Payload ID: 9836
  Gene Symbol: MGAT1
  Gene Name: mannosyl (alpha-1,3-)-glycoprotein beta-1,2-N -acetylglucosaminyltransferase
  Uniprot ID: P26572
  ENST ID: ENST00000333055
  CDS Start-End: 674-2011
ggcttttgactgactggatgtgggaatgttgtggaagacttctggcctgccatttcctgagaacgggactgctgagagaggagctgggaggagcactgcaaatttcactttggacacgtgagtcagagaaatctgcctcctgggccatgccgcttctaaggcctgtttcttctcatgagccccagcacaagacagatgggccagttctcacagtggataacttcccctgcctgagcaagagatgggatagtatctgggatctgtccatcaccagactctgagcttaataaggcagctgaatgaagggaggtaacggacccctgagaggggcactgaagtctgcagtggggggggaggggcctggacacaccccttcccccccagactcctccccgtcagggtcagctcagccatggactttggacctggataagaagagagaagctgcactttggtggatctgatttgggattctcagttttgaaaatggagtgctgaatggggatttgatgatctcctggagagcaactgagacaagagaagaaaggtgcatggctgcctcctaatcccatagtccagaggaggcatccctaggactgcgggcaagggagccgggcaagcccagggcagccttgaaccgtcccctggcctgccctccccggtgggggccaggatgctgaagaagcagtctgcagggcttgtgctgtggggcgctatcctctttgtggcctggaatgccctgctgctcctcttcttctggacgcgcccagcacctggcaggccaccctcagtcagcgctctcgatggcgaccccgccagcctcacccgggaagtgattcgcctggcccaagacgccgaggtggagctggagcggcagcgtgggctgctgcagcagatcggggatgccctgtcgagccagcgggggagggtgcccaccgcggcccctcccgcccagccgcgtgtgcctgtgacccccgcgccggcggtgattcccatcctggtcatcgcctgtgaccgcagcactgttcggcgctgcctggacaagctgctgcattatcggccctcggctgagctcttccccatcatcgttagccaggactgcgggcacgaggagacggcccaggccatcgcctcctacggcagcgcggtcacgcacatccggcagcccgacctgagcagcattgcggtgccgccggaccaccgcaagttccagggctactacaagatcgcgcgccactaccgctgggcgctgggccaggtcttccggcagtttcgcttccccgcggccgtggtggtggaggatgacctggaggtggccccggacttcttcgagtactttcgggccacctatccgctgctgaaggccgacccctccctgtggtgcgtctcggcctggaatgacaacggcaaggagcagatggtggacgccagcaggcctgagctgctctaccgcaccgactttttccctggcctgggctggctgctgttggccgagctctgggctgagctggagcccaagtggccaaaggccttctgggacgactggatgcggcggccggagcagcggcaggggcgggcctgcatacgccctgagatctcaagaacgatgacctttggccgcaagggtgtgagccacgggcagttctttgaccagcacctcaagtttatcaagctgaaccagcagtttgtgcacttcacccagctggacctgtcttacctgcagcgggaggcctatgaccgagatttcctcgcccgcgtctacggtgctccccagctgcaggtggagaaagtgaggaccaatgaccggaaggagctgggggaggtgcgggtgcagtatacgggcagggacagcttcaaggctttcgccaaggctctgggtgtcatggatgaccttaagtcgggggttccgagagctggctaccggggtattgtcaccttccagttccggggccgccgtgtccacctggcgcccccactgacgtgggagggctatgatcctagctggaattagcacctgcctgtccttcctgggcccctccttgccacatcatgagctgaggtgggaccacagtccccaggctgcatcggcctgcctgtgtttccctcttaggtgcatttatctttttgatttttccgagtggcatttaagtgcacaaatgataacaagaggattattctcccgttctcaagggagtcagatcaggggaactattctagggtatgttgcggggtattaagcaggaaaccactgtgtggtggggggcactgggcttgttggggccagaaatgtccacgtcctgagctttctcctggagcatgtgcagagagtttggcaacgttcgctctcttgaccagaccccttctccctgacctggctcttccagccagggcacgagccctccttctatacctgctccccttcccccagtggggactgagttatgggagaaggggacatatttgtggccaaaatgatactaaccaaaggggcttccttgtcagggcctggtggagttggtgggtcatcggggctcactgcctcctgcccttctctcctgtctgacccccacttagcccttctctccttgcagcctagcagtttatagttctgagatggaaagttgaagggggcaagcaagacctctcctcagcccatgcccagctgtcaggagagaggtgcagggaggaaggccttgtgctgggacaacctctctcttgccttacctcagagagggactatgccctgacccctcctttctgaaaatcagtgccctccctgttgctctaggaggctcctgctggcttggtagaagacagaattcgatctgcctgtccctttttcccctggggtttgacacacaggctcctctcagcatgaggtggagcagtgaccaggtggagcagtgaccaggacgcctctggcccagtgctgcccagcctccccgcccgctcccaggcgccccatgtcctcacaggccaggacgccatggcaggatggagaggacttggtggatttttgtttcttgcctgacctcagtttcatgaaagaaagtggaagctacagaattattttctaaaataaaggctgaattgtctgaaaaatatttatgtgtgtgtgtcctggaaaaggaggtggcaggcagggaaagaaaggaaaagggagaatgaagagttaaggagagggctagacgggtgggaggaagcaaagttgaggaaagaaagcagatgagtgggagggaagagccagggacagcccaggggatgggggccaggtgggaaaggaagtccaggccacaaggtggagaggagccccggactgtgctcctgctgatcgtcctgtagagccaggaggccgcagcaggaaagctggtgagtgtctcctgcttctgcctcctgctggctgggcaggcctggtctggggaagaaccaggtcctctgatcagggtggtccctgagtggtgctttgtgcccggtgccctctgctggcccaggcagtgcttattgagtgccctttatgacgtgccggggagcctcagggtacacagctgataccagggttggcctcacagtggcgcttggactcccaaacgcaaccccagtgagagtgcctgttttgctaatacccagaacacagacagactgttacctctgcatatcacgtgcaacattctgagagtttctgttctccactaattcatttaaaagaacaaaacgcggccgggcgcagtggcttacacatgtaatcccagcactttgggaggctgaggcggacggatcacgaagtcaggagttcgggaccatcctggccaacatggtgaaacctaaaaatactctactaaaaatacaaaaacttgctgggcatggtggcacacacctgtaatcccagctactcaggaagctgaggctggagaatcacttgaacccgggaggcagaggttgcagtaatccaagatcataccactgcactccagcctgggcgacagagcaagactctgtctcggaaaaacaaaacgctttttgtgactcacgaacttgatttcatgagtgggtttgaaaaccctgggctagtccaggcgcggtggctcacgcctgtaatcccagtactttgggaggctgaggcgggtggatcacttcaggagtttgagaccagcctggctaacatggtgaaaccccatctctactaaaaatacaaaaattagctgggtgtggtggcacatgcctgtaattccagctacttgggaggctgaggcaggagaattgcttgaacccgggacggggtggttgcagtgacctgagatcgcaccactgcactccagcctgggcggtaagagcgaaactgcgtctcaaaacaaaacaaaccaaaaaccctgggctaggcaactttcttggcagaaactactttggagctcgacaccagatggtggcagagttgtctggggagctgtgtcgagggccgtggccttgggagcagctccaacctcccatctgggctcagaaaccagtgtcagacattggttttattttaacctttgagatttgtgtggagcgggttttgccttcccctgttgcttagatggattatttagccatattttttgttaaataaggggaggtggtcattatccgtgatttcagacgtggaatcggcccggcgatagctgcattgtgccctttccggtggagccaggaggagtttggccgccacgctccatgcgcatagcatgtcatgcagctagccaagtgcattgttctgagtgctccaggataagtaccaacttacttagtgctccaggataagtaccaacttagtgctccaggataagtaccaacttacttagtgctccaggataagtaccaacttacttagtgctccaggataagtaccaacttacttagtgctccaggataagtaccaacttacttagtgctccaggataagtaccaacttacttagtgctccaggataagtaccaacttacttagtgctccaggataagtaccaacttacttgatcctcagagcaagcctaggcggtgggtactgttttgctcctgttttaccagtgaggaagcaggcacacagaggtgaagttgcccaaggtcacacagatggttgagggagagccggattggaatgaactctgtgctgttagccactgtgtgaggctggactgttccattccagcctttacggcctcttccaggccattccccagctgcacttggattctcaggccaggcaccggcggtctcctgtgagggtggagaggaagagggggctgcgtggctcggggaggtccaggagagatggcgggaggagtagagtttggggcctgcggtgccagaggacccccttacaagacgaaagactgggttctcaggctcctgaagcaaggagcaccttcaggggtctcctggtattcacccatcaaggcttgctcaggtggcatgcgtgtgtgcgtggcggctgcccccgggcccggaagcgcctgtggataccaaagcaagtggaaatgccagatggaaaagccccgtgttagtcaatgctgtagagttcagccagcctcgagtttgcaggtttacagagctgccttgcgcctggctgctgctgctgctgcattcctgcttctgcctccagctgtgaccacctcctgccactcctgctctcactgtgggttcctgctcactctgtctccaggacagactgccttccgggcagccttccctcctcaagcctcttggcctttgcaatcctcttacctgggtcactggtgggatctcatttgtggatcaagtcgcccccagtggagacaaatgtctgatggagtctggccaaggccctcctgagccttcactgggccctgcatgagaagcctgccaaggctgaggggccagggaaacggagacgaagccctcagagcaggccaagagggtgggaggtggggggcatttagagggttagatacagagcacccctttacaaataccagctactggcttttcgtattacatgttcattttagatacaacatactgcacacgctcccttaacgtgtgtttacgcgtgggtggtgtatccttccagacgtcttcctcacatctatacataatatgcatagataaaacatttaccaccaaaacccatagtgttatgtacatatttgtctggctgtgtaactttaaataacatacaaatgtatagaacagaagcttgccctctttctgaaatatctaacgtgggatttcaggctttctgatgagacctctgtagaggtcagtgttttgccaccagaggtccttcagcctccatctgttctcccacctacccacattctggcccctggcaattcacagggagtttaggaagtagacaccagggccctatttcctggagaccagcctggtggccgatgtcatagagtgcggtgggcctgggccggccctgctctgggcccgtgacctgcgtgtctgactcgggtccagctgttcttcctgccagagcctcttcctgtgaggcgggggtaacacaaccttctgtggtggctgtgggattaatccgtatggctgcattgtgagtaaagcctggtggaaatctctgtctccactgctttccttttcctgctgttcaccttggctccctcgacacttaatccccctccacatgtgtctggagcgggcagagcgggggcagttgatagaaagggggccgggtagtgccaaggctgttactttcccccactgcctcccttggctaacttgaagtctgaccctttataccagaactgtaagacagtgtgtcagaatggattcagttgcagagcaggaagcctggatcccagcgccggacggaaatgagaggtcgatggtgcaggctggtgtgggggttcctccaccgtcagggcccaggctccttctcaggtctcagtctcactcttcttagcacgaggtcaggtctcattccttggctgcgggagctccagccagcacacgttttaggaagaaggaggaaggaagaaggtaaagggtggatggcagctgcctcctcctctcttggaagctcacagagcgctgggtcacaattccctgggtagaactggatcacacaggcacccctgtcagcaaaagaggctggaaaaagtatttctgaagctgaatcaaattaagattcctgttactaagaagggagtgattgtatgggcgactacagggaccacggccatacacggtgcctggaagaccaagcttgtgacagtgacgaggatttggagagggcagggtgatggggagctttggggggagtgcattaggaaccctgacctggagaggggcagaatgaaacctgcgggcccctaaccctagtgggttgtttgagaaacctgtcctactgtggcagggggctgagtcttctcagggtcatgcatgaaaactgaaattcctgaaggccacacacagccccggaagtgctgactgacaagggcacatgccagtgatgcagttttcttttttgtcttcacttttgttgttccgccgtcttcaacacatggctcccagctcacagcaaatgctgccctggttcagctaccaggaagcaggagaggggaagggagggcaagcctcattctttatggaacaaaagcagtgggcagacagccttccctcacgttccactcactggaatgtggtctggctgccttccctgcaggaggtgggatgcaccctcagtgcagcagccctgccccagccaaaaacgtctcagcacagctgtaagaagaggaagatggctagagacaggcagccttccctgcaagggcaatgaggcaagcctgccaaaagcctcctttggaaatactgtttgattacttttcagagtttctatttaggaaaagggcaaaacctttcaggatcaggagtaggtgagcggcgatcaggcctcactcttcaccgagggccttccctgaggaggggcctgcaggacgctggcagcggaatggggctgtgtggctgctagattaggtcatggcagggagacagcctcttcctggttcttgctagaacaggcacacttggggccttgagctccagggagttcatggaagacatctgactaccctgagccccttgctggagggttctggggagtggcccacggccaccgtcacccatggccaccgtcacccacaggggccgtgaggacatccctggccagcatctaacacaaccacatgggatgccctaagcaactactgcccagccgagggctgcctgaatttctgactcacaaatggtgggcaatgtgaaacgggtattttaagctgctgagttctgcgggagtttgctgagcaacagtagaaaccagaactctcggatactgtgttctgtccttgaaacggtggaagattttatgtgaccagaatggaatgtttgaacaaatattttgagaatagaattttaaaacatttactcatcagcatccaagggtggggagcagtgtcatctaggagactggttctattatttacgtagatgttcttgaattaaaggatgggaatattttttccttccaaaactttttttcaattttatattctgtttttcaagtttttattatgaaaatattcaaactcacagggaagttgaaagactaatacaaagaagaaccatactctttccactgacatgatccaacgaggaatattttgccacacggcaaatatataccgtataattttctgtaccacttgatagaaaggtaaagaatgaatattgttttttaaataacttttttcgtatataagtaatatgtgcttatcgtgtaactacctaaaaacattgaaaaataaaaggaaaataaaattcatacataa

SEQ ID NO: 151558 - DNA, 3077 bp, Homo sapiens
  Payload ID: 9836
  Gene Symbol: MGAT1
  Gene Name: mannosyl (alpha-1,3-)-glycoprotein beta-1,2-N -acetylglucosaminyltransferase
  Uniprot ID: P26572
  ENST ID: ENST00000393340
  CDS Start-End: 654-1991
gtggggcctgggccagcgctggggatcgggcctggggcctggattgcgacccgcggcgggccgcggctcctagccgagacggggcgggcgggaaccaggttaacacagaaatctgcctcctgggccatgccgcttctaaggcctgtttcttctcatgagccccagcacaagacagatgggccagttctcacagtggataacttcccctgcctgagcaagagatgggatagtatctgggatctgtccatcaccagactctgagcttaataaggcagctgaatgaagggaggtaacggacccctgagaggggcactgaagtctgcagtggggggggaggggcctggacacaccccttcccccccagactcctccccgtcagggtcagctcagccatggactttggacctggataagaagagagaagctgcactttggtggatctgatttgggattctcagttttgaaaatggagtgctgaatggggatttgatgatctcctggagagcaactgagacaagagaagaaaggtgcatggctgcctcctaatcccatagtccagaggaggcatccctaggactgcgggcaagggagccgggcaagcccagggcagccttgaaccgtcccctggcctgccctccccggtgggggccaggatgctgaagaagcagtctgcagggcttgtgctgtggggcgctatcctctttgtggcctggaatgccctgctgctcctcttcttctggacgcgcccagcacctggcaggccaccctcagtcagcgctctcgatggcgaccccgccagcctcacccgggaagtgattcgcctggcccaagacgccgaggtggagctggagcggcagcgtgggctgctgcagcagatcggggatgccctgtcgagccagcgggggagggtgcccaccgcggcccctcccgcccagccgcgtgtgcctgtgacccccgcgccggcggtgattcccatcctggtcatcgcctgtgaccgcagcactgttcggcgctgcctggacaagctgctgcattatcggccctcggctgagctcttccccatcatcgttagccaggactgcgggcacgaggagacggcccaggccatcgcctcctacggcagcgcggtcacgcacatccggcagcccgacctgagcagcattgcggtgccgccggaccaccgcaagttccagggctactacaagatcgcgcgccactaccgctgggcgctgggccaggtcttccggcagtttcgcttccccgcggccgtggtggtggaggatgacctggaggtggccccggacttcttcgagtactttcgggccacctatccgctgctgaaggccgacccctccctgtggtgcgtctcggcctggaatgacaacggcaaggagcagatggtggacgccagcaggcctgagctgctctaccgcaccgactttttccctggcctgggctggctgctgttggccgagctctgggctgagctggagcccaagtggccaaaggccttctgggacgactggatgcggcggccggagcagcggcaggggcgggcctgcatacgccctgagatctcaagaacgatgacctttggccgcaagggtgtgagccacgggcagttctttgaccagcacctcaagtttatcaagctgaaccagcagtttgtgcacttcacccagctggacctgtcttacctgcagcgggaggcctatgaccgagatttcctcgcccgcgtctacggtgctccccagctgcaggtggagaaagtgaggaccaatgaccggaaggagctgggggaggtgcgggtgcagtatacgggcagggacagcttcaaggctttcgccaaggctctgggtgtcatggatgaccttaagtcgggggttccgagagctggctaccggggtattgtcaccttccagttccggggccgccgtgtccacctggcgcccccactgacgtgggagggctatgatcctagctggaattagcacctgcctgtccttcctgggcccctccttgccacatcatgagctgaggtgggaccacagtccccaggctgcatcggcctgcctgtgtttccctcttaggtgcatttatctttttgatttttccgagtggcatttaagtgcacaaatgataacaagaggattattctcccgttctcaagggagtcagatcaggggaactattctagggtatgttgcggggtattaagcaggaaaccactgtgtggtggggggcactgggcttgttggggccagaaatgtccacgtcctgagctttctcctggagcatgtgcagagagtttggcaacgttcgctctcttgaccagaccccttctccctgacctggctcttccagccagggcacgagccctccttctatacctgctccccttcccccagtggggactgagttatgggagaaggggacatatttgtggccaaaatgatactaaccaaaggggcttccttgtcagggcctggtggagttggtgggtcatcggggctcactgcctcctgcccttctctcctgtctgacccccacttagcccttctctccttgcagcctagcagtttatagttctgagatggaaagttgaagggggcaagcaagacctctcctcagcccatgcccagctgtcaggagagaggtgcagggaggaaggccttgtgctgggacaacctctctcttgccttacctcagagagggactatgccctgacccctcctttctgaaaatcagtgccctccctgttgctctaggaggctcctgctggcttggtagaagacagaattcgatctgcctgtccctttttcccctggggtttgacacacaggctcctctcagcatgaggtggagcagtgaccaggtggagcagtgaccaggacgcctctggcccagtgctgcccagcctccccgcccgctcccaggcgccccatgtcctcacaggccaggacgccatggcaggatggagaggacttggtggatttttgtttcttgcctgacctcagtttcatgaaagaaagtggaagctacagaattattttctaaaataaaggctgaattgtctg

SEQ ID NO: 151559 - DNA, 1919 bp, Homo sapiens
  Payload ID: 9836
  Gene Symbol: MGAT1
  Gene Name: mannosyl (alpha-1,3-)-glycoprotein beta-1,2-N -acetylglucosaminyltransferase
  Uniprot ID: P26572
  ENST ID: ENST00000427865
  CDS Start-End: 430-1767
ctgatcacatggcagcagcccttcttggggaagtcagctacccagcagcctgtagtcctcggctacccaccctcaccgcctggggtcccatggtgagacagctgggtgggcatcaggcttctgcagagggccaggccggagggagctgggcgagggagtggggctggctcctggcttgcaccggcctcgtggaatccaggcctcagacctgatcgctggcgaaactggctctgtgcgctggagcccctggtcttctgcgtctgtcctcctcccggccagactttactcctggctcagcgacaggtgcatggctgcctcctaatcccatagtccagaggaggcatccctaggactgcgggcaagggagccgggcaagcccagggcagccttgaaccgtcccctggcctgccctccccggtgggggccaggatgctgaagaagcagtctgcagggcttgtgctgtggggcgctatcctctttgtggcctggaatgccctgctgctcctcttcttctggacgcgcccagcacctggcaggccaccctcagtcagcgctctcgatggcgaccccgccagcctcacccgggaagtgattcgcctggcccaagacgccgaggtggagctggagcggcagcgtgggctgctgcagcagatcggggatgccctgtcgagccagcgggggagggtgcccaccgcggcccctcccgcccagccgcgtgtgcctgtgacccccgcgccggcggtgattcccatcctggtcatcgcctgtgaccgcagcactgttcggcgctgcctggacaagctgctgcattatcggccctcggctgagctcttccccatcatcgttagccaggactgcgggcacgaggagacggcccaggccatcgcctcctacggcagcgcggtcacgcacatccggcagcccgacctgagcagcattgcggtgccgccggaccaccgcaagttccagggctactacaagatcgcgcgccactaccgctgggcgctgggccaggtcttccggcagtttcgcttccccgcggccgtggtggtggaggatgacctggaggtggccccggacttcttcgagtactttcgggccacctatccgctgctgaaggccgacccctccctgtggtgcgtctcggcctggaatgacaacggcaaggagcagatggtggacgccagcaggcctgagctgctctaccgcaccgactttttccctggcctgggctggctgctgttggccgagctctgggctgagctggagcccaagtggccaaaggccttctgggacgactggatgcggcggccggagcagcggcaggggcgggcctgcatacgccctgagatctcaagaacgatgacctttggccgcaagggtgtgagccacgggcagttctttgaccagcacctcaagtttatcaagctgaaccagcagtttgtgcacttcacccagctggacctgtcttacctgcagcgggaggcctatgaccgagatttcctcgcccgcgtctacggtgctccccagctgcaggtggagaaagtgaggaccaatgaccggaaggagctgggggaggtgcgggtgcagtatacgggcagggacagcttcaaggctttcgccaaggctctgggtgtcatggatgaccttaagtcgggggttccgagagctggctaccggggtattgtcaccttccagttccggggccgccgtgtccacctggcgcccccactgacgtgggagggctatgatcctagctggaattagcacctgcctgtccttcctgggcccctccttgccacatcatgagctgaggtgggaccacagtccccaggctgcatcggcctgcctgtgtttccctcttaggtgcatttatctttttgatttttccgagtggcatttaagtgcacaaatgataa

SEQ ID NO: 151560 - DNA, 3175 bp, Homo sapiens
  Payload ID: 9836
  Gene Symbol: MGAT1
  Gene Name: mannosyl (alpha-1,3-)-glycoprotein beta-1,2-N -acetylglucosaminyltransferase
  Uniprot ID: P26572
  ENST ID: ENST00000446023
  CDS Start-End: 752-2089
gtgtggatggatgtgtgttgagagagagaatggatgtgtgtgtgtttacgaataaacttggaggggagggggcaacaggggtgggttttcgggctgagaaatgggaacactgtggggctgctgcaagcaggacttgggccttaaacattccaggagagtgttctcgggagtagccccgggaaggactttaacagaggttaacacagaaatctgcctcctgggccatgccgcttctaaggcctgtttcttctcatgagccccagcacaagacagatgggccagttctcacagtggataacttcccctgcctgagcaagagatgggatagtatctgggatctgtccatcaccagactctgagcttaataaggcagctgaatgaagggaggtaacggacccctgagaggggcactgaagtctgcagtggggggggaggggcctggacacaccccttcccccccagactcctccccgtcagggtcagctcagccatggactttggacctggataagaagagagaagctgcactttggtggatctgatttgggattctcagttttgaaaatggagtgctgaatggggatttgatgatctcctggagagcaactgagacaagagaagaaaggtgcatggctgcctcctaatcccatagtccagaggaggcatccctaggactgcgggcaagggagccgggcaagcccagggcagccttgaaccgtcccctggcctgccctccccggtgggggccaggatgctgaagaagcagtctgcagggcttgtgctgtggggcgctatcctctttgtggcctggaatgccctgctgctcctcttcttctggacgcgcccagcacctggcaggccaccctcagtcagcgctctcgatggcgaccccgccagcctcacccgggaagtgattcgcctggcccaagacgccgaggtggagctggagcggcagcgtgggctgctgcagcagatcggggatgccctgtcgagccagcgggggagggtgcccaccgcggcccctcccgcccagccgcgtgtgcctgtgacccccgcgccggcggtgattcccatcctggtcatcgcctgtgaccgcagcactgttcggcgctgcctggacaagctgctgcattatcggccctcggctgagctcttccccatcatcgttagccaggactgcgggcacgaggagacggcccaggccatcgcctcctacggcagcgcggtcacgcacatccggcagcccgacctgagcagcattgcggtgccgccggaccaccgcaagttccagggctactacaagatcgcgcgccactaccgctgggcgctgggccaggtcttccggcagtttcgcttccccgcggccgtggtggtggaggatgacctggaggtggccccggacttcttcgagtactttcgggccacctatccgctgctgaaggccgacccctccctgtggtgcgtctcggcctggaatgacaacggcaaggagcagatggtggacgccagcaggcctgagctgctctaccgcaccgactttttccctggcctgggctggctgctgttggccgagctctgggctgagctggagcccaagtggccaaaggccttctgggacgactggatgcggcggccggagcagcggcaggggcgggcctgcatacgccctgagatctcaagaacgatgacctttggccgcaagggtgtgagccacgggcagttctttgaccagcacctcaagtttatcaagctgaaccagcagtttgtgcacttcacccagctggacctgtcttacctgcagcgggaggcctatgaccgagatttcctcgcccgcgtctacggtgctccccagctgcaggtggagaaagtgaggaccaatgaccggaaggagctgggggaggtgcgggtgcagtatacgggcagggacagcttcaaggctttcgccaaggctctgggtgtcatggatgaccttaagtcgggggttccgagagctggctaccggggtattgtcaccttccagttccggggccgccgtgtccacctggcgcccccactgacgtgggagggctatgatcctagctggaattagcacctgcctgtccttcctgggcccctccttgccacatcatgagctgaggtgggaccacagtccccaggctgcatcggcctgcctgtgtttccctcttaggtgcatttatctttttgatttttccgagtggcatttaagtgcacaaatgataacaagaggattattctcccgttctcaagggagtcagatcaggggaactattctagggtatgttgcggggtattaagcaggaaaccactgtgtggtggggggcactgggcttgttggggccagaaatgtccacgtcctgagctttctcctggagcatgtgcagagagtttggcaacgttcgctctcttgaccagaccccttctccctgacctggctcttccagccagggcacgagccctccttctatacctgctccccttcccccagtggggactgagttatgggagaaggggacatatttgtggccaaaatgatactaaccaaaggggcttccttgtcagggcctggtggagttggtgggtcatcggggctcactgcctcctgcccttctctcctgtctgacccccacttagcccttctctccttgcagcctagcagtttatagttctgagatggaaagttgaagggggcaagcaagacctctcctcagcccatgcccagctgtcaggagagaggtgcagggaggaaggccttgtgctgggacaacctctctcttgccttacctcagagagggactatgccctgacccctcctttctgaaaatcagtgccctccctgttgctctaggaggctcctgctggcttggtagaagacagaattcgatctgcctgtccctttttcccctggggtttgacacacaggctcctctcagcatgaggtggagcagtgaccaggtggagcagtgaccaggacgcctctggcccagtgctgcccagcctccccgcccgctcccaggcgccccatgtcctcacaggccaggacgccatggcaggatggagaggacttggtggatttttgtttcttgcctgacctcagtttcatgaaagaaagtggaagctacagaattattttctaaaataaaggctgaattgtctg

SEQ ID NO: 151561 - DNA, 607 bp, Homo sapiens
  Payload ID: 9836
  Gene Symbol: MGAT1
  Gene Name: mannosyl (alpha-1,3-)-glycoprotein beta-1,2-N -acetylglucosaminyltransferase
  ENST ID: ENST00000514438
  CDS Start-End: 294-607
gaaaagagccacgaaataaccgggagacaagctttcggaggcttttgactgactggatgtgggaatgttgtggaagacttctggcctgccatttcctgagaacgggactgctgagagaggagctgggaggagcactgcaaatttcactttggacacgtgagtcagaggtgcatggctgcctcctaatcccatagtccagaggaggcatccctaggactgcgggcaagggagccgggcaagcccagggcagccttgaaccgtcccctggcctgccctccccggtgggggccaggatgctgaagaagcagtctgcagggcttgtgctgtggggcgctatcctctttgtggcctggaatgccctgctgctcctcttcttctggacgcgcccagcacctggcaggccaccctcagtcagcgctctcgatggcgaccccgccagcctcacccgggaagtgattcgcctggcccaagacgccgaggtggagctggagcggcagcgtgggctgctgcagcagatcggggatgccctgtcgagccagcgggggagggtgcccaccgcggcccctcccgcccagccgcgtgtgcctgtgacccccgcgccggcggt

SEQ ID NO: 151562 - DNA, 693 bp, Homo sapiens
  Payload ID: 9836
  Gene Symbol: MGAT1
  Gene Name: mannosyl (alpha-1,3-)-glycoprotein beta-1,2-N -acetylglucosaminyltransferase
  ENST ID: ENST00000502678
  CDS Start-End: 384-693
gagagaagctgcactttggtggatctgatttgggattctcagttttgaaaatggagtgctgaatggggatttgatgatctcctggagagcaactgagacaagagaagaaaggtaaggctcctgtctcatttcccacttaatgtcttgctgtgcctgtgcagaaggtgttgagctggcgagttcgcggaggctactattcaggaaatcttatccagatgagtacactggaagctacacctctccattactctgtccaggtgcatggctgcctcctaatcccatagtccagaggaggcatccctaggactgcgggcaagggagccgggcaagcccagggcagccttgaaccgtcccctggcctgccctccccggtgggggccaggatgctgaagaagcagtctgcagggcttgtgctgtggggcgctatcctctttgtggcctggaatgccctgctgctcctcttcttctggacgcgcccagcacctggcaggccaccctcagtcagcgctctcgatggcgaccccgccagcctcacccgggaagtgattcgcctggcccaagacgccgaggtggagctggagcggcagcgtgggctgctgcagcagatcggggatgccctgtcgagccagcgggggagggtgcccaccgcggcccctcccgcccagccgcgtgtgcctgtgacccccgcgccgg

SEQ ID NO: 151563 - DNA, 564 bp, Homo sapiens
  Payload ID: 9836
  Gene Symbol: MGAT1
  Gene Name: mannosyl (alpha-1,3-)-glycoprotein beta-1,2-N -acetylglucosaminyltransferase
  ENST ID: ENST00000506269
  CDS Start-End: 231-564
ctctcttcgctttctttactcagaactgaagctctcattccccacccaccaaggaaaaacaaaagggaagaagccacagctggccccggcttgctttggcacaggtgcatggctgcctcctaatcccatagtccagaggaggcatccctaggactgcgggcaagggagccgggcaagcccagggcagccttgaaccgtcccctggcctgccctccccggtgggggccaggatgctgaagaagcagtctgcagggcttgtgctgtggggcgctatcctctttgtggcctggaatgccctgctgctcctcttcttctggacgcgcccagcacctggcaggccaccctcagtcagcgctctcgatggcgaccccgccagcctcacccgggaagtgattcgcctggcccaagacgccgaggtggagctggagcggcagcgtgggctgctgcagcagatcggggatgccctgtcgagccagcgggggagggtgcccaccgcggcccctcccgcccagccgcgtgtgcctgtgacccccgcgccggcggtgattcccatcctggtcatcg

SEQ ID NO: 151564 - DNA, 555 bp, Homo sapiens
  Payload ID: 9836
  Gene Symbol: MGAT1
  Gene Name: mannosyl (alpha-1,3-)-glycoprotein beta-1,2-N -acetylglucosaminyltransferase
  ENST ID: ENST00000513431
  CDS Start-End: 270-555
aaataaccgggagacaagctttcggaggcttttgactgactggatgtgggaatgttgtggaagacttctggcctgccatttcctgagaacgggactgctgagagaggagctgggaggagcactgcaaatttcactttggacacgtgcatggctgcctcctaatcccatagtccagaggaggcatccctaggactgcgggcaagggagccgggcaagcccagggcagccttgaaccgtcccctggcctgccctccccggtgggggccaggatgctgaagaagcagtctgcagggcttgtgctgtggggcgctatcctctttgtggcctggaatgccctgctgctcctcttcttctggacgcgcccagcacctggcaggccaccctcagtcagcgctctcgatggcgaccccgccagcctcacccgggaagtgattcgcctggcccaagacgccgaggtggagctggagcggcagcgtgggctgctgcagcagatcggggatgccctgtcgagccagcgggggagggtgcccaccgcggcccctcccgcccagccgc

SEQ ID NO: 151565 - DNA, 619 bp, Homo sapiens
  Payload ID: 9836
  Gene Symbol: MGAT1
  Gene Name: mannosyl (alpha-1,3-)-glycoprotein beta-1,2-N -acetylglucosaminyltransferase
  ENST ID: ENST00000514283
  CDS Start-End: 238-619
gatgtcaggggcgtgggtcctgatcacatggcagcagcccttcttggggaagtcagctacccagcagcctgtagtcctcggctacccaccctcaccgcctggggtcccatggtgcatggctgcctcctaatcccatagtccagaggaggcatccctaggactgcgggcaagggagccgggcaagcccagggcagccttgaaccgtcccctggcctgccctccccggtgggggccaggatgctgaagaagcagtctgcagggcttgtgctgtggggcgctatcctctttgtggcctggaatgccctgctgctcctcttcttctggacgcgcccagcacctggcaggccaccctcagtcagcgctctcgatggcgaccccgccagcctcacccgggaagtgattcgcctggcccaagacgccgaggtggagctggagcggcagcgtgggctgctgcagcagatcggggatgccctgtcgagccagcgggggagggtgcccaccgcggcccctcccgcccagccgcgtgtgcctgtgacccccgcgccggcggtgattcccatcctggtcatcgcctgtgaccgcagcactgttcggcgctgcctggacaagctgctgcatt

SEQ ID NO: 151566 - DNA, 878 bp, Homo sapiens
  Payload ID: 9836
  Gene Symbol: MGAT1
  Gene Name: mannosyl (alpha-1,3-)-glycoprotein beta-1,2-N -acetylglucosaminyltransferase
  ENST ID: ENST00000504671
  CDS Start-End: 280-878
ggcgagtcgaaaggcgaggcggccgcggcagcgcttgggacgcgcctgggcaccgggctcgctccctgcgccccggagcaggccaagttcggggccaggacgtcgggaggacctgagcctggcagagagcaggtgtgtgatacacgtcgtcaggtgcatggctgcctcctaatcccatagtccagaggaggcatccctaggactgcgggcaagggagccgggcaagcccagggcagccttgaaccgtcccctggcctgccctccccggtgggggccaggatgctgaagaagcagtctgcagggcttgtgctgtggggcgctatcctctttgtggcctggaatgccctgctgctcctcttcttctggacgcgcccagcacctggcaggccaccctcagtcagcgctctcgatggcgaccccgccagcctcacccgggaagtgattcgcctggcccaagacgccgaggtggagctggagcggcagcgtgggctgctgcagcagatcggggatgccctgtcgagccagcgggggagggtgcccaccgcggcccctcccgcccagccgcgtgtgcctgtgacccccgcgccggcggtgattcccatcctggtcatcgcctgtgaccgcagcactgttcggcgctgcctggacaagctgctgcattatcggccctcggctgagctcttccccatcatcgttagccaggactgcgggcacgaggagacggcccaggccatcgcctcctacggcagcgcggtcacgcacatccggcagcccgacctgagcagcattgcggtgccgccggaccaccgcaagttccagggctactacaagatcgcgcgccactaccgctgggcgctgggccaggtcttccggcagtt

SEQ ID NO: 151567 - DNA, 1104 bp, Homo sapiens
  Payload ID: 9836
  Gene Symbol: MGAT1
  Gene Name: mannosyl (alpha-1,3-)-glycoprotein beta-1,2-N -acetylglucosaminyltransferase
  ENST ID: ENST00000506889
  CDS Start-End: 644-1104
ggccagcgctggggatcgggcctggggcctggattgcgacccgcggcgggccgcggctcctagccgagacggggcgggcgggaaccaggttaacacagaaatctgcctcctgggccatgccgcttctaaggcctgtttcttctcatgagccccagcacaagacagatgggccagttctcacagtggataacttcccctgcctgagcaagagatgggatagtatctgggatctgtccatcaccagactctgagcttaataaggcagctgaatgaagggaggtaacggacccctgagaggggcactgaagtctgcagtggggggggaggggcctggacacaccccttcccccccagactcctccccgtcagggtcagctcagccatggactttggacctggataagaagagagaagctgcactttggtggatctgatttgggattctcagttttgaaaatggagtgctgaatggggatttgatgatctcctggagagcaactgagacaagagaagaaaggtgcatggctgcctcctaatcccatagtccagaggaggcatccctaggactgcgggcaagggagccgggcaagcccagggcagccttgaaccgtcccctggcctgccctccccggtgggggccaggatgctgaagaagcagtctgcagggcttgtgctgtggggcgctatcctctttgtggcctggaatgccctgctgctcctcttcttctggacgcgcccagcacctggcaggccaccctcagtcagcgctctcgatggcgaccccgccagcctcacccgggaagtgattcgcctggcccaagacgccgaggtggagctggagcggcagcgtgggctgctgcagcagatcggggatgccctgtcgagccagcgggggagggtgcccaccgcggcccctcccgcccagccgcgtgtgcctgtgacccccgcgccggcggtgattcccatcctggtcatcgcctgtgaccgcagcactgttcggcgctgcctggacaagctgctgcattatcggccctcggctgagctcttccccatcatcgttagccaggactgcgggcacgaggagacggcccaggccatcgcctc

SEQ ID NO: 151568 - DNA, 549 bp, Homo sapiens
  Payload ID: 9836
  Gene Symbol: MGAT1
  Gene Name: mannosyl (alpha-1,3-)-glycoprotein beta-1,2-N -acetylglucosaminyltransferase
  ENST ID: ENST00000512695
  CDS Start-End: 203-549
aggcttttccatggtgcttccgccaaagcttgtgaccgagtccttcccgcctagggctggtgggcctcccctgctggtgcatggctgcctcctaatcccatagtccagaggaggcatccctaggactgcgggcaagggagccgggcaagcccagggcagccttgaaccgtcccctggcctgccctccccggtgggggccaggatgctgaagaagcagtctgcagggcttgtgctgtggggcgctatcctctttgtggcctggaatgccctgctgctcctcttcttctggacgcgcccagcacctggcaggccaccctcagtcagcgctctcgatggcgaccccgccagcctcacccgggaagtgattcgcctggcccaagacgccgaggtggagctggagcggcagcgtgggctgctgcagcagatcggggatgccctgtcgagccagcgggggagggtgcccaccgcggcccctcccgcccagccgcgtgtgcctgtgacccccgcgccggcggtgattcccatcctggtcatcgcctgtgaccgcag

SEQ ID NO: 151569 - DNA, 572 bp, Homo sapiens
  Payload ID: 9836
  Gene Symbol: MGAT1
  Gene Name: mannosyl (alpha-1,3-)-glycoprotein beta-1,2-N -acetylglucosaminyltransferase
  ENST ID: ENST00000507384
  CDS Start-End: 471-572
gaaagggctggcgagtcgaaaggcgaggcggccgcggcagcgcttgggacgcgcctgggcaccgggctcgctccctgcgccccggagcaggccaagttcggggccaggacgtcgggaggacctgagcctggcagagagcaggtgtgtgatacacgtcgtcaggtgactgaccgaggaattcagggcaaacagatcatctcaatttgccttgctgatgtgccagctgggattacgctgatggatgaagctcttcagagctatgggcaatatctacatatttgattgtcaagaaacttcgtgtggaaatagcttcaaacttacacaaattgcaagaataaaaaatagtgcatggctgcctcctaatcccatagtccagaggaggcatccctaggactgcgggcaagggagccgggcaagcccagggcagccttgaaccgtcccctggcctgccctccccggtgggggccaggatgctgaagaagcagtctgcagggcttgtgctgtggggcgctatcctctttgtggcctggaatgccctgctgctcctcttcttctggacgcgcccagcacct

SEQ ID NO: 151570 - DNA, 8432 bp, Homo sapiens
  Payload ID: 9837
  Gene Symbol: MGAT4A
  Gene Name: mannosyl (alpha-1,3-)-glycoprotein beta-1,4-N -acetylglucosaminyltransferase, isozyme A
  Uniprot ID: Q9UM21
  ENST ID: ENST00000264968
  CDS Start-End: 365-1972
atgtagggataatctttatagatgcaatttagccctgccaaaagtctgtttataatgatgaatagtaaatgaagaaacttacattttgcattaccgaatgagcttgactttctcttttcccctgaataggaagggaaaaggccgaggcatcagcgtgtgaagaccgcaaagacgatcccgagtacagttgtgaacagcattgctgctaggctcctcctgcagatcatctgaaatgaacctctcttattgatttttattggcctagagccaggagtactgcattcagttgactttcagggtaaaaagaaaacagtcctggttgttgtcatcataaacatatggaccagtgtgatggtgaaatgagatgaggctccgcaatggaactgtagccactgctttagcatttatcacttccttccttactttgtcttggtatactacatggcaaaatgggaaagaaaaactgattgcttatcaacgagaattccttgctttgaaagaacgtcttcgaatagctgaacacagaatctcacagcgctcttctgaattaaatacgattgtgcaacagttcaagcgtgtaggagcagaaacaaatggaagtaaggatgcgttgaataagttttcagataataccctaaagctgttaaaggagttaacaagcaaaaaatctcttcaagtgccaagtatttattatcatttgcctcatttattgaaaaatgaaggaagtcttcaacctgctgtacagattggcaacggaagaacaggagtttcaatagtcatgggcattcccacagtgaagagagaagttaaatcttacctcatagaaactcttcattcccttattgataacctgtatcctgaagagaagttggactgtgttatagtagtcttcataggagagacagatattgattatgtacatggtgttgtagccaacctggagaaagaattttctaaagaaatcagttctggcttggtggaagtcatatcaccccctgaaagctattatcctgacttgacaaacctaaaggagacatttggagactccaaagaaagagtaagatggagaacaaagcaaaacctagattactgttttctaatgatgtatgctcaagaaaagggcatatattacattcagcttgaagatgatattattgtcaaacaaaattattttaataccataaaaaattttgcacttcaactttcttctgaggaatggatgattctagagttttcccagctgggcttcattggtaaaatgtttcaagcgccggatcttactctgattgtagaattcatattcatgttttacaaggagaaacccattgattggctcctggaccatattctctgggtgaaagtctgcaaccctgaaaaagatgcaaaacattgtgatagacagaaagcaaatctgcgaattcgcttcagaccttcccttttccaacatgttggtctgcactcatcactatcaggaaaaatccaaaaactcacggataaagattatatgaaaccattacttcttaaaatccatgtaaacccacctgcggaggtatctacttccttgaaggtctaccaagggcatacgctggagaaaacttacatgggagaggatttcttctgggctatcacaccgatagctggagactacatcttgtttaaatttgataaaccagtcaatgtagaaagttatttgttccatagcggcaaccaagaacatcctggagatattctgctaaacacaactgtggaagttttgccttttaagagtgaaggtttggaaataagcaaagaaaccaaagacaaacgattagaagatggctatttcagaataggaaaatttgagaatggtgttgcagaaggaatggtggatccaagtctcaatcccatttcagcctttcgactttcagttattcagaattctgctgtttgggccattcttaatgagattcatattaaaaaagccaccaactgatcatctgagaaaccaacacattttttcctgtgaatttgttaattaaagatagttaagcatgtatcttttttttatttctacttgaacactacctcttgtgaagtctactgtagataagacgattgtcatttccacttggaaagtgaatctcccataataattgtatttgtttgaaactaagctgtcctcagattttaacttgactcaaacatttttcaattatgacagcctgttaatatgacttgtactattttggtattatactaatacataagagttgtacatattgttacattctttaaatttgagaaaaactaatgttacatacattttatgaagggggtacttttgaggttcacttattttactattatagaccctcttttatagattatcagggattatatatataaatatataaatatacataaaaatgttatggaattaatttattagaaacacttaagaagtacatatttttgtgcagtagatttttgaatcgatactttttttgaaaaccagtttccttgcttttttaagttctttctatatttttctttggaaatgcaaacattacaaaccaatgccatttttcaaatgcactgccatttaagattgattatagatggatttcttaattgaagtacttttataatcacagtgactgaacaaaatattttcaaagacatttgtcattccttaaagccaagattttaaagactaatgtccttcctgagggttactttactatactgtgtatggtgtatagccacagaaagtcagtctgataaattttcaatgtgtaagtgtgatgcattcaacccagattattgtagacttaacttattatatttcctctgatatgtaaaatgacaaactcttctttcctttttaatctttgtctttaatccatgaattaggtgcattatctgctgttgattcttttatatctgcactcattttatgacgtcagacaaaatgttttctaggtgttgctattgtatgagtcataattggtataattttaaagaaaattgtaatattgttttttggtgaaatatattattagtagtatattttccaaaatgattttattgtagtatgaactgataagtgagtcccgtgtccaagagactgtatttattactcttaaacacgctattccaaatgatattactactataaacaaagaatattaccggtctcagcaatcagtgatctttataaaagtacttttaaaaaatgatgaattatcaccaggcgctgtggctcacgcctgtaatcccagcactttgggaggccgaggcgggcggatcacgaggtcaggagatcaagaccatcctggctaacacggtgaaaccctgtctctactaaaaatacaaaaaattagccaggcgtggtggcaggtgcctgtaatcccagctacttgggaggctgaggcaggagaatggcgtgaacccaggaggcagagctggcagtgagctgagatcgcaccactgcactccagcctgggcgacacagctagactccgtctcaaaaaaaaaaaaagatgaagtatcaacatcagttcccagccagtctgcttggacacactggggtgccacaagtgggttgcaggttggttgcagacgggcagagatggattctgctgagctttcagagtgaccactggctggggcctagcgctggggcaaggttccagctggctgcctctagcctggaggagcttcatctagttacccaatgtgctgaaccaacagcatgaaatagcatcatttcctgtgctgtgttacaaagtgcaaacgtttggaaacactgatacagtacaattatttccatcactccatgttgttataatttttagttacttttcttgattgaaaagtcaatcacattgccaaaaatgatttttatgtcagttaaaggccagttgaaatttttttattaggatgttttaaatttacttttcactttcttgaatttttttcttctcaaatttccttggcccagtgcccatgagcaaatttcattcaaaaacaggaataaccttttgtcataaaattttggcaccagcttggtatactaaattactgcaaagataactgagtaccagaagtaaaaatctctgcaggtgggcttaggagtactcttgggtccctggttcctcagttgccaactctggtttcatgaagaaagaccatgctctgaaaatctagggaggagaaagttattgcagcacctggtgtgatttgttacaacttctttaaagacagcctgcctggctagctttttcctgttttcatgcagtttgccctcccagcattggtccacctgttgttcccaagaaactcattcttgttcccaagactccttttagccaaatctttcctatcattccaggacttttttgtgcttctctccccatgaatctacccgtgcctagggtgtgtgccaggcacgtggcaggtggccagtcagcatctggatgtgagaccaattattccagcctgccctcctctttctctttttatcattttgtattatttttgagacagggtctcgctttgttgcccaggctggagtgcagtggtgctctcatagctcactgcagcctcgatctctggcctcaagcaatcctcctgcctcagcctcccaaagtgctgggattataggtgtgtgccaccatgtccagccccctttctctctcttaactccctctccctgctgtcgttgccatactcttgcatacacaatcggttgtctagtttttgattgtttgtgtgtatggtgtgtgctgtctctctgaccagatttcaggttcctgaggcgagcctgcagctcatactgctcatctgtcctctcctatggtgggtgctcagggcctctcactgttagttactccctcctttctgcccagttctgcactcaactagtagaagcagccatcctttccccaagcaggaaattgtagtggtcgcccttaagagcagtgtgagggcagaagattaagggaggggaagagtccctggaactggaagaaggtaaatactttgccttgagagggcgccgaatcattttaccaaaatagtaaatggaaaaagtgtcaaaggttgggactagttttaaaaacacatatagccagtagacacatgggggctgtttaaataaaaacatttttttacccggttctgccatcacacacactagtgacattccaagtactcagtggccatgtggagctagtggccaccacacttgacaccacggatgcagaacttttccatcactgcagaaagctctgttgaacagtactgtgtccagagtgctaattatgaacagcttagaaaccacaattaatacattctcatgaggttaaaagcagacatgggaatagaacataatgcaaatgatgatgaatattttgggtgagaagagaaagctgaggacccatttctaggattctaagatgtaagatttcttaagttctttatcttagtctcatgcattctccacatcacgcgctgtaccatactgtgtagtcagaacagacagtgtgattgaaaagctttggaaaaagttaacacaaaggattatttagcacataggctgtagatacgtatgtgtgtatttgttcaacaattggagatggttgaatacccttgaacaaagtgtgtatcttctcaaatcagtggttgcactagtcaataattagaaggtgttgttatttttaaaactataagcaaaattatgaaggcctttaaaaaatctatcataataatgaaaaagaggttgtctcccaacagtgctgtccctcaaagaaaagactggttatgtggaaacagcacgtttggagagattattctagtgaataacagtgtatatttgtggtaggcaaatttctaagaatgacccctactgacacccccaccaatgaccttgtataatatcctcccactttgagcatgggtggaacctgtttgatccatgattatatcatgttatgtagcaaaaggaagactgtctgggggtggctaatcaaatcttgtgactcctttaaaagcagagagttttctcgggctggtggcagaagtcaagagacaaagcagaaggacctcaggcaccattgctgttttaaggtagagggggctgcatgagaaggaatgcacatggctttgaggagctgagagaggccttggctaacagcaaaggagctgggaactgcagtcctacagccacgggaactgaattcagcccataagctcattcataggcttggaaaggcattcatctccagtctccagataagacccagcctggccaacactttgaatccagccttgtgagaccctaagccgagaactcacttaagcctgcttggacttctgacctacagaactatgagataataaatcagtggtgttttaagctgctaaatttgtggcaatttgttatgtaggaataggaaatgaatacagtattttaaaagaggtaaagaggaaatcttcatacttgattccctgtagtatgctggatatttcttggtaaatgcatgaataaagtctttagtagcaagtcatgtacctggaccttgttggggatgttctcgccagagatctcaattagtcttcattggacgtttgttggcaaagttgcagcatcttactgagtagcgtttggtaaaggaactgctagaatgagactataggaataggactgaaacagtgtgtaagggatcttttttatttctagaagaggtgttactttatactgatttagactgctctgagcctgtcagaagtaaattcaagaatgattaacagtggtattttagatacattaagagcaaaaataacctttgccttgtagagatcagataatctgtgtatcgagggatttaattttttttaaccaaaacttagtttctctttttatcatctagcacagatcaaatcctgtatgggccagccaaatgtttgtagtttgagaatgttttgcaaatacctctctgcttccaagccattaatagctaatgaagttttattttggtttgtccattaatttttctgcttatttttactgtattgccatgtccttgatacgagacaagtagaactaaaagagagaaaatgagaggttaagactgtcagaagatgagaaatgtgagtcataaccataccttagtgttttaagggaactttatccagtccaatccctttatagaaaaggaacttttccaagttatgttgcagtatttatagtgtgtaaaattttgtttgactttggtagttgtgcattttaaattatgaatcttatatgctacgataactagtatgcttactttctttaatgcatgtgatcatacaatgctaaaaaggtattttttaaagacccaaccaaactgaggattttgttatacatatctgtatcaacacctatatataaactcttcttcttacctgaaacactccttcacccggtttgggcactaactagatcattttcaaaggaacaaacaggaaggagcaagctggcactccagggtgcatctgagctgagaatttagaagacctcattcaagaaagtaaactgagcattgatgggaaagcactttgcgcgaagtaacattcccactgttaatgttgcagtcaaaattgtggaaaaaaaaaagtggtgctaaaattgttctgaaatgaagattgtttgttgtggggaatattttaatactcttggactttagggaggctattttatgtgtcacttgctcctagttgtttcattgtattagtaattagcaaactgtcctggaaccaagggtttggtacttttgcctgattagcattccattatttatttgaaatgctcagtgtttgctcaaatttggtgaaaatatcttttgaagacatattctctgagccttaaaaatggctgctatcgacagtactgtaagatgcactgccagtagatttgatacttttcatttcagtgtaggcagtaatgttttctaagaaagatttagaaatcagcaaagtgtaacaattgtgtttcatttatggaatggaaaaactgaagtgtcccattcagaacactttggaaaggttgtctgcattaggggatgtttctggaagcatcccttagagaagctgcctgaggaatctccttgccaggttgtaccagatttttttttttcttaaatgtattgtatatattttccttaaaatgtcttcattggctgaatgattcctatccgtagtaatattttaggtacttgttggatttttaaaggaagattatttattttcagatttgctgctataattgaaaacctagtaactggtcctgttgattgtgccttcatcactgtttctctgtgccacgaccgttcatgtgtatttgaaataaagaagtttaaaaagccatgttgaattcaagattccttctaataaaaataggtgaaacttaa

SEQ ID NO: 151571 - DNA, 8382 bp, Homo sapiens
  Payload ID: 9837
  Gene Symbol: MGAT4A
  Gene Name: mannosyl (alpha-1,3-)-glycoprotein beta-1,4-N -acetylglucosaminyltransferase, isozyme A
  Uniprot ID: Q9UM21
  ENST ID: ENST00000393487
  CDS Start-End: 315-1922
cgcagcggcggcggcagcggcggcggcggctacagcagctccgccggcagccgcgggagcacggcgacgccagcggcgggaagggaaaaggccgaggcatcagcgtgtgaagaccgcaaagacgatcccgagtacagttgtgaacagcattgctgctaggctcctcctgcagatcatctgaaatgaacctctcttattgatttttattggcctagagccaggagtactgcattcagttgactttcagggtaaaaagaaaacagtcctggttgttgtcatcataaacatatggaccagtgtgatggtgaaatgagatgaggctccgcaatggaactgtagccactgctttagcatttatcacttccttccttactttgtcttggtatactacatggcaaaatgggaaagaaaaactgattgcttatcaacgagaattccttgctttgaaagaacgtcttcgaatagctgaacacagaatctcacagcgctcttctgaattaaatacgattgtgcaacagttcaagcgtgtaggagcagaaacaaatggaagtaaggatgcgttgaataagttttcagataataccctaaagctgttaaaggagttaacaagcaaaaaatctcttcaagtgccaagtatttattatcatttgcctcatttattgaaaaatgaaggaagtcttcaacctgctgtacagattggcaacggaagaacaggagtttcaatagtcatgggcattcccacagtgaagagagaagttaaatcttacctcatagaaactcttcattcccttattgataacctgtatcctgaagagaagttggactgtgttatagtagtcttcataggagagacagatattgattatgtacatggtgttgtagccaacctggagaaagaattttctaaagaaatcagttctggcttggtggaagtcatatcaccccctgaaagctattatcctgacttgacaaacctaaaggagacatttggagactccaaagaaagagtaagatggagaacaaagcaaaacctagattactgttttctaatgatgtatgctcaagaaaagggcatatattacattcagcttgaagatgatattattgtcaaacaaaattattttaataccataaaaaattttgcacttcaactttcttctgaggaatggatgattctagagttttcccagctgggcttcattggtaaaatgtttcaagcgccggatcttactctgattgtagaattcatattcatgttttacaaggagaaacccattgattggctcctggaccatattctctgggtgaaagtctgcaaccctgaaaaagatgcaaaacattgtgatagacagaaagcaaatctgcgaattcgcttcagaccttcccttttccaacatgttggtctgcactcatcactatcaggaaaaatccaaaaactcacggataaagattatatgaaaccattacttcttaaaatccatgtaaacccacctgcggaggtatctacttccttgaaggtctaccaagggcatacgctggagaaaacttacatgggagaggatttcttctgggctatcacaccgatagctggagactacatcttgtttaaatttgataaaccagtcaatgtagaaagttatttgttccatagcggcaaccaagaacatcctggagatattctgctaaacacaactgtggaagttttgccttttaagagtgaaggtttggaaataagcaaagaaaccaaagacaaacgattagaagatggctatttcagaataggaaaatttgagaatggtgttgcagaaggaatggtggatccaagtctcaatcccatttcagcctttcgactttcagttattcagaattctgctgtttgggccattcttaatgagattcatattaaaaaagccaccaactgatcatctgagaaaccaacacattttttcctgtgaatttgttaattaaagatagttaagcatgtatcttttttttatttctacttgaacactacctcttgtgaagtctactgtagataagacgattgtcatttccacttggaaagtgaatctcccataataattgtatttgtttgaaactaagctgtcctcagattttaacttgactcaaacatttttcaattatgacagcctgttaatatgacttgtactattttggtattatactaatacataagagttgtacatattgttacattctttaaatttgagaaaaactaatgttacatacattttatgaagggggtacttttgaggttcacttattttactattatagaccctcttttatagattatcagggattatatatataaatatataaatatacataaaaatgttatggaattaatttattagaaacacttaagaagtacatatttttgtgcagtagatttttgaatcgatactttttttgaaaaccagtttccttgcttttttaagttctttctatatttttctttggaaatgcaaacattacaaaccaatgccatttttcaaatgcactgccatttaagattgattatagatggatttcttaattgaagtacttttataatcacagtgactgaacaaaatattttcaaagacatttgtcattccttaaagccaagattttaaagactaatgtccttcctgagggttactttactatactgtgtatggtgtatagccacagaaagtcagtctgataaattttcaatgtgtaagtgtgatgcattcaacccagattattgtagacttaacttattatatttcctctgatatgtaaaatgacaaactcttctttcctttttaatctttgtctttaatccatgaattaggtgcattatctgctgttgattcttttatatctgcactcattttatgacgtcagacaaaatgttttctaggtgttgctattgtatgagtcataattggtataattttaaagaaaattgtaatattgttttttggtgaaatatattattagtagtatattttccaaaatgattttattgtagtatgaactgataagtgagtcccgtgtccaagagactgtatttattactcttaaacacgctattccaaatgatattactactataaacaaagaatattaccggtctcagcaatcagtgatctttataaaagtacttttaaaaaatgatgaattatcaccaggcgctgtggctcacgcctgtaatcccagcactttgggaggccgaggcgggcggatcacgaggtcaggagatcaagaccatcctggctaacacggtgaaaccctgtctctactaaaaatacaaaaaattagccaggcgtggtggcaggtgcctgtaatcccagctacttgggaggctgaggcaggagaatggcgtgaacccaggaggcagagctggcagtgagctgagatcgcaccactgcactccagcctgggcgacacagctagactccgtctcaaaaaaaaaaaaagatgaagtatcaacatcagttcccagccagtctgcttggacacactggggtgccacaagtgggttgcaggttggttgcagacgggcagagatggattctgctgagctttcagagtgaccactggctggggcctagcgctggggcaaggttccagctggctgcctctagcctggaggagcttcatctagttacccaatgtgctgaaccaacagcatgaaatagcatcatttcctgtgctgtgttacaaagtgcaaacgtttggaaacactgatacagtacaattatttccatcactccatgttgttataatttttagttacttttcttgattgaaaagtcaatcacattgccaaaaatgatttttatgtcagttaaaggccagttgaaatttttttattaggatgttttaaatttacttttcactttcttgaatttttttcttctcaaatttccttggcccagtgcccatgagcaaatttcattcaaaaacaggaataaccttttgtcataaaattttggcaccagcttggtatactaaattactgcaaagataactgagtaccagaagtaaaaatctctgcaggtgggcttaggagtactcttgggtccctggttcctcagttgccaactctggtttcatgaagaaagaccatgctctgaaaatctagggaggagaaagttattgcagcacctggtgtgatttgttacaacttctttaaagacagcctgcctggctagctttttcctgttttcatgcagtttgccctcccagcattggtccacctgttgttcccaagaaactcattcttgttcccaagactccttttagccaaatctttcctatcattccaggacttttttgtgcttctctccccatgaatctacccgtgcctagggtgtgtgccaggcacgtggcaggtggccagtcagcatctggatgtgagaccaattattccagcctgccctcctctttctctttttatcattttgtattatttttgagacagggtctcgctttgttgcccaggctggagtgcagtggtgctctcatagctcactgcagcctcgatctctggcctcaagcaatcctcctgcctcagcctcccaaagtgctgggattataggtgtgtgccaccatgtccagccccctttctctctcttaactccctctccctgctgtcgttgccatactcttgcatacacaatcggttgtctagtttttgattgtttgtgtgtatggtgtgtgctgtctctctgaccagatttcaggttcctgaggcgagcctgcagctcatactgctcatctgtcctctcctatggtgggtgctcagggcctctcactgttagttactccctcctttctgcccagttctgcactcaactagtagaagcagccatcctttccccaagcaggaaattgtagtggtcgcccttaagagcagtgtgagggcagaagattaagggaggggaagagtccctggaactggaagaaggtaaatactttgccttgagagggcgccgaatcattttaccaaaatagtaaatggaaaaagtgtcaaaggttgggactagttttaaaaacacatatagccagtagacacatgggggctgtttaaataaaaacatttttttacccggttctgccatcacacacactagtgacattccaagtactcagtggccatgtggagctagtggccaccacacttgacaccacggatgcagaacttttccatcactgcagaaagctctgttgaacagtactgtgtccagagtgctaattatgaacagcttagaaaccacaattaatacattctcatgaggttaaaagcagacatgggaatagaacataatgcaaatgatgatgaatattttgggtgagaagagaaagctgaggacccatttctaggattctaagatgtaagatttcttaagttctttatcttagtctcatgcattctccacatcacgcgctgtaccatactgtgtagtcagaacagacagtgtgattgaaaagctttggaaaaagttaacacaaaggattatttagcacataggctgtagatacgtatgtgtgtatttgttcaacaattggagatggttgaatacccttgaacaaagtgtgtatcttctcaaatcagtggttgcactagtcaataattagaaggtgttgttatttttaaaactataagcaaaattatgaaggcctttaaaaaatctatcataataatgaaaaagaggttgtctcccaacagtgctgtccctcaaagaaaagactggttatgtggaaacagcacgtttggagagattattctagtgaataacagtgtatatttgtggtaggcaaatttctaagaatgacccctactgacacccccaccaatgaccttgtataatatcctcccactttgagcatgggtggaacctgtttgatccatgattatatcatgttatgtagcaaaaggaagactgtctgggggtggctaatcaaatcttgtgactcctttaaaagcagagagttttctcgggctggtggcagaagtcaagagacaaagcagaaggacctcaggcaccattgctgttttaaggtagagggggctgcatgagaaggaatgcacatggctttgaggagctgagagaggccttggctaacagcaaaggagctgggaactgcagtcctacagccacgggaactgaattcagcccataagctcattcataggcttggaaaggcattcatctccagtctccagataagacccagcctggccaacactttgaatccagccttgtgagaccctaagccgagaactcacttaagcctgcttggacttctgacctacagaactatgagataataaatcagtggtgttttaagctgctaaatttgtggcaatttgttatgtaggaataggaaatgaatacagtattttaaaagaggtaaagaggaaatcttcatacttgattccctgtagtatgctggatatttcttggtaaatgcatgaataaagtctttagtagcaagtcatgtacctggaccttgttggggatgttctcgccagagatctcaattagtcttcattggacgtttgttggcaaagttgcagcatcttactgagtagcgtttggtaaaggaactgctagaatgagactataggaataggactgaaacagtgtgtaagggatcttttttatttctagaagaggtgttactttatactgatttagactgctctgagcctgtcagaagtaaattcaagaatgattaacagtggtattttagatacattaagagcaaaaataacctttgccttgtagagatcagataatctgtgtatcgagggatttaattttttttaaccaaaacttagtttctctttttatcatctagcacagatcaaatcctgtatgggccagccaaatgtttgtagtttgagaatgttttgcaaatacctctctgcttccaagccattaatagctaatgaagttttattttggtttgtccattaatttttctgcttatttttactgtattgccatgtccttgatacgagacaagtagaactaaaagagagaaaatgagaggttaagactgtcagaagatgagaaatgtgagtcataaccataccttagtgttttaagggaactttatccagtccaatccctttatagaaaaggaacttttccaagttatgttgcagtatttatagtgtgtaaaattttgtttgactttggtagttgtgcattttaaattatgaatcttatatgctacgataactagtatgcttactttctttaatgcatgtgatcatacaatgctaaaaaggtattttttaaagacccaaccaaactgaggattttgttatacatatctgtatcaacacctatatataaactcttcttcttacctgaaacactccttcacccggtttgggcactaactagatcattttcaaaggaacaaacaggaaggagcaagctggcactccagggtgcatctgagctgagaatttagaagacctcattcaagaaagtaaactgagcattgatgggaaagcactttgcgcgaagtaacattcccactgttaatgttgcagtcaaaattgtggaaaaaaaaaagtggtgctaaaattgttctgaaatgaagattgtttgttgtggggaatattttaatactcttggactttagggaggctattttatgtgtcacttgctcctagttgtttcattgtattagtaattagcaaactgtcctggaaccaagggtttggtacttttgcctgattagcattccattatttatttgaaatgctcagtgtttgctcaaatttggtgaaaatatcttttgaagacatattctctgagccttaaaaatggctgctatcgacagtactgtaagatgcactgccagtagatttgatacttttcatttcagtgtaggcagtaatgttttctaagaaagatttagaaatcagcaaagtgtaacaattgtgtttcatttatggaatggaaaaactgaagtgtcccattcagaacactttggaaaggttgtctgcattaggggatgtttctggaagcatcccttagagaagctgcctgaggaatctccttgccaggttgtaccagatttttttttttcttaaatgtattgtatatattttccttaaaatgtcttcattggctgaatgattcctatccgtagtaatattttaggtacttgttggatttttaaaggaagattatttattttcagatttgctgctataattgaaaacctagtaactggtcctgttgattgtgccttcatcactgtttctctgtgccacgaccgttcatgtgtatttgaaataaagaagtttaaaaagccatgttgaattcaagattccttctaataaaaataggtgaaacttaa

SEQ ID NO: 151572 - DNA, 2018 bp, Homo sapiens
  Payload ID: 9837
  Gene Symbol: MGAT4A
  Gene Name: mannosyl (alpha-1,3-)-glycoprotein beta-1,4-N -acetylglucosaminyltransferase, isozyme A
  Uniprot ID: Q9UM21
  ENST ID: ENST00000409391
  CDS Start-End: 350-1957
aaaatcagtcaccataactttctttttacagacaaaacaaaaccaatgaggagggaatatagtttgaagctgttttgtatttttttccaggaggagaaggaccatataattccagaagggaaaaggccgaggcatcagcgtgtgaagaccgcaaagacgatcccgagtacagttgtgaacagcattgctgctaggctcctcctgcagatcatctgaaatgaacctctcttattgatttttattggcctagagccaggagtactgcattcagttgactttcagggtaaaaagaaaacagtcctggttgttgtcatcataaacatatggaccagtgtgatggtgaaatgagatgaggctccgcaatggaactgtagccactgctttagcatttatcacttccttccttactttgtcttggtatactacatggcaaaatgggaaagaaaaactgattgcttatcaacgagaattccttgctttgaaagaacgtcttcgaatagctgaacacagaatctcacagcgctcttctgaattaaatacgattgtgcaacagttcaagcgtgtaggagcagaaacaaatggaagtaaggatgcgttgaataagttttcagataataccctaaagctgttaaaggagttaacaagcaaaaaatctcttcaagtgccaagtatttattatcatttgcctcatttattgaaaaatgaaggaagtcttcaacctgctgtacagattggcaacggaagaacaggagtttcaatagtcatgggcattcccacagtgaagagagaagttaaatcttacctcatagaaactcttcattcccttattgataacctgtatcctgaagagaagttggactgtgttatagtagtcttcataggagagacagatattgattatgtacatggtgttgtagccaacctggagaaagaattttctaaagaaatcagttctggcttggtggaagtcatatcaccccctgaaagctattatcctgacttgacaaacctaaaggagacatttggagactccaaagaaagagtaagatggagaacaaagcaaaacctagattactgttttctaatgatgtatgctcaagaaaagggcatatattacattcagcttgaagatgatattattgtcaaacaaaattattttaataccataaaaaattttgcacttcaactttcttctgaggaatggatgattctagagttttcccagctgggcttcattggtaaaatgtttcaagcgccggatcttactctgattgtagaattcatattcatgttttacaaggagaaacccattgattggctcctggaccatattctctgggtgaaagtctgcaaccctgaaaaagatgcaaaacattgtgatagacagaaagcaaatctgcgaattcgcttcagaccttcccttttccaacatgttggtctgcactcatcactatcaggaaaaatccaaaaactcacggataaagattatatgaaaccattacttcttaaaatccatgtaaacccacctgcggaggtatctacttccttgaaggtctaccaagggcatacgctggagaaaacttacatgggagaggatttcttctgggctatcacaccgatagctggagactacatcttgtttaaatttgataaaccagtcaatgtagaaagttatttgttccatagcggcaaccaagaacatcctggagatattctgctaaacacaactgtggaagttttgccttttaagagtgaaggtttggaaataagcaaagaaaccaaagacaaacgattagaagatggctatttcagaataggaaaatttgagaatggtgttgcagaaggaatggtggatccaagtctcaatcccatttcagcctttcgactttcagttattcagaattctgctgtttgggccattcttaatgagattcatattaaaaaagccaccaactgatcatctgagaaaccaacacattttttcctgtgaatttgttaattaaagatagttaagcatg

SEQ ID NO: 151573 - DNA, 3709 bp, Homo sapiens
  Payload ID: 9837
  Gene Symbol: MGAT4A
  Gene Name: mannosyl (alpha-1,3-)-glycoprotein beta-1,4-N -acetylglucosaminyltransferase, isozyme A
  Uniprot ID: Q9UM21
  ENST ID: ENST00000414521
  CDS Start-End: 115-1386
agttgtaaaatacagtttgctgtttatacttcgcagccattcattttttagtgtgaagtttaatgtctttcatttttatcagttctttttttcttatggttaagccatgtgaaaatgaattacagtattacagtttcaatagtcatgggcattcccacagtgaagagagaagttaaatcttacctcatagaaactcttcattcccttattgataacctgtatcctgaagagaagttggactgtgttatagtagtcttcataggagagacagatattgattatgtacatggtgttgtagccaacctggagaaagaattttctaaagaaatcagttctggcttggtggaagtcatatcaccccctgaaagctattatcctgacttgacaaacctaaaggagacatttggagactccaaagaaagagtaagatggagaacaaagcaaaacctagattactgttttctaatgatgtatgctcaagaaaagggcatatattacattcagcttgaagatgatattattgtcaaacaaaattattttaataccataaaaaattttgcacttcaactttcttctgaggaatggatgattctagagttttcccagctgggcttcattggtaaaatgtttcaagcgccggatcttactctgattgtagaattcatattcatgttttacaaggagaaacccattgattggctcctggaccatattctctgggtgaaagtctgcaaccctgaaaaagatgcaaaacattgtgatagacagaaagcaaatctgcgaattcgcttcagaccttcccttttccaacatgttggtctgcactcatcactatcaggaaaaatccaaaaactcacggataaagattatatgaaaccattacttcttaaaatccatgtaaacccacctgcggaggtatctacttccttgaaggtctaccaagggcatacgctggagaaaacttacatgggagaggatttcttctgggctatcacaccgatagctggagactacatcttgtttaaatttgataaaccagtcaatgtagaaagttatttgttccatagcggcaaccaagaacatcctggagatattctgctaaacacaactgtggaagttttgccttttaagagtgaaggtttggaaataagcaaagaaaccaaagacaaacgattagaagatggctatttcagaataggaaaatttgagaatggtgttgcagaaggaatggtggatccaagtctcaatcccatttcagcctttcgactttcagttattcagaattctgctgtttgggccattcttaatgagcagagagttttctcgggctggtggcagaagtcaagagacaaagcagaaggacctcaggcaccattgctgttttaaggtagagggggctgcatgagaaggaatgcacatggctttgaggagctgagagaggccttggctaacagcaaaggagctgggaactgcagtcctacagccacgggaactgaattcagcccataagctcattcataggcttggaaaggcattcatctccagtctccagataagacccagcctggccaacactttgaatccagccttgtgagaccctaagccgagaactcacttaagcctgcttggacttctgacctacagaactatgagataataaatcagtggtgttttaagctgctaaatttgtggcaatttgttatgtaggaataggaaatgaatacagtattttaaaagaggtaaagaggaaatcttcatacttgattccctgtagtatgctggatatttcttggtaaatgcatgaataaagtctttagtagcaagtcatgtacctggaccttgttggggatgttctcgccagagatctcaattagtcttcattggacgtttgttggcaaagttgcagcatcttactgagtagcgtttggtaaaggaactgctagaatgagactataggaataggactgaaacagtgtgtaagggatcttttttatttctagaagaggtgttactttatactgatttagactgctctgagcctgtcagaagtaaattcaagaatgattaacagtggtattttagatacattaagagcaaaaataacctttgccttgtagagatcagataatctgtgtatcgagggatttaattttttttaaccaaaacttagtttctctttttatcatctagcacagatcaaatcctgtatgggccagccaaatgtttgtagtttgagaatgttttgcaaatacctctctgcttccaagccattaatagctaatgaagttttattttggtttgtccattaatttttctgcttatttttactgtattgccatgtccttgatacgagacaagtagaactaaaagagagaaaatgagaggttaagactgtcagaagatgagaaatgtgagtcataaccataccttagtgttttaagggaactttatccagtccaatccctttatagaaaaggaacttttccaagttatgttgcagtatttatagtgtgtaaaattttgtttgactttggtagttgtgcattttaaattatgaatcttatatgctacgataactagtatgcttactttctttaatgcatgtgatcatacaatgctaaaaaggtattttttaaagacccaaccaaactgaggattttgttatacatatctgtatcaacacctatatataaactcttcttcttacctgaaacactccttcacccggtttgggcactaactagatcattttcaaaggaacaaacaggaaggagcaagctggcactccagggtgcatctgagctgagaatttagaagacctcattcaagaaagtaaactgagcattgatgggaaagcactttgcgcgaagtaacattcccactgttaatgttgcagtcaaaattgtggaaaaaaaaaagtggtgctaaaattgttctgaaatgaagattgtttgttgtggggaatattttaatactcttggactttagggaggctattttatgtgtcacttgctcctagttgtttcattgtattagtaattagcaaactgtcctggaaccaagggtttggtacttttgcctgattagcattccattatttatttgaaatgctcagtgtttgctcaaatttggtgaaaatatcttttgaagacatattctctgagccttaaaaatggctgctatcgacagtactgtaagatgcactgccagtagatttgatacttttcatttcagtgtaggcagtaatgttttctaagaaagatttagaaatcagcaaagtgtaacaattgtgtttcatttatggaatggaaaaactgaagtgtcccattcagaacactttggaaaggttgtctgcattaggggatgtttctggaagcatcccttagagaagctgcctgaggaatctccttgccaggttgtaccagatttttttttttcttaaatgtattgtatatattttccttaaaatgtcttcattggctgaatgattcctatccgtagtaatattttaggtacttgttggatttttaaaggaagattatttattttcagatttgctgctataattgaaaacctagtaactggtcctgttgattgtgccttcatcactgtttctctgtgccacgaccgttcatgtgtatttgaaataaagaagtttaaaaagccatgttgaattcaagattccttctaataaaaataggtgaaactt

SEQ ID NO: 151574 - DNA, 683 bp, Homo sapiens
  Payload ID: 9837
  Gene Symbol: MGAT4A
  Gene Name: mannosyl (alpha-1,3-)-glycoprotein beta-1,4-N -acetylglucosaminyltransferase, isozyme A
  ENST ID: ENST00000495056
  CDS Start-End: 290-424
ctggagcggtttcattgcctacattccgcattggaaaatagaagcaggcacaatgaagggaaaaggccgaggcatcagcgtgtgaagaccgcaaagacgatcccgagtacagttgtgaacagcattgctgctaggctcctcctgcagatcatctgaaatgaacctctcttattgatttttattggcctagagccaggagtactgcattcagttgactttcagggtaaaaagaaaacagtcctggttgttgtcatcataaacatatggaccagtgtgatggtgaaatgagatgaggctccgcaatggaactgtagccactgctttagcatttatcacttccttccttactttgtcttggtatactacatggcaaaatgggaaaggtaaggaaaatgactcggaaaatgtgcatgaaatgtactagggtttttgcttggttaaggtgcctaaatgcttaggtcaaataccctggcaatctgcatgttacatgctatctgctggcagtttctttctgatataaaaatgaaacagtattcttggacagaggacacagaatttctaattccagtggggcttgttttgttttcagtttcttataattgtacttggagaaacagatactgatcagtgttttatattctaaaagacagccaagttgaataataaagactttcgttttggca

SEQ ID NO: 151575 - DNA, 2446 bp, Homo sapiens
  Payload ID: 9838
  Gene Symbol: MGAT4B
  Gene Name: mannosyl (alpha-1,3-)-glycoprotein beta-1,4-N -acetylglucosaminyltransferase, isozyme B
  Uniprot ID: Q9UQ53
  ENST ID: ENST00000292591
  CDS Start-End: 352-1998
cgcggctctcgccgcccagcccagcccagcccggcccggcccggccctgccgcggaggcgaggccgccagtgtcccgcgcccctgatatctgcagtgagcctgatacctgcctctgcccttctgagcctgttcctcttccctgagtacagggcacaaagcttgcgccctgaggggcggccggcgcgctccctggcccggtccccgcccggccccgggccccccgcccctccccgacccggggccggggcccctgccgccgccgccgccgccttccgacccctgcgccccggccccggtcccccgggccatgcagcctcggccccgcgggcgcccgccgcgcacccgaggagatgaggctccgcaatggcaccttcctgacgctgctgctcttctgcctgtgcgccttcctctcgctgtcctggtacgcggcactcagcggccagaaaggcgacgttgtggacgtttaccagcgggagttcctggcgctgcgcgatcggttgcacgcagctgagcaggagagcctcaagcgctccaaggagctcaacctggtgctggacgagatcaagagggccgtgtcagaaaggcaggcgctgcgagacggagacggcaatcgcacctggggccgcctaacagaggacccccgattgaagccgtggaacggctcacaccggcacgtgctgcacctgcccaccgtcttccatcacctgccacacctgctggccaaggagagcagtctgcagcccgcggtgcgcgtgggccagggccgcaccggagtgtcggtggtgatgggcatcccgagcgtgcggcgcgaggtgcactcgtacctgactgacactctgcactcgctcatctccgagctgagcccgcaggagaaggaggactcggtcatcgtggtgctgatcgccgagactgactcacagtacacttcggcagtgacagagaacatcaaggccttgttccccacggagatccattctgggctcctggaggtcatctcaccctccccccacttctaccctgacttctcccgcctccgagagtcctttggggaccccaaggagagagtcaggtggaggaccaaacagaacctcgattactgcttcctcatgatgtacgcgcagtccaaaggcatctactacgtgcagctggaggatgacatcgtggccaagcccaactacctgagcaccatgaagaactttgcactgcagcagccttcagaggactggatgatcctggagttctcccagctgggcttcattggtaagatgttcaagtcgctggacctgagcctgattgtagagttcattctcatgttctaccgggacaagcccatcgactggctcctggaccatattctgtgggtgaaagtctgcaaccccgagaaggatgcgaagcactgtgaccggcagaaagccaacctgcggatccgcttcaaaccgtccctcttccagcacgtgggcactcactcctcgctggctggcaagatccagaaactgaaggacaaagactttggaaagcaggcgctgcggaaggagcatgtgaacccgccagcagaggtgagcacgagcctgaagacataccagcacttcaccctggagaaagcctacctgcgcgaggacttcttctgggccttcacccctgccgcgggggacttcatccgcttccgcttcttccaacctctaagactggagcggttcttcttccgcagtgggaacatcgagcacccggaggacaagctcttcaacacgtctgtggaggtgctgcccttcgacaaccctcagtcagacaaggaggccctgcaggagggccgcaccgccaccctccggtaccctcggagccccgacggctacctccagatcggctccttctacaagggagtggcagagggagaggtggacccagccttcggccctctggaagcactgcgcctctcgatccagacggactcccctgtgtgggtgattctgagcgagatcttcctgaaaaaggccgactaagctgcgggcttctgagggtaccctgtggccagccctgaagcccacatttctgggggtgtcgtcactgccgtccccggagggccagatacggccccgcccaaagggttctgcctggcgtcgggcttgggccggcctggggtccgccgctggcccggaggccctaggagctggtgctgcccccgcccgccgggccgcggaggaggcaggcggcccccacactgtgcctgaggcccggaaccgttcgcacccggcctgccccagtcaggccgttttagaagagcttttacttgggcgcccgccgtctctggcgcgaacactggaatgcatatactactttatgtgctgtgttttttattcttggatacatttgattttttcacgtaagtccacatatacttctataagagcgtgacttgtaataaagggttaatgaagtgtgtgcctcaaa

SEQ ID NO: 151576 - DNA, 3027 bp, Homo sapiens
  Payload ID: 9838
  Gene Symbol: MGAT4B
  Gene Name: mannosyl (alpha-1,3-)-glycoprotein beta-1,4-N -acetylglucosaminyltransferase, isozyme B
  Uniprot ID: Q9UQ53
  ENST ID: ENST00000337755
  CDS Start-End: 888-2579
ctctggggtctgtgaagccaccaaggatcaaggaatggaagagctgcctgagtgtagagggagttcggtcaggcttcttaaacttggagacttggaaacagaaggccttgtaggccacataggttttcagagactcgcctggcagaggcctggagcgtcctgctgcgtggactgtgggcaccgagccaccaggaggttgttgatctcattcttgctcactggtccctgccagactggtggtgcctctctactgtcgggcagccccacctctgtgctgccccatccacctacagccctcatgcctgggcccagctggaggttctgacaggggccccctggggtggcatgcggacccttcagggtgccccaggcgcagcacaggtctccagagacacaggcaccagggcgttcagagctagtcccctcgctgctgttgactgtccttgagcagccccagggccggtttctcaacctcatttgctcacctgagcaatgaagtgaggtgggctcctggaactgcagcagccaccccccggggccatcgtgaggctaagaatccagtgcagggtgagcaaccagcgaccgctacaaggacagtgaagagctagcaccaggaccttgggtagcccacccgctggagggagcgtgtgctgcaaaaagcaagagtgggctttggaggccaacggatggagcggattcagtctgaggctgttccagcccttgcttaggatccacctacctaggtctggaaatcgtatttccacttcagatgccttctcagaggataaaataacccccggtgggggagagtactggaagagggctaattcccctggttttctccccatgagcattagtgtcagtgtaattttagagtgaccccagctatgtcacgtgtggcaggcacaagaacagatgtcaatgagctattgcagaggtggacacccagatgtgtgcgctggcacactggaggggcccgtagggtggctctagaccgccccctcgtgacggcttgcctaccacctgcaggcgacgttgtggacgtttaccagcgggagttcctggcgctgcgcgatcggttgcacgcagctgagcaggagagcctcaagcgctccaaggagctcaacctggtgctggacgagatcaagagggccgtgtcagaaaggcaggcgctgcgagacggagacggcaatcgcacctggggccgcctaacagaggacccccgattgaagccgtggaacggctcacaccggcacgtgctgcacctgcccaccgtcttccatcacctgccacacctgctggccaaggagagcagtctgcagcccgcggtgcgcgtgggccagggccgcaccggagtgtcggtggtgatgggcatcccgagcgtgcggcgcgaggtgcactcgtacctgactgacactctgcactcgctcatctccgagctgagcccgcaggagaaggaggactcggtcatcgtggtgctgatcgccgagactgactcacagtacacttcggcagtgacagagaacatcaaggccttgttccccacggagatccattctgggctcctggaggtcatctcaccctccccccacttctaccctgacttctcccgcctccgagagtcctttggggaccccaaggagagagtcaggtggaggaccaaacagaacctcgattactgcttcctcatgatgtacgcgcagtccaaaggcatctactacgtgcagctggaggatgacatcgtggccaagcccaactacctgagcaccatgaagaactttgcactgcagcagccttcagaggactggatgatcctggagttctcccagctgggcttcattggtaagatgttcaagtcgctggacctgagcctgattgtagagttcattctcatgttctaccgggacaagcccatcgactggctcctggaccatattctgtgggtgaaagtctgcaaccccgagaaggatgcgaagcactgtgaccggcagaaagccaacctgcggatccgcttcaaaccgtccctcttccagcacgtgggcactcactcctcgctggctggcaagatccagaaactgaaggacaaagactttggaaagcaggcgctgcggaaggagcatgtgaacccgccagcagaggtgagcacgagcctgaagacataccagcacttcaccctggagaaagcctacctgcgcgaggacttcttctgggccttcacccctgccgcgggggacttcatccgcttccgcttcttccaacctctaagactggagcggttcttcttccgcagtgggaacatcgagcacccggaggacaagctcttcaacacgtctgtggaggtgctgcccttcgacaaccctcagtcagacaaggaggccctgcaggagggccgcaccgccaccctccggtaccctcggagccccgacggctacctccagatcggctccttctacaagggagtggcagagggagaggtggacccagccttcggccctctggaagcactgcgcctctcgatccagacggactcccctgtgtgggtgattctgagcgagatcttcctgaaaaaggccgactaagctgcgggcttctgagggtaccctgtggccagccctgaagcccacatttctgggggtgtcgtcactgccgtccccggagggccagatacggccccgcccaaagggttctgcctggcgtcgggcttgggccggcctggggtccgccgctggcccggaggccctaggagctggtgctgcccccgcccgccgggccgcggaggaggcaggcggcccccacactgtgcctgaggcccggaaccgttcgcacccggcctgccccagtcaggccgttttagaagagcttttacttgggcgcccgccgtctctggcgcgaacactggaatgcatatactactttatgtgctgtgttttttattcttggatacatttgattttttcacgtaagtccacatatacttctataagagcgtgacttgtaataaagggttaatgaagtgtgtgcctcaaa

SEQ ID NO: 151577 - DNA, 1080 bp, Homo sapiens
  Payload ID: 9838
  Gene Symbol: MGAT4B
  Gene Name: mannosyl (alpha-1,3-)-glycoprotein beta-1,4-N -acetylglucosaminyltransferase, isozyme B
  ENST ID: ENST00000523108
  CDS Start-End: 481-1080
acttgtttgctgctggagccgcggcgttctcctcgggcccgggccgcgcccgtgggtgctccggaccggactccgcgggcgcagctgtcccgacgctgagctggggacccgtggggttctcggagaggggcagagacccaaggcgacgttgtggacgtttaccagcgggagttcctggcgctgcgcgatcggttgcacgcagctgagcaggagagcctcaagcgctccaaggagctcaacctggtgctggacgagatcaagagggccgtgtcagaaaggcaggcgctgcgagacggagacggcaatcgcacctggggccgcctaacagaggacccccgattgaagccgtggaacggctcacaccggcacgtgctgcacctgcccaccgtcttccatcacctgccacacctgctggccaaggagagcagtctgcagcccgcggtgcgcgtgggccagggccgcaccggagtgtcggtggtgatgggcatcccgagcgtgcggcgcgaggtgcactcgtacctgactgacactctgcactcgctcatctccgagctgagcccgcaggagaaggaggactcggtcatcgtggtgctgatcgccgagactgactcacagtacacttcggcagtgacagagaacatcaaggccttgttccccacggagatccattctgggctcctggaggtcatctcaccctccccccacttctaccctgacttctcccgcctccgagagtcctttggggaccccaaggagagagtcaggtggaggaccaaacagaacctcgattactgcttcctcatgatgtacgcgcagtccaaaggcatctactacgtgcagctggaggatgacatcgtggccaagcccaactacctgagcaccatgaagaactttgcactgcagcagccttcagaggactggatgatcctggagttctcccagctgggcttcattggtaagatgttcaagtcgctggacctgagcctgattgtagagttcattctcatgttctaccgggacaagcccatcgactggctcctggaccatattctgtgggtgaaagtctgcaaccccgagaag

SEQ ID NO: 151578 - DNA, 732 bp, Homo sapiens
  Payload ID: 9838
  Gene Symbol: MGAT4B
  Gene Name: mannosyl (alpha-1,3-)-glycoprotein beta-1,4-N -acetylglucosaminyltransferase, isozyme B
  ENST ID: ENST00000518867
  CDS Start-End: 1-732
acagtacacttcggcagtgacagagaacatcaaggccttgttccccacggagatccattctgggctcctggaggtcatctcaccctccccccacttctaccctgacttctcccgcctccgagagtcctttggggaccccaaggagagagtcaggtggaggaccaaacagaacctcgattactgcttcctcatgatgtacgcgcagtccaaaggcatctactacgtgcagctggaggatgacatcgtggccaagcccaactacctgagcaccatgaagaactttgcactgcagcagccttcagaggactggatgatcctggagttctcccagctgggcttcattggtaagatgttcaagtcgctggacctgagcctgattgtagagttcattctcatgttctaccgggacaagcccatcgactggctcctggaccatattctgtgggtgaaagtctgcaaccccgagaaggatgcgaagcactgtgaccggcagaaagccaacctgcggatccgcttcaaaccgtccctcttccagcacgtgggcactcactcctcgctggctggcaagatccagaaactgaaggacaaagactttggaaagcaggcgctgcggaaggagcatgtgaacccgccagcagagtgggaacatcgagcacccggaggacaagctcttcaacacgtctgtggaggtgctgcccttcgacaaccctcagtcagacaaggaggccctgc

SEQ ID NO: 151579 - DNA, 1568 bp, Homo sapiens
  Payload ID: 9838
  Gene Symbol: MGAT4B
  Gene Name: mannosyl (alpha-1,3-)-glycoprotein beta-1,4-N -acetylglucosaminyltransferase, isozyme B
  ENST ID: ENST00000518778
  CDS Start-End: 1-1120
ggaggactcggtcatcgtggtgctgatcgccgagactgactcacagtacacttcggcagtgacagagaacatcaaggccttgttccccacggagatccattctgggctcctggaggtcatctcaccctccccccacttctaccctgacttctcccgcctccgagagtcctttggggaccccaaggagagagtcaggtggaggaccaaacagaacctcgattactgcttcctcatgatgtacgcgcagtccaaaggcatctactacgtgcagctggaggatgacatcgtggccaagcccaactacctgagcaccatgaagaactttgcactgcagcagccttcagaggactggatgatcctggagttctcccagctgggcttcattggtaagatgttcaagtcgctggacctgagcctgattgtagagttcattctcatgttctaccgggacaagcccatcgactggctcctggaccatattctgtgggtgaaagtctgcaaccccgagaaggatgcgcactgtgaccggcagaaagccaacctgcggatccgcttcaaaccgtccctcttccagcacgtgggcactcactcctcgctggctggcaagatccagaaactgaaggacaaagactttggaaagcaggcgctgcggaaggagcatgtgaacccgccagcagaggtgagcacgagcctgaagacataccagcacttcaccctggagaaagcctacctgcgcgaggacttcttctgggccttcacccctgccgcgggggacttcatccgcttccgcttcttccaacctctaagactggagcggttcttcttccgcagtgggaacatcgagcacccggaggacaagctcttcaacacgtctgtggaggtgctgcccttcgacaaccctcagtcagacaaggaggccctgcaggagggccgcaccgccaccctccggtaccctcggagccccgacggctacctccagatcggctccttctacaagggagtggcagagggagaggtggacccagccttcggccctctggaagcactgcgcctctcgatccagacggactcccctgtgtgggtgattctgagcgagatcttcctgaaaaaggccgactaagctgcgggcttctgagggtaccctgtggccagccctgaagcccacatttctgggggtgtcgtcactgccgtccccggagggccagatacggccccgcccaaagggttctgcctggcgtcgggcttgggccggcctggggtccgccgctggcccggaggccctaggagctggtgctgcccccgcccgccgggccgcggaggaggcaggcggcccccacactgtgcctgaggcccggaaccgttcgcacccggcctgccccagtcaggccgttttagaagagcttttacttgggcgcccgccgtctctggcgcgaacactggaatgcatatactactttatgtgctgtgttttttattcttggatacatttgattttttcacgtaagtccacatatacttctataagagcgtgacttgtaataaagggttaatgaagtgtgtgcctcaaa

SEQ ID NO: 151580 - DNA, 1096 bp, Homo sapiens
  Payload ID: 9838
  Gene Symbol: MGAT4B
  Gene Name: mannosyl (alpha-1,3-)-glycoprotein beta-1,4-N -acetylglucosaminyltransferase, isozyme B
  ENST ID: ENST00000520969
  CDS Start-End: 1-722
gtaagatgttcaagtcgctggacctgagcctgattgtagagttcattctcatgttctaccgggacaagcccatcgactggctcctggaccatattctgtgggtgaaagtctgcaaccccgagaaggatgcgaagcactgtgaccggcagaaagccaacctgcggatccgcttcaaaccgtccctcttccagcacgtgggcactcactcctcgctggctggcaagatccagaaactgaaggacaaagactttggaaagcaggcgctgcggaaggagcatgtgaacccgccagcagaggtgagcacgagcctgaagacataccagcacttcaccctggagaaagcctacctgcgcgaggacttcttctgggccttcacccctgccgcgggggacttcatccgcttccgcttcttccaacctctaagactggagcgtgggaacatcgagcacccggaggacaagctcttcaacacgtctgtggaggtgctgcccttcgacaaccctcagtcagacaaggaggccctgcaggagggccgcaccgccaccctccggtaccctcggagccccgacggctacctccagatcggctccttctacaagggagtggcagagggagaggtggacccagccttcggccctctggaagcactgcgcctctcgatccagacggactcccctgtgtgggtgattctgagcgagatcttcctgaaaaaggccgactaagctgcgggcttctgagggtaccctgtggccagccctgaagcccacatttctgggggtgtcgtcactgccgtccccggagggccagatacggccccgcccaaagggttctgcctggcgtcgggcttgggccggcctggggtccgccgctggcccggaggccctaggagctggtgctgcccccgcccgccgggccgcggaggaggcaggcggcccccacactgtgcctgaggcccggaaccgttcgcacccggcctgccccagtcaggccgttttagaagagcttttacttgggcgcccgccgtctctggcgcgaacactggaatgcatatactactttatgtgctgtgttttttattcttggatacatttgattt

SEQ ID NO: 151581 - DNA, 799 bp, Homo sapiens
  Payload ID: 9838
  Gene Symbol: MGAT4B
  Gene Name: mannosyl (alpha-1,3-)-glycoprotein beta-1,4-N -acetylglucosaminyltransferase, isozyme B
  ENST ID: ENST00000520918
  CDS Start-End: 5-478
agctatgtcacgtgtggcaggcacaagaacagatgtcaatgagctattgcagaggtggacacccagatgtgtgcgctggcacactggaggggcccgtagggtggctctagaccgccccctcgtgacggcttgcctaccacctgcaggcgacgttgtggacgtttaccagcgggagttcctggcgctgcgcgatcggttgcacgcagctgagcaggagagcctcaagcgctccaaggagctcaacctggtgctggacgagatcaagagggccgtgtcagaaaggcaggcgctgcgagacggagacggcaatcgcacctggggccgcctaacagaggacccccgattgaagccgtggaacggctcacaccggcacgtgctgcacctgcccaccgtcttccatcacctgccacacctgctggccaaggagagcagtctgcagcccgcggtgcgcgtgggccagggccgcaccggagactgactcacagtacacttcggcagtgacagagaacatcaaggccttgttccccacggagatccattctgggctcctggaggtcatctcaccctccccccacttctaccctgacttctcccgcctccgagagtcctttggggaccccaaggagagagtcaggtggaggaccaaacagaacctcgattactgcttcctcatgatgtacgcgcagtccaaaggcatctactacgtgcagctggaggatgacatcgtggccaagcccaactacctgagcaccatgaagaactttgcactgcagcagccttcagaggactggatgatcct

SEQ ID NO: 151582 - DNA, 1686 bp, Homo sapiens
  Payload ID: 9838
  Gene Symbol: MGAT4B
  Gene Name: mannosyl (alpha-1,3-)-glycoprotein beta-1,4-N -acetylglucosaminyltransferase, isozyme B
  ENST ID: ENST00000519836
  CDS Start-End: 1-1289
ctgagcaggagagcctcaagcgctccaaggagctcaacctggtgctggacgagatcaagagggccgtgtcagaaaggcaggcgctgcgagacggagacggcaatcgcacctggggccgcctaacagaggacccccgattgaagccgtggaacggctcacaccggcacgtgctgcacctgcccaccgtcttccatcacctgccacacctgctggccaaggagagcagtctgcagcccgcggtgcgcgtgggccagggccgcaccggagtgtcggtggtgatgggcatcccgagcgtgcggcgcgaggtgcactcgtacctgactgacactctgcactcgctcatctccgagctgagcccgcaggagaaggaggactcggtcatcgtggtgctgatcgccgagactgactcacagtacacttcggcagtgacagagaacatcaaggccttgttccccacggagatccattctgggctcctggaggtcatctcaccctccccccacttctaccctgacttctcccgcctccgagagtcctttggggaccccaaggagagagtcaggtggaggaccaaacagaacctcgattactgcttcctcatgatgtacgcgcagtccaaaggcatctactacgtgcagctggaggatgacatcgtggccaagcccaactacctgagcaccatgaagaactttgcactgcagcagccttcagaggactggatgatcctggagttctcccagctgggcttcattggacaaagactttggaaagcaggcgctgcggaaggagcatgtgaacccgccagcagaggtgagcacgagcctgaagacataccagcacttcaccctggagaaagcctacctgcgcgaggacttcttctgggccttcacccctgccgcgggggacttcatccgcttccgcttcttccaacctctaagactggagcggttcttcttccgcagtgggaacatcgagcacccggaggacaagctcttcaacacgtctgtggaggtgctgcccttcgacaaccctcagtcagacaaggaggccctgcaggagggccgcaccgccaccctccggtaccctcggagccccgacggctacctccagatcggctccttctacaagggagtggcagagggagaggtggacccagccttcggccctctggaagcactgcgcctctcgatccagacggactcccctgtgtgggtgattctgagcgagatcttcctgaaaaaggccgactaagctgcgggcttctgagggtaccctgtggccagccctgaagcccacatttctgggggtgtcgtcactgccgtccccggagggccagatacggccccgcccaaagggttctgcctggcgtcgggcttgggccggcctggggtccgccgctggcccggaggccctaggagctggtgctgcccccgcccgccgggccgcggaggaggcaggcggcccccacactgtgcctgaggcccggaaccgttcgcacccggcctgccccagtcaggccgttttagaagagcttttacttgggcgcccgccgtctctggcgcgaacactggaatgcatatactactttatgtgctgtgttttttattcttggatacatttgattttttcacgtaagtccacatatacttctataagagcgtgacttgtaataaagggttaatgaag

SEQ ID NO: 151583 - DNA, 964 bp, Homo sapiens
  Payload ID: 9838
  Gene Symbol: MGAT4B
  Gene Name: mannosyl (alpha-1,3-)-glycoprotein beta-1,4-N -acetylglucosaminyltransferase, isozyme B
  ENST ID: ENST00000520875
  CDS Start-End: 1-964
gttccccacggagatccattctgggctcctggaggtcatctcaccctccccccacttctaccctgacttctcccgcctccgagagtcctttggggaccccaaggagagagtcaggtggaggaccaaacagaacctcgattactgcttcctcatgatgtacgcgcagtccaaaggcatctactacgtgcagctggaggatgacatcgtggccaagcccaactacctgagcaccatgaagaactttgcactgcagcagccttcagaggactggatgatcctggagttctcccagctgggcttcattggtaagatgttcaagtcgctggacctgagcctgattgtagagttcattctcatgttctaccgggacaagcccatcgactggctcctggaccatattctgtgggtgaaagtctgcaaccccgagaaggatgcggccgggatcaaggtcggggcccacgccatcactgctgtccctcctccgctgcaggacaaagactttggaaagcaggcgctgcggaaggagcatgtgaacccgccagcagaggtgagcacgagcctgaagacataccagcacttcaccctggagaaagcctacctgcgcgaggacttcttctgggccttcacccctgccgcgggggacttcatccgcttccgcttcttccaacctctaagactggagcggttcttcttccgcagtgggaacatcgagcacccggaggacaagctcttcaacacgtctgtggaggtgctgcccttcgacaaccctcagtcagacaaggaggccctgcaggagggccgcaccgccaccctccggtaccctcggagccccgacggctacctccagatcggctccttctacaagggagtggcagagggagaggtggacccagccttcggccctctggaagcactgcgcctctcgatccagacggactcccctgtgtgggtgattctgagcgag

SEQ ID NO: 151584 - DNA, 543 bp, Homo sapiens
  Payload ID: 9838
  Gene Symbol: MGAT4B
  Gene Name: mannosyl (alpha-1,3-)-glycoprotein beta-1,4-N -acetylglucosaminyltransferase, isozyme B
  ENST ID: ENST00000523329
  CDS Start-End: 1-451
gctgctgctcttctgcctgtgcgccttcctctcgctgtcctggtacgcggcactcagcggccagaaaggcgacgttgtggacgtttaccagcgggagttcctggcgctgcgcgatcggttgcacgcagctgagcaggagagcctcaagcgctccaaggagctcaacctggtgctggacgagatcaagagggccgtgtcagaaaggcaggcgctgcgagacggagacggcaatcgcacctggggccgcctaacaggacccccgattgaagccgtggaacggctcacaccggcacgtgctgcacctgcccaccgtcttccatcacctgccacacctgctggccaaggagagcagtctgcagcccgcggtgcgcgtgggccagggccgcaccggagtgtcggtggtgatgggcatcccgagcgtgcggcgcgaggtgcactcgtacctgactgacactctgcactcgctcatctccgagctgagcccgcaggagaaggaggactcggtcatcgtggtgctgatcgccgagactgactcacagtaca

SEQ ID NO: 151585 - DNA, 983 bp, Homo sapiens
  Payload ID: 9838
  Gene Symbol: MGAT4B
  Gene Name: mannosyl (alpha-1,3-)-glycoprotein beta-1,4-N -acetylglucosaminyltransferase, isozyme B
  ENST ID: ENST00000518980
  CDS Start-End: 1-922
cacttcggcagtgacagagaacatcaaggccttgttccccacggagatccattctgggctcctggaggtcatctcaccctccccccacttctaccctgacttctcccgcctccgagagtcctttggggaccccaaggagagagtcaggtggaggaccaaacagaacctcgattactgcttcctcatgatgtacgcgcagtccaaaggcatctactacgtgcagctggaggatgacatcgtggccaagcccaactacctgagcaccatgaagaactttgcactgcagcagccttcagaggactggatgatcctggagttctcccagctgggcttcattgcacgtgggcactcactcctcgctggctggcaagatccagaaactgaaggacaaagactttggaaagcaggcgctgcggaaggagcatgtgaacccgccagcagaggtgagcacgagcctgaagacataccagcacttcaccctggagaaagcctacctgcgcgaggacttcttctgggccttcacccctgccgcgggggacttcatccgcttccgcttcttccaacctctaagactggagcggttcttcttccgcagtgggaacatcgagcacccggaggacaagctcttcaacacgtctgtggaggtgctgcccttcgacaaccctcagtcagacaaggaggccctgcaggagggccgcaccgccaccctccggtaccctcggagccccgacggctacctccagatcggctccttctacaagggagtggcagagggagaggtggacccagccttcggccctctggaagcactgcgcctctcgatccagacggactcccctgtgtgggtgattctgagcgagatcttcctgaaaaaggccgactaagctgcgggcttctgagggtaccctgtggccagccctgaagcccacatttctgggggtgtcgtcactgccgtccccggagggccagatacggccccgccc

SEQ ID NO: 151586 - DNA, 2687 bp, Homo sapiens
  Payload ID: 9839
  Gene Symbol: MGAT2
  Gene Name: mannosyl (alpha-1,6-)-glycoprotein beta-1,2-N -acetylglucosaminyltransferase
  Uniprot ID: Q10469
  ENST ID: ENST00000305386
  CDS Start-End: 475-1818
cggggcagttgcgggttgtcataacggtccccgccggagtgaggcgaggccgcgtcgctcagttctggccgtctagggcccctgtaaggatgagagcgcagaggacgcagggccgctggaggcgcaggtaacgaagctagggtgcggttgggaccgcggctgagctttttccgggacccgtggtgctgaatggagaggacggagacgaagccgagccgcggctcctagcggcggcgccgatgctcgagctgtagctgccaggcgaggatgtgtggagcgcaggcggcgcggggtaaatgagaggtctcgggccccaggacccccggggcccgggatgagttagcgagggcagccgcgggggccagttccgaccgtgacaggccaaggcgacggccgccgcccgcccgccccttccgtgcagaagcagctgctcctttccgcgcccgcccgcctgcgctcccggccctggagaccatgaggttccgcatctacaaacggaaggtgctaatcctgacgctcgtggtggccgcctgcggcttcgtcctctggagcagcaatgggcgacaaaggaagaacgaggccctcgccccaccgttgctggacgccgaacccgcgcggggtgccggcggccgcggtggggaccacccctctgtggctgtgggcatccgcagggtctccaacgtgtcggcggcttccctggtcccggcggtcccccagcccgaggcggacaacctgacgctgcggtaccggtccctggtgtaccagctgaactttgatcagaccctgaggaatgtagataaggctggcacctgggccccccgggagctggtgctggtggtccaggtgcataaccggcccgaatacctcagactgctgctggactcacttcgaaaagcccagggaattgacaacgtcctcgtcatctttagccatgacttctggtcgaccgagatcaatcagctgatcgccggggtgaatttctgtccggttctgcaggtgttctttcctttcagcattcagttgtaccctaacgagtttccaggtagtgaccctagagattgtcccagagacctgccgaagaatgccgctttgaaattggggtgcatcaatgctgagtatcccgactccttcggccattatagagaggccaaattctcccagaccaaacatcactggtggtggaagctgcattttgtgtgggaaagagtgaaaattcttcgagattatgctggccttatacttttcctagaagaggatcactacttagccccagacttttaccatgtcttcaaaaagatgtggaaactgaagcagcaagagtgccctgaatgtgatgttctctccctggggacctatagtgccagtcgcagtttctatggcatggctgacaaggtagatgtgaaaacttggaaatccacagagcacaatatgggtctagccttgacccggaatgcctatcagaagctgatcgagtgcacagacactttctgtacttatgatgattataactgggactggactcttcaatacttgactgtatcttgtcttccaaaattctggaaagtgctggttcctcaaattcctaggatctttcatgctggagactgtggtatgcatcacaagaaaacctgtagaccatccactcagagtgcccaaattgagtcactcttaaataataacaaacaatacatgtttccagaaactctaactatcagtgaaaagtttactgtggtagccatttccccacctagaaaaaatggagggtggggagatattagggaccatgaactctgtaaaagttatagaagactgcagtgaaaatcacagttacaaaagcgacagtcttctatttttgatatttgtccaaacaggacatacaattgaataaaagagtttaggaactggtttctgctttaatacaaaaacaaaatcttgtaaaaggtgtccaaatacatagtaatcttttccagttatgtctgattaagatttaaaactgaaggtttcattttgggagtagggttttaaagctcaatctgttatctgctaaaattgattattgttgatatgagagaagaggggaaattttatttaaattgcatttattaatctttttatctgaaactttgtacacttttccactttcaaaacctattttaagtacagcaaaatttatttaaaactgtcatagcagtaaaaagtattacgatgaaattgttagggtattaatggaacaaacccagtttcactctcttgacacacttattaggaagggattgcttcactggtttaataatttaaaagttatgtttgttaaacaccctgtcagaacagtcattttcagtattagattcctgtactattgtgttttgagtgtgttttggaaccttcatagaacacactttcttttggaatgtatttgattgataagaaagtttaaacattgttttcacctcaatgtagaaatacagtggttttgtttttttttttcttttagtgctgacaaaataaaatactcatttttgcataaaaaggttcctaatccttttgcagaataagttttgtttactctttataccaaaattcagtgaaggcattctacaagttttgagttagcattacattttaatatttactattgctacattgtataattgagtttgaaataaaacccagcttatgacaatgca

SEQ ID NO: 151587 - DNA, 8144 bp, Homo sapiens
  Payload ID: 9840
  Gene Symbol: MGAT5
  Gene Name: mannosyl (alpha-1,6-)-glycoprotein beta-1,6-N-acetyl -glucosaminyltransferase
  Uniprot ID: Q09328
  ENST ID: ENST00000281923
  CDS Start-End: 146-2371
cagcagaatggaagtgaggaaaggcaaccagctgacacaggagccagagtgagaccagcagactctcacactcaacctacaccatgaatttgtgtctatcttctacgcgttaagagccaaggacaggtgaagttgccagagagcaatggctctcttcactccgtggaagttgtcctctcagaagctgggctttttcctggtgacttttggcttcatttggggtatgatgcttctgcactttaccatccagcagcgaactcagcctgaaagcagctccatgctgcgcgagcagatcctggacctcagcaaaaggtacatcaaggcactggcagaagaaaacaggaatgtggtggatgggccatacgctggagtcatgacagcttatgatctgaagaaaacccttgctgtgttattagataacattttgcagcgcattggcaagttggagtcgaaggtggacaatcttgttgtcaatggcaccggaacaaactcaaccaactccactacagctgttcccagcttggttgcacttgagaaaattaatgtggcagatatcattaacggagctcaagaaaaatgtgtattgcctcctatggacggctaccctcactgtgagggaaagatcaagtggatgaaagacatgtggcgttcagatccctgctacgcagactatggagtggatggatccacctgctctttttttatttacctcagtgaggttgaaaattggtgtcctcatttaccttggagagcaaaaaatccctacgaagaagctgatcataattcattggcggaaattcgtacagattttaatattctctacagtatgatgaaaaagcatgaagaattccggtggatgagactacggatccggcgaatggctgacgcatggatccaagcaatcaagtccctggcagaaaagcagaaccttgaaaagagaaagcggaagaaagtcctcgttcacctgggactcctgaccaaggaatctggatttaagattgcagagacagctttcagtggtggccctcttggtgaattagttcaatggagtgatttaattacatctctgtacttactgggccatgacattaggatttcagcttcactggctgagctcaaggaaatcatgaagaaggttgtaggaaaccgatctggctgcccaactgtaggagacagaattgttgagctcatttacattgatattgtaggacttgctcaattcaagaaaactcttggaccatcctgggttcattaccagtgcatgctccgagtccttgattcatttggtactgaacccgaatttaatcatgcaaattatgcccaatcgaaaggccacaagaccccttggggaaaatggaatctgaaccctcagcagttttataccatgttccctcataccccagacaacagctttctggggtttgtggttgagcagcacctgaactccagtgatatccaccacattaatgaaatcaaaaggcagaaccagtcccttgtgtatggcaaagtggatagcttctggaagaataagaagatctacttggacattattcacacatacatggaagtgcatgcaactgtttatggctccagcacaaagaatattcccagttacgtgaaaaaccatggtatcctcagtggacgggacctgcagttccttcttcgagaaaccaagttgtttgttggacttgggttcccttacgagggcccagctcccctggaagctatcgcaaatggatgtgcttttctgaatcccaagttcaacccacccaaaagcagcaaaaacacagactttttcattggcaagccaactctgagagagctgacatcccagcatccttacgctgaagttttcatcgggcggccacatgtgtggactgttgacctcaacaatcaggaggaagtagaggatgcagtgaaagcaattttaaatcagaagattgagccatacatgccatatgaatttacgtgcgaggggatgctacagagaatcaatgctttcattgaaaaacaggacttctgccatgggcaagtgatgtggccacccctcagcgccctacaggtcaagcttgctgagcccgggcagtcctgcaagcaggtgtgccaggagagccagctcatctgcgagccttctttcttccagcacctcaacaaggacaaggacatgctgaagtacaaggtgacctgccaaagctcagagctggccaaggacatcctggtgccctcctttgaccctaagaataagcactgtgtgtttcaaggtgacctcctgctcttcagctgtgcaggcgcccaccccaggcaccagagggtctgcccctgccgggacttcatcaagggccaggtggctctctgcaaagactgcctatagcagctacctgctcagccctgcaccatgctgctggggaagacagtggccccagccccgtcaggcagggccagggacagaagtcatgcagggactctggcaagagcctgaactttttcgtagaaggttctgaattggcattgcccttgctgcactccgagcaacccagtggagtcttcaccaaaacaaaacaagagcgtatgtcaggccaggagcctggcttgtccctggcacaacatcatttctgtttctcaaggagcaactgtgggaagactgtcactgcagctgctccagggcaaaagaaagtctcaagagtcctttaaaacaaaacaggaggaattgagctgatgggaaagaactctgaatgggaatattcctaaacccattaacttatttattcgggtgggagggaggggaccgcgggagggagaggagggattgatcacaggcttcttttatttccactgttaatcatccaccttcactatactgttgttctgtctgctttgggcagggtgcaggagagagaccgtgtgccgtggggctggtggcctgctcagggacagccatggggacctggcagctcaaaacagatggcagcagaacaaaagaaacttttgctttggaagcacagccaaactccccagggcatcgtcatagatggcacctagagcatgggctgcctcagtcagggggacgtgcctgtgttgtccagagagcccagccagggacgaaaaaggagatgaggcccctttcctccatgtccccatgcccagacacataccttggccgtaatttcttttagaatccctttgggaaggaaatacaggattgagggattttggagtttctggtaaactcaccctccctccagccccgctatgaggaggaaagtagagatgaaagactcacgctgttcatggacttggagaggattatctttgagccaagatttggacaggagtgaagtcggtccttaagaatttgtggcgcgaccggagctgggctcctgacaggtgggcttgtgttgtgtcccctctgatggcaccaaagtccagggaagggggctcttgatgtctgctgggggagtgggggcagctcaggatgaatgcagtgccctgtcctggctactcacctgagggtgtagctcgcaaaggtgggaatctggtgctggcttttccttcaggcaggatcactctgacttgttgagtaatcagtcatcaggttggcctggtcagacacactggaccccaccttccaaaccctggacccccccatgctctgcctttgtataagttcccaccccactgaatcattgctgccatgctctgtacaagtttgtaagtttctgaaaagcccctgacatctccatgctgatgcaagtgagaccccttctgcctaatgtgagcggttggcgtcctccacttggcctctgctgggcgcctcagtcgctcaatgatgtgctctgtgccggggcttccaagcacccttcctgctaacagagggcggcccagtggagcctccgctgggcagaactgatgggcaaggcgtaatggctggtagctttcagaatgtgagggaaaggaagaattccgcttcatggggactagagttagtgtggggcctttaagtctgggaagttacattctgcttctttctcaattgctacacaaatgtgcagccagccttttttcttaggcccactgagatccctgctcagtgcgtctcaattgtatctccagtctaagaggagggtggggggcacccggggcctcctccactccttaggtggcccccaagcacatctgccaggtagagtaccatggggaggcctctgccctgagcatcatcacaggggcgcctccagacctggctgagaatagcctctgcttgggcctaggaagaagggcagaagtccaaaggaaaccttggtgagtgagtgtgtgtgtgtgtgtgtgtgtgtgtgtgtgtgtgtgtgtgtgtgtgtatgagcctgtgcatttcttttaagcaagggcagtttcctgcagtaggagggcagatgactggcatccttgctgtaaggaagagctttttccttgtgaatgggcctcttggctgtaccctagggtgtgggaatttgctagagttccctgacctgcaatccctgggccagtgccgccctctcctgggctcttccaggagcattgaacactgaggatgtcaatgcaagtatctgaccaacagggggagcctgcaggccgagcaaagtttaacccacttagccactgctacttaagcaaggaagctgaaaggtaaccttagccctgccttgtgttccaaaagctgcaaggatcatttgctggctgtccctaagttcaaggcctccctaccttccccttcttttccaagtcacaacccgccctgcccgggccagacagcccagaagaacacttttctgccatttaaaaatccctctttcatcccccccagtccagtattgagtggaagtgcgccggagttccactgacagggcagctgctcttggagcaaacaagcccacactccagttgtttagggcattatctgaagagtcagtgacccctgaatgtgtactggctcccaggcctcctcagacttggcccaggtctagtcagtgatcctggagaggaaactggggagggggcttccaactgccctgcatggaagaggagaggaaggtgcccctgtgtgggctggaagcctgcggaggttttgccattgctgatcttgatagaatcctaaaccgatttatagctgataacagttccatggggagagaaatcctaagttatgattaatgtttttccccgctataatatcttgcctgtttttttggattattttccccattgtgatcctaagctcttaaaaaacttgagggaaaacattcatctaatttactaaaagagaaagctttccattgaaaggtagatactttgaggagtaaaaagacttctttgaatgctggtaaacaccgcatttattttgtgtatgcagtttgatttgcacatgtataaatggagatgcttttcatttttgtttggactgggtttgtgtcactgctcattacagtttgcttttttgtgtgtttgctgtgcgtttggagatattagtcagtttctttagtgatatttgtttccttgatgtgccttttcgtttttctttggggtttttggaatccggatgctgttgaagggcaatagcagactcctccagctaagagacaggacatgttcttgagccactgtagctgttgaagctggacaccagacgctccctataacccccccgccaggccatagcgtgtatgcatgtgcacttccacccacagaggagggtgtgaagccttgagaacctcaagaaagggctggattctgccatacctttgggtctaccttgggactgctggttgccaacgtgtcaaccagcctgtgttccctgccacccacgcacttgctgaggtgtggctgaggcagaatcatgtgaatgggtgcatccaaggagttcagggccctgcttggagaagaaatactttagcatcatgaaagggaaagaacgtgcaccccttttttgtttctttagtgaatgcaagatttaataaaagtgaataatgagcttcccctttgggagtggagcccagtgcagctcactgacagggttgacatcagtatgatgtgttggactgaaactgtatgtctgtaggtaggtgtgtgccttttagggcagaccacggtggccaccccatttctccaaggtggtttacctagcttgtgtatattagacattgccaccctcacctctggccaaaaattcttgatttaaaaagaaaagtctattttgttaacgacaggctctgttgtatgtgttactatcccaagcctggattattttatttatttaaaagtattttaatttccatattggctttattctaatcccatccatccctgtggagctgcagagcatcttcatgtgagtagacggatggacataaatagattcatgctcatttaggaagctgggagtttcgtgaagctgagggtgagttcctgtgattcttgttcgcttcaacaaaaagtgggagaccaagtttttatagcaaaagaccaaattagctgtagagtcttgaatgcagaaaaaaattaccctagctttcttagcacttagggttttgtgaggattcagtgtttagcacagtgcttggcacatagtaagccctagtaaatgttaaatattgttattagtgtttcgtaaaacttgagaaatagagctgagctcattcccttcctgttgattcaaaaataatacctacatgaaaacatgattccaagttgattgaatgttgtaggaattactggtttagagtagcccagttctcggcctaccctgctggttgggatcttactgtattcttgaatgcactggtttgaaaatatgccagacttcagcccccaaggaaacaaggctgcaagaatttatgaactccagctggaaaaggtaaaggtgacctttggctagccacatactggaccttaccccactgacgtctttcagaacattccaagggttttcctcaaggaacatttttgagctagaaattaaaatgggttctctggcagactgcaccccttgagtcaaagttaacagtattcctttgaatgcaataatagaggcttttctgcgttaagggagaaggaatgaccaattgaacttacacattccccaggcaggtccctttgccggcccctacaggctggggtggcccctcctgtcctcagggatcagactcccagactggttagttctgcatgtttccatcaaattaaaggttattccctggccgcctcctggagaaaaccaaccccaccctgccagctgggggcaatggggcagggattttggcctctcagaacagctcctagaggctgctcatgactgaatgttttcccaaatcacctaaatatcggtttgctttttgttttgggggagaggatttagcctcttacttccctgatggattcaaagttttatctatctccttatctcctgccctgtcttggcacaactctggatagattgcaggtgtggaatttgctggagtttggtgacttcgtcaaattcctttggattctgttccgccaaatcagcagtctcgtcctgtggatgcagtgactggaatttcccatctgcaaagcatctctgtagcccagattttgtggagccttaagacactccctcaatgccaccctgaccccacggctggagaaccctgtgcttatgtggtgggcagggccactgttgatggaggatggcggggacggggtggtgctcaaaggatctgtggtgctggaggtctacacgcctctcaggacagcgtgtcaggaacctcagagcagcttcacatctgccaaagctgagagggagcgaacttgggaagcattttgctcattgtcctacccaagtattaatagcataatagttgatgccaaaggagatggtgacgtcccttccactgtagttgctgtcacaaccttgacgtctttaagctaatggccgtttgcatctgtgtcttcaaacagatcctggttacagccattttgtgtgattcacttcgggggttaagtaatgcaggattctgcaaacaaggtgtcgccgtccaaatgtactgtcctggcatagagagcactgctttgttttccactgttgtagagaaaactagggagaactttatttttcaataaacttttcttgtgtg

SEQ ID NO: 151588 - DNA, 8252 bp, Homo sapiens
  Payload ID: 9840
  Gene Symbol: MGAT5
  Gene Name: mannosyl (alpha-1,6-)-glycoprotein beta-1,6-N-acetyl -glucosaminyltransferase
  Uniprot ID: Q09328
  ENST ID: ENST00000409645
  CDS Start-End: 253-2478
agcccaggtagccgcgccgcaggctcggggcgtcgcgacctcgcgcctcgggccgcgtgggcacggcggccggcgggtgctcccggctgctgctgctgcccaacaaggagcagaatggaagtgaggaaaggcaaccagctgacacaggagccagagtgagaccagcagactctcacactcaacctacaccatgaatttgtgtctatcttctacgcgttaagagccaaggacaggtgaagttgccagagagcaatggctctcttcactccgtggaagttgtcctctcagaagctgggctttttcctggtgacttttggcttcatttggggtatgatgcttctgcactttaccatccagcagcgaactcagcctgaaagcagctccatgctgcgcgagcagatcctggacctcagcaaaaggtacatcaaggcactggcagaagaaaacaggaatgtggtggatgggccatacgctggagtcatgacagcttatgatctgaagaaaacccttgctgtgttattagataacattttgcagcgcattggcaagttggagtcgaaggtggacaatcttgttgtcaatggcaccggaacaaactcaaccaactccactacagctgttcccagcttggttgcacttgagaaaattaatgtggcagatatcattaacggagctcaagaaaaatgtgtattgcctcctatggacggctaccctcactgtgagggaaagatcaagtggatgaaagacatgtggcgttcagatccctgctacgcagactatggagtggatggatccacctgctctttttttatttacctcagtgaggttgaaaattggtgtcctcatttaccttggagagcaaaaaatccctacgaagaagctgatcataattcattggcggaaattcgtacagattttaatattctctacagtatgatgaaaaagcatgaagaattccggtggatgagactacggatccggcgaatggctgacgcatggatccaagcaatcaagtccctggcagaaaagcagaaccttgaaaagagaaagcggaagaaagtcctcgttcacctgggactcctgaccaaggaatctggatttaagattgcagagacagctttcagtggtggccctcttggtgaattagttcaatggagtgatttaattacatctctgtacttactgggccatgacattaggatttcagcttcactggctgagctcaaggaaatcatgaagaaggttgtaggaaaccgatctggctgcccaactgtaggagacagaattgttgagctcatttacattgatattgtaggacttgctcaattcaagaaaactcttggaccatcctgggttcattaccagtgcatgctccgagtccttgattcatttggtactgaacccgaatttaatcatgcaaattatgcccaatcgaaaggccacaagaccccttggggaaaatggaatctgaaccctcagcagttttataccatgttccctcataccccagacaacagctttctggggtttgtggttgagcagcacctgaactccagtgatatccaccacattaatgaaatcaaaaggcagaaccagtcccttgtgtatggcaaagtggatagcttctggaagaataagaagatctacttggacattattcacacatacatggaagtgcatgcaactgtttatggctccagcacaaagaatattcccagttacgtgaaaaaccatggtatcctcagtggacgggacctgcagttccttcttcgagaaaccaagttgtttgttggacttgggttcccttacgagggcccagctcccctggaagctatcgcaaatggatgtgcttttctgaatcccaagttcaacccacccaaaagcagcaaaaacacagactttttcattggcaagccaactctgagagagctgacatcccagcatccttacgctgaagttttcatcgggcggccacatgtgtggactgttgacctcaacaatcaggaggaagtagaggatgcagtgaaagcaattttaaatcagaagattgagccatacatgccatatgaatttacgtgcgaggggatgctacagagaatcaatgctttcattgaaaaacaggacttctgccatgggcaagtgatgtggccacccctcagcgccctacaggtcaagcttgctgagcccgggcagtcctgcaagcaggtgtgccaggagagccagctcatctgcgagccttctttcttccagcacctcaacaaggacaaggacatgctgaagtacaaggtgacctgccaaagctcagagctggccaaggacatcctggtgccctcctttgaccctaagaataagcactgtgtgtttcaaggtgacctcctgctcttcagctgtgcaggcgcccaccccaggcaccagagggtctgcccctgccgggacttcatcaagggccaggtggctctctgcaaagactgcctatagcagctacctgctcagccctgcaccatgctgctggggaagacagtggccccagccccgtcaggcagggccagggacagaagtcatgcagggactctggcaagagcctgaactttttcgtagaaggttctgaattggcattgcccttgctgcactccgagcaacccagtggagtcttcaccaaaacaaaacaagagcgtatgtcaggccaggagcctggcttgtccctggcacaacatcatttctgtttctcaaggagcaactgtgggaagactgtcactgcagctgctccagggcaaaagaaagtctcaagagtcctttaaaacaaaacaggaggaattgagctgatgggaaagaactctgaatgggaatattcctaaacccattaacttatttattcgggtgggagggaggggaccgcgggagggagaggagggattgatcacaggcttcttttatttccactgttaatcatccaccttcactatactgttgttctgtctgctttgggcagggtgcaggagagagaccgtgtgccgtggggctggtggcctgctcagggacagccatggggacctggcagctcaaaacagatggcagcagaacaaaagaaacttttgctttggaagcacagccaaactccccagggcatcgtcatagatggcacctagagcatgggctgcctcagtcagggggacgtgcctgtgttgtccagagagcccagccagggacgaaaaaggagatgaggcccctttcctccatgtccccatgcccagacacataccttggccgtaatttcttttagaatccctttgggaaggaaatacaggattgagggattttggagtttctggtaaactcaccctccctccagccccgctatgaggaggaaagtagagatgaaagactcacgctgttcatggacttggagaggattatctttgagccaagatttggacaggagtgaagtcggtccttaagaatttgtggcgcgaccggagctgggctcctgacaggtgggcttgtgttgtgtcccctctgatggcaccaaagtccagggaagggggctcttgatgtctgctgggggagtgggggcagctcaggatgaatgcagtgccctgtcctggctactcacctgagggtgtagctcgcaaaggtgggaatctggtgctggcttttccttcaggcaggatcactctgacttgttgagtaatcagtcatcaggttggcctggtcagacacactggaccccaccttccaaaccctggacccccccatgctctgcctttgtataagttcccaccccactgaatcattgctgccatgctctgtacaagtttgtaagtttctgaaaagcccctgacatctccatgctgatgcaagtgagaccccttctgcctaatgtgagcggttggcgtcctccacttggcctctgctgggcgcctcagtcgctcaatgatgtgctctgtgccggggcttccaagcacccttcctgctaacagagggcggcccagtggagcctccgctgggcagaactgatgggcaaggcgtaatggctggtagctttcagaatgtgagggaaaggaagaattccgcttcatggggactagagttagtgtggggcctttaagtctgggaagttacattctgcttctttctcaattgctacacaaatgtgcagccagccttttttcttaggcccactgagatccctgctcagtgcgtctcaattgtatctccagtctaagaggagggtggggggcacccggggcctcctccactccttaggtggcccccaagcacatctgccaggtagagtaccatggggaggcctctgccctgagcatcatcacaggggcgcctccagacctggctgagaatagcctctgcttgggcctaggaagaagggcagaagtccaaaggaaaccttggtgagtgagtgtgtgtgtgtgtgtgtgtgtgtgtgtgtgtgtgtgtgtgtgtgtgtatgagcctgtgcatttcttttaagcaagggcagtttcctgcagtaggagggcagatgactggcatccttgctgtaaggaagagctttttccttgtgaatgggcctcttggctgtaccctagggtgtgggaatttgctagagttccctgacctgcaatccctgggccagtgccgccctctcctgggctcttccaggagcattgaacactgaggatgtcaatgcaagtatctgaccaacagggggagcctgcaggccgagcaaagtttaacccacttagccactgctacttaagcaaggaagctgaaaggtaaccttagccctgccttgtgttccaaaagctgcaaggatcatttgctggctgtccctaagttcaaggcctccctaccttccccttcttttccaagtcacaacccgccctgcccgggccagacagcccagaagaacacttttctgccatttaaaaatccctctttcatcccccccagtccagtattgagtggaagtgcgccggagttccactgacagggcagctgctcttggagcaaacaagcccacactccagttgtttagggcattatctgaagagtcagtgacccctgaatgtgtactggctcccaggcctcctcagacttggcccaggtctagtcagtgatcctggagaggaaactggggagggggcttccaactgccctgcatggaagaggagaggaaggtgcccctgtgtgggctggaagcctgcggaggttttgccattgctgatcttgatagaatcctaaaccgatttatagctgataacagttccatggggagagaaatcctaagttatgattaatgtttttccccgctataatatcttgcctgtttttttggattattttccccattgtgatcctaagctcttaaaaaacttgagggaaaacattcatctaatttactaaaagagaaagctttccattgaaaggtagatactttgaggagtaaaaagacttctttgaatgctggtaaacaccgcatttattttgtgtatgcagtttgatttgcacatgtataaatggagatgcttttcatttttgtttggactgggtttgtgtcactgctcattacagtttgcttttttgtgtgtttgctgtgcgtttggagatattagtcagtttctttagtgatatttgtttccttgatgtgccttttcgtttttctttggggtttttggaatccggatgctgttgaagggcaatagcagactcctccagctaagagacaggacatgttcttgagccactgtagctgttgaagctggacaccagacgctccctataacccccccgccaggccatagcgtgtatgcatgtgcacttccacccacagaggagggtgtgaagccttgagaacctcaagaaagggctggattctgccatacctttgggtctaccttgggactgctggttgccaacgtgtcaaccagcctgtgttccctgccacccacgcacttgctgaggtgtggctgaggcagaatcatgtgaatgggtgcatccaaggagttcagggccctgcttggagaagaaatactttagcatcatgaaagggaaagaacgtgcaccccttttttgtttctttagtgaatgcaagatttaataaaagtgaataatgagcttcccctttgggagtggagcccagtgcagctcactgacagggttgacatcagtatgatgtgttggactgaaactgtatgtctgtaggtaggtgtgtgccttttagggcagaccacggtggccaccccatttctccaaggtggtttacctagcttgtgtatattagacattgccaccctcacctctggccaaaaattcttgatttaaaaagaaaagtctattttgttaacgacaggctctgttgtatgtgttactatcccaagcctggattattttatttatttaaaagtattttaatttccatattggctttattctaatcccatccatccctgtggagctgcagagcatcttcatgtgagtagacggatggacataaatagattcatgctcatttaggaagctgggagtttcgtgaagctgagggtgagttcctgtgattcttgttcgcttcaacaaaaagtgggagaccaagtttttatagcaaaagaccaaattagctgtagagtcttgaatgcagaaaaaaattaccctagctttcttagcacttagggttttgtgaggattcagtgtttagcacagtgcttggcacatagtaagccctagtaaatgttaaatattgttattagtgtttcgtaaaacttgagaaatagagctgagctcattcccttcctgttgattcaaaaataatacctacatgaaaacatgattccaagttgattgaatgttgtaggaattactggtttagagtagcccagttctcggcctaccctgctggttgggatcttactgtattcttgaatgcactggtttgaaaatatgccagacttcagcccccaaggaaacaaggctgcaagaatttatgaactccagctggaaaaggtaaaggtgacctttggctagccacatactggaccttaccccactgacgtctttcagaacattccaagggttttcctcaaggaacatttttgagctagaaattaaaatgggttctctggcagactgcaccccttgagtcaaagttaacagtattcctttgaatgcaataatagaggcttttctgcgttaagggagaaggaatgaccaattgaacttacacattccccaggcaggtccctttgccggcccctacaggctggggtggcccctcctgtcctcagggatcagactcccagactggttagttctgcatgtttccatcaaattaaaggttattccctggccgcctcctggagaaaaccaaccccaccctgccagctgggggcaatggggcagggattttggcctctcagaacagctcctagaggctgctcatgactgaatgttttcccaaatcacctaaatatcggtttgctttttgttttgggggagaggatttagcctcttacttccctgatggattcaaagttttatctatctccttatctcctgccctgtcttggcacaactctggatagattgcaggtgtggaatttgctggagtttggtgacttcgtcaaattcctttggattctgttccgccaaatcagcagtctcgtcctgtggatgcagtgactggaatttcccatctgcaaagcatctctgtagcccagattttgtggagccttaagacactccctcaatgccaccctgaccccacggctggagaaccctgtgcttatgtggtgggcagggccactgttgatggaggatggcggggacggggtggtgctcaaaggatctgtggtgctggaggtctacacgcctctcaggacagcgtgtcaggaacctcagagcagcttcacatctgccaaagctgagagggagcgaacttgggaagcattttgctcattgtcctacccaagtattaatagcataatagttgatgccaaaggagatggtgacgtcccttccactgtagttgctgtcacaaccttgacgtctttaagctaatggccgtttgcatctgtgtcttcaaacagatcctggttacagccattttgtgtgattcacttcgggggttaagtaatgcaggattctgcaaacaaggtgtcgccgtccaaatgtactgtcctggcatagagagcactgctttgttttccactgttgtagagaaaactagggagaactttatttttcaataaacttttcttgtgtga

SEQ ID NO: 151589 - DNA, 4486 bp, Homo sapiens
  Payload ID: 9841
  Gene Symbol: MGAT5B
  Gene Name: mannosyl (alpha-1,6-)-glycoprotein beta-1,6-N-acetyl -glucosaminyltransferase, isozyme B
  Uniprot ID: Q3V5L5
  ENST ID: ENST00000301618
  CDS Start-End: 575-2947
gcggggccggacgccggacaccagagcgcgggcggcggagccagcgggcgagagagcgcgcggcgggcgcgggttgccctcgtcgagagccatgggcgcggcgcggcgcggggctgaggatcggcgcggcccggaggcgctggggaccggggcgcgggcccggggccgcctttagccggcaccgagggcgcggggccggggatgagggcgcccgccgcggggagcccgtctgcgcgccgcggcaccttcccgcccagcgagcgagcccgagcaggcagacgcgcggccggcggtctgggggcgcgccgcctcccggtccccaaaatgtgaagcggggagggcggagacgcagagacggcccggccgggcgccctcgccgccctccggcagccgcgccgctccctccgctgcacgcccaggcctgagcagcgaggccaccgggccgcgcgctcccagcttcgctcggacgcggcttcggcccgcagagggttcgtggcccggacgcggcgagagctgggcccaggacggtgcgtccggcctcgcccgcggctgctcgcaccaacaagtttgaacaatgatcaccgtcaaccccgatgggaagataatggtcagaagatgcctggtcaccctgagaccctttcggctttttgtcctgggcatcggcttcttcactctctgcttcctgatgacgtctctgggaggccagttctcggcccggcgcctgggggactcgccattcaccatccgcacagaagtgatggggggccccgagtcccgcggcgtcctgcgcaagatgagcgacctgctggagctgatggtgaagcgcatggacgcactggccaggctggagaacagcagtgagctgcaccgggccggcggcgacctgcactttcccgcagacaggatgccccctggggccggcctcatggagcggatccaggctattgcccagaacgtctccgacatcgctgtgaaggtggaccagatcctgcgccacagtctgctcctgcacagcaaggtgtcagaaggccggcgggaccagtgtgaggcacccagtgaccccaagttccctgactgctcagggaaggtggagtggatgcgtgcccgctggacctctgacccctgctacgccttctttggggtggacggcaccgagtgctccttcctcatctacctcagtgaggtcgagtggttctgccccccgctgccctggaggaaccagacggctgcccagagggcacccaagcccctccccaaagtccaggcagttttccgaagcaacctgtcccaccttctggacctgatgggcagcgggaaggagtccctgatcttcatgaagaagcggaccaagaggctcacagcccagtgggcgctggctgcccagcgcctggcacagaagctgggggccacccagagggaccagaagcagatcctggtccacatcggcttcctgacggaggagtccggggacgtgttcagccctcgggtcctgaagggcgggcccctaggggagatggtgcagtgggcggacattctgactgcactctatgtcctgggccatggcctgcgggtcacagtctccctgaaggagctgcagagtaacttaggggtaccgccaggccggggaagctgcccgctcaccatgcccctgcccttcgacctcatctacaccgactaccacggcctgcagcagatgaagcggcacatgggactctccttcaagaagtaccggtgccgaatcagggtcatcgacaccttcgggacggaacctgcgtacaaccacgaggagtacgccacgctgcacggctaccggaccaactggggctactggaacctcaaccccaagcagttcatgaccatgtttcctcatacccccgacaactccttcatgggcttcgtgtccgaggagctcaacgagacggagaagcggctcatcaaaggcggcaaggccagcaacatggccgtggtgtacggcaaggaggcgagcatctggaaggggaaggagaagttcctgggcatcctgaacaaatacatggagatccatggcaccgtgtactacgagagccagcggccccccgaggtgccagcctttgtgaagaaccacggcctcttaccgcagcctgagtttcagcagctgctgcgcaaggccaaactcttcatcgggtttggcttcccctacgagggccccgcccccctggaggccatcgccaatggttgcatcttcctgcagtcccgcttcagcccgccccacagctccctcaaccacgagttcttccgaggcaagcccacctccagagaggtgttctcccagcatccctacgcggagaacttcatcggcaagccccacgtgtggacagtcgactacaacaactcagaggagtttgaagcagccatcaaggccattatgagaactcaggtagacccctacctaccctacgagtacacctgcgaggggatgctggagcggatccacgcctacatccagcaccaggacttctgcagagctccagaccctgccctaccagaggcccacgccccgcagagcccctttgtcctggcccccaatgccacccacctcgagtgggctcggaacaccagcttggctcctggggcctggccccccgcgcacgccctgcgggcctggctggccgtgcctgggagggcctgcaccgacacctgcctggaccacgggctaatctgtgagccctccttcttccccttcctgaacagccaggacgccttcctcaagctgcaggtgccctgtgacagcaccgagtcggagatgaaccacctgtacccggcgttcgcccagcctggccaggagtgctacctgcagaaggagcctctgctcttcagctgcgccggctccaacaccaagtaccgccggctctgcccctgccgcgacttccgcaagggccaggtggccttgtgccagggctgtctgtgaatccgcctctgccgccctgcctggcacccacgctggctctctcctgccgcgggagaaagcaccagcaggttctgagccctggctgcttgtcctcctcgcaacccccccaggccggagcttccttccttagccgggaagctggcagaggagagccgtgcccgggaataggaggaggcagcatgccgagcccctgggacctcccaggcaggctccggttctctcctggggactcacagaagcatcgtggccaagcaggtgtcggactgctcagagtccgcatggcccaggagcaggtggtcggaggcccctggctttgtgcaaggccggatctgggccaggtggcgaaaggggcccagtcgttcttgggcccaggatggggcctctagacttgcaagggagaggaacagggaccaggctgccccacggtccctgaagggtccaaggaggggccctccccatggccctggagagtgggcctgggtggtacctgctccaggcagggaaactgggggctcgcccttctcctgtgaggggagccaggcacacagggcccattggtgtttgggatgtggacagaggggcagggggctgggagaaggctaagccgaggggtcctgtttgtgcctccccttagtcccttccctcccgatttcccgattcccccaccctccctctacacttgaggaccacagttgggggtgtagggaccacccagaccctggttgaattgtttctctctcctgcttgttccaacccttttcactctgggcttctcccaaaacccatcctggcatgacctgcaactccaggtggtggatttgttccaaagcctcaatccctaccccctccaaggggcaggtttccagtccagcctcagagatcaggctctgggacccctgcctggggggtggccttcatgcactagccacttccgcaggtgctgactcccgcactccctggcattttttgcagacaagggcttgggatggaccctcagccccatggtacgccctgcccagtttccagttgccctgtccacttaccctaggtagccccccaccccatcagtgccgagtccttgtccctacctccagcttcctccagcctcaaaccgcctctggatctagctgtccttctccgagtggcacgcctgccccaggatgccccctttccctcccccccatgcccagagccccgcctgcctcagcgggtcaggccttcagaacactgccacccacccagttttataatcccgctccctctccaggcaaccccacccaccagcctaggcctgctcctccacccttcccgggaggcagccccgggatgctgagagttggtggaggggccaggctggacgcttcctgtgggagtcccctccagacctggctggcccctgcagccacagaaaccacgatggcaaaaaatctcattggttctcaaggactaacctgtgggggaaagcaatagagacactctttttctctcttttttttaaagatttatttcttgaaataataaatattttattgggatgtg

SEQ ID NO: 151590 - DNA, 4053 bp, Homo sapiens
  Payload ID: 9841
  Gene Symbol: MGAT5B
  Gene Name: mannosyl (alpha-1,6-)-glycoprotein beta-1,6-N-acetyl -glucosaminyltransferase, isozyme B
  Uniprot ID: Q3V5L5
  ENST ID: ENST00000428789
  CDS Start-End: 104-2509
gccagcatcttgtagttgagctctctttatcctatagtgggggggccctcctgggtctggagctcagcccccatcctttcattctcccttgcttccttcactcatgcactcattcgtaaaacatttgtgcagccggtacgtggtggagcgtcagggcacgatggcccttcctgccctcctgacccgcctccttcctctccgcaggctttttgtcctgggcatcggcttcttcactctctgcttcctgatgacgtctctgggaggccagttctcggcccggcgcctgggggactcgccattcaccatccgcacagaagtgatggggggccccgagtcccgcggcgtcctgcgcaagatgagcgacctgctggagctgatggtgaagcgcatggacgcactggccaggctggagaacagcagtgagctgcaccgggccggcggcgacctgcactttcccgcagacaggatgccccctggggccggcctcatggagcggatccaggctattgcccagaacgtctccgacatcgctgtgaaggtggaccagatcctgcgccacagtctgctcctgcacagcaaggtgtcagaaggccggcgggaccagtgtgaggcacccagtgaccccaagttccctgactgctcagggaaggtggagtggatgcgtgcccgctggacctctgacccctgctacgccttctttggggtggacggcaccgagtgctccttcctcatctacctcagtgaggtcgagtggttctgccccccgctgccctggaggaaccagacggctgcccagagggcacccaagcccctccccaaagtccaggcagttttccgaagcaacctgtcccaccttctggacctgatgggcagcgggaaggagtccctgatcttcatgaagaagcggaccaagaggctcacagcccagtgggcgctggctgcccagcgcctggcacagaagctgggggccacccagagggaccagaagcagatcctggtccacatcggcttcctgacggaggagtccggggacgtgttcagccctcgggtcctgaagggcgggcccctaggggagatggtgcagtgggcggacattctgactgcactctatgtcctgggccatggcctgcgggtcacagtctccctgaaggagctgcagagtaacttaggggtaccgccaggccggggaagctgcccgctcaccatgcccctgcccttcgacctcatctacaccgactaccacggcctgcagcagatgaagcggcacatgggactctccttcaagaagtaccggtgccgaatcagggtcatcgacaccttcgggacggaacctgcgtacaaccacgaggagtacgccacgctgcacggctaccggaccaactggggctactggaacctcaaccccaagcagttcatgaccatgtttcctcatacccccgacaactccttcatgggcttcgtgtccgaggagctcaacgagacggagaagcggctcatcaaaggcggcaaggccagcaacatggccgtggtgtacggcaaggaggcgagcatctggaaggggaaggagaagttcctgggcatcctgaacaaatacatggagatccatggcaccgtgtactacgagagccagcggccccccgaggtgccagcctttgtgaagaaccacggcctcttaccgcagcctgagtttcagcagctgctgcgcaaggccaaactcttcatcgggtttggcttcccctacgagggccccgcccccctggaggccatcgccaatggttgcatcttcctgcagtcccgcttcagcccgccccacagctccctcaaccacgagttcttccgaggcaagcccacctccagagaggtgttctcccagcatccctacgcggagaacttcatcggcaagccccacgtgtggacagtcgactacaacaactcagaggagtttgaagcagccatcaaggccattatgagaactcaggtagacccctacctaccctacgagtacacctgcgaggggatgctggagcggatccacgcctacatccagcaccaggacttctgcagagctccagaccctgccctaccagaggcccacgccccgcagagcccctttgtcctggcccccaatgccacccacctcgagtgggctcggaacaccagcttggctcctggggcctggccccccgcgcacgccctgcgggcctggctggccgtgcctgggagggcctgcaccgacacctgcctggaccacgggctaatctgtgagccctccttcttccccttcctgaacagccaggacgccttcctcaagctgcaggtgccctgtgacagcaccgagtcggagatgaaccacctgtacccggcgttcgcccagcctggccaggagtgctacctgcagaaggagcctctgctcttcagctgcgccggctccaacaccaagtaccgccggctctgcccctgccgcgacttccgcaagggccaggtggccttgtgccagggctgtctgtgaatccgcctctgccgccctgcctggcacccacgctggctctctcctgccgcgggagaaagcaccagcaggttctgagccctggctgcttgtcctcctcgcaacccccccaggccggagcttccttccttagccgggaagctggcagaggagagccgtgcccgggaataggaggaggcagcatgccgagcccctgggacctcccaggcaggctccggttctctcctggggactcacagaagcatcgtggccaagcaggtgtcggactgctcagagtccgcatggcccaggagcaggtggtcggaggcccctggctttgtgcaaggccggatctgggccaggtggcgaaaggggcccagtcgttcttgggcccaggatggggcctctagacttgcaagggagaggaacagggaccaggctgccccacggtccctgaagggtccaaggaggggccctccccatggccctggagagtgggcctgggtggtacctgctccaggcagggaaactgggggctcgcccttctcctgtgaggggagccaggcacacagggcccattggtgtttgggatgtggacagaggggcagggggctgggagaaggctaagccgaggggtcctgtttgtgcctccccttagtcccttccctcccgatttcccgattcccccaccctccctctacacttgaggaccacagttgggggtgtagggaccacccagaccctggttgaattgtttctctctcctgcttgttccaacccttttcactctgggcttctcccaaaacccatcctggcatgacctgcaactccaggtggtggatttgttccaaagcctcaatccctaccccctccaaggggcaggtttccagtccagcctcagagatcaggctctgggacccctgcctggggggtggccttcatgcactagccacttccgcaggtgctgactcccgcactccctggcattttttgcagacaagggcttgggatggaccctcagccccatggtacgccctgcccagtttccagttgccctgtccacttaccctaggtagccccccaccccatcagtgccgagtccttgtccctacctccagcttcctccagcctcaaaccgcctctggatctagctgtccttctccgagtggcacgcctgccccaggatgccccctttccctcccccccatgcccagagccccgcctgcctcagcgggtcaggccttcagaacactgccacccacccagttttataatcccgctccctctccaggcaaccccacccaccagcctaggcctgctcctccacccttcccgggaggcagccccgggatgctgagagttggtggaggggccaggctggacgcttcctgtgggagtcccctccagacctggctggcccctgcagccacagaaaccacgatggcaaaaaatctcattggttctcaaggactaacctgtgggggaaagcaatagagacactctttttctctcttttttttaaagatttatttcttgaaataataaatattttattgggatgtgaggtg

SEQ ID NO: 151591 - DNA, 2923 bp, Homo sapiens
  Payload ID: 9841
  Gene Symbol: MGAT5B
  Gene Name: mannosyl (alpha-1,6-)-glycoprotein beta-1,6-N-acetyl -glucosaminyltransferase, isozyme B
  ENST ID: ENST00000565043
  CDS Start-End: 40-1491
cagcccccatcctttcattctcccttgcttccttcactcatgcactcattcgtaaaacatttgtgcagccggtacgtggtggagcgtcagggcacgatggcccttcctgccctcctgacccgcctccttcctctccgcaggctttttgtcctgggcatcggcttcttcactctctgcttcctgatgacgtctctgggaggccagttctcggcccggcgcctgggggactcgccattcaccatccgcacagaagtgatggggggccccgagtcccgcggcgtcctgcgcaagatgagcgacctgctggagctgatggtgaagcgcatggacgcactggccaggctggagaacagcagtgagctgcaccgggccggcggcgacctgcactttcccgcagacaggatgccccctggggccggcctcatggagcggatccaggctattgcccagaacgtctccgacatcgctgtgaaggtggaccagatcctgcgccacagtctgctcctgcacagcaaggtgtcagaaggccggcgggaccagtgtgaggcacccagtgaccccaagttccctgactgctcagggaaggtggagtggatgcgtgcccgctggacctctgacccctgctacgccttctttggggtggacggcaccgagtgctccttcctcatctacctcagtgaggtcgagtggttctgccccccgctgccctggaggaaccagacggctgcccagagggcacccaagcccctccccaaagtccaggcagttttccgaagcaacctgtcccaccttctggacctgatgggcagcgggaaggagtccctgatcttcatgaagaagcggaccaagaggctcacagcccagtgggcgctggctgcccagcgcctggcacagaagctgggggccacccagagggaccagaagcagatcctggtccacatcggcttcctgacggaggagtccggggacgtgttcagccctcgggtcctgaagggcgggcccctaggggagatggtgcagtgggcggacattctgactgcactctatgtcctgggccatggcctgcgggtcacagtctccctgaaggagctgcagagtaacttaggggtaccgccaggccggggaagctgcccgctcaccatgcccctgcccttcgacctcatctacaccgactaccacggcctgcagcagatgaagcggcacatgggactctccttcaagaagtaccggtgccgaatcagggtcatcgacaccttcgggacggaacctgcgtacaaccacgaggagtacgccacgctgcacggctaccggaccaactggggctactggaacctcaaccccaagcagttcatgaccatgtttcgggaaggagaagttcctgggcatcctgaacaaatacatggagatccatggcaccgtgtactacgagagccagcggccccccgaggtgccagcctttgtgaagaaccacggcctcttaccgcagcctgagtttcagcagctgctgcgcaaggccaaactcttcatcgggtttggcttcccctacgagggccccgcccccctggaggccatcgccaatggttgcatcttcctgcagtcccgcttcagcccgccccacagctccctcaaccacgagttcttccgaggcaagcccacctccagagaggtgttctcccagcatccctacgcggagaacttcatcggcaagccccacgtgtggacagtcgactacaacaactcagaggagtttgaagcagccatcaaggccattatgagaactcaggtagacccctacctaccctacgagtacacctgcgaggggatgctggagcggatccacgcctacatccagcaccaggacttctgcagagctccagaccctgccctaccagaggcccacgccccgcagagcccctttgtcctggcccccaatgccacccacctcgagtgggctcggaacaccagcttggctcctggggcctggccccccgcgcacgccctgcgggcctggctggccgtgcctgggagggcctgcaccgacacctgcctggaccacgggctaatctgtgagccctccttcttccccttcctgaacagccaggacgccttcctcaagctgcaggtgccctgtgacagcaccgagtcggagatgaaccacctgtacccggcgttcgcccagcctggccaggagtgctacctgcagaaggagcctctgctcttcagctgcgccggctccaacaccaagtaccgccggctctgcccctgccgcgacttccgcaagggccaggtggccttgtgccagggctgtctgtgaatccgcctctgccgccctgcctggcacccacgctggctctctcctgccgcgggagaaagcaccagcaggttctgagccctggctgcttgtcctcctcgcaacccccccaggccggagcttccttccttagccgggaagctggcagaggagagccgtgcccgggaataggaggaggcagcatgccgagcccctgggacctcccaggcaggctccggttctctcctggggactcacagaagcatcgtggccaagcaggtgtcggactgctcagagtccgcatggcccaggagcaggtggtcggaggcccctggctttgtgcaaggccggatctgggccaggtggcgaaaggggcccagtcgttcttgggcccaggatggggcctctagacttgcaagggagaggaacagggaccaggctgccccacggtccctgaagggtccaaggaggggccctccccatggccctggagagtgggcctgggtggtacctgctccaggcagggaaactgggggctcgcccttctcctgtgaggggagccaggcacacagggcccattggtgtttgggatgtggacagaggggcagggggctgggagaaggctaagccgag

SEQ ID NO: 151592 - DNA, 4492 bp, Homo sapiens
  Payload ID: 9841
  Gene Symbol: MGAT5B
  Gene Name: mannosyl (alpha-1,6-)-glycoprotein beta-1,6-N-acetyl -glucosaminyltransferase, isozyme B
  Uniprot ID: Q3V5L5
  ENST ID: ENST00000569840
  CDS Start-End: 575-2953
gcggggccggacgccggacaccagagcgcgggcggcggagccagcgggcgagagagcgcgcggcgggcgcgggttgccctcgtcgagagccatgggcgcggcgcggcgcggggctgaggatcggcgcggcccggaggcgctggggaccggggcgcgggcccggggccgcctttagccggcaccgagggcgcggggccggggatgagggcgcccgccgcggggagcccgtctgcgcgccgcggcaccttcccgcccagcgagcgagcccgagcaggcagacgcgcggccggcggtctgggggcgcgccgcctcccggtccccaaaatgtgaagcggggagggcggagacgcagagacggcccggccgggcgccctcgccgccctccggcagccgcgccgctccctccgctgcacgcccaggcctgagcagcgaggccaccgggccgcgcgctcccagcttcgctcggacgcggcttcggcccgcagagggttcgtggcccggacgcggcgagagctgggcccaggacggtgcgtccggcctcgcccgcggctgctcgcaccaacaagtttgaacaatgatcaccgtcaaccccgatgggaagataatggtcagaagatgcctggtcaccctgagaccctttcggctttttgtcctgggcatcggcttcttcactctctgcttcctgatgacgtctctgggaggccagttctcggcccggcgcctgggggactcgccattcaccatccgcacagaagtgatggggggccccgagtcccgcggcgtcctgcgcaagatgagcgacctgctggagctgatggtgaagcgcatggacgcactggccaggctggagaacagcagtgagctgcaccgggccggcggcgacctgcactttcccgcagacaggatgccccctggggccggcctcatggagcggatccaggctattgcccagaacgtctccgacatcgctgtgaaggtggaccagatcctgcgccacagtctgctcctgcacagcaaggtgtcagaaggccggcgggaccagtgtgaggcacccagtgaccccaagttccctgactgctcagggaaggtggagtggatgcgtgcccgctggacctctgacccctgctacgccttctttggggtggacggcaccgagtgctccttcctcatctacctcagtgaggtcgagtggttctgccccccgctgccctggaggaaccagacggctgcccagagggcacccaagcccctccccaaagtccaggcagttttccgaagcaacctgtcccaccttctggacctgatgggcagcgggaaggagtccctgatcttcatgaagaagcggaccaagaggctcacagcccagtgggcgctggctgcccagcgcctggcacagaagctgggggccacccagagggaccagaagcagatcctggtccacatcggcttcctgacggaggagtccggggacgtgttcagccctcgggtcctgaagggcgggcccctaggggagatggtgcagtgggcggacattctgactgcactctatgtcctgggccatggcctgcgggtcacagtctccctgaaggagctgcagagtaacttaggggtaccgccaggccggggaagctgcccgctcaccatgcccctgcccttcgacctcatctacaccgactaccacggcctgcagcagatgaagcggcacatgggactctccttcaagaagtaccggtgccgaatcagggtcatcgacaccttcgggacggaacctgcgtacaaccacgaggagtacgccacgctgcacggctaccggaccaactggggctactggaacctcaaccccaagcagttcatgaccatgtttcctcatacccccgacaactccttcatgggcttcgtgtccgaggagctcaacgagacggagaagcggctcatcaaaggcggcaaggccagcaacatggccgtggtgtacggcaaggaggcgagcatctggaagctccaggggaaggagaagttcctgggcatcctgaacaaatacatggagatccatggcaccgtgtactacgagagccagcggccccccgaggtgccagcctttgtgaagaaccacggcctcttaccgcagcctgagtttcagcagctgctgcgcaaggccaaactcttcatcgggtttggcttcccctacgagggccccgcccccctggaggccatcgccaatggttgcatcttcctgcagtcccgcttcagcccgccccacagctccctcaaccacgagttcttccgaggcaagcccacctccagagaggtgttctcccagcatccctacgcggagaacttcatcggcaagccccacgtgtggacagtcgactacaacaactcagaggagtttgaagcagccatcaaggccattatgagaactcaggtagacccctacctaccctacgagtacacctgcgaggggatgctggagcggatccacgcctacatccagcaccaggacttctgcagagctccagaccctgccctaccagaggcccacgccccgcagagcccctttgtcctggcccccaatgccacccacctcgagtgggctcggaacaccagcttggctcctggggcctggccccccgcgcacgccctgcgggcctggctggccgtgcctgggagggcctgcaccgacacctgcctggaccacgggctaatctgtgagccctccttcttccccttcctgaacagccaggacgccttcctcaagctgcaggtgccctgtgacagcaccgagtcggagatgaaccacctgtacccggcgttcgcccagcctggccaggagtgctacctgcagaaggagcctctgctcttcagctgcgccggctccaacaccaagtaccgccggctctgcccctgccgcgacttccgcaagggccaggtggccttgtgccagggctgtctgtgaatccgcctctgccgccctgcctggcacccacgctggctctctcctgccgcgggagaaagcaccagcaggttctgagccctggctgcttgtcctcctcgcaacccccccaggccggagcttccttccttagccgggaagctggcagaggagagccgtgcccgggaataggaggaggcagcatgccgagcccctgggacctcccaggcaggctccggttctctcctggggactcacagaagcatcgtggccaagcaggtgtcggactgctcagagtccgcatggcccaggagcaggtggtcggaggcccctggctttgtgcaaggccggatctgggccaggtggcgaaaggggcccagtcgttcttgggcccaggatggggcctctagacttgcaagggagaggaacagggaccaggctgccccacggtccctgaagggtccaaggaggggccctccccatggccctggagagtgggcctgggtggtacctgctccaggcagggaaactgggggctcgcccttctcctgtgaggggagccaggcacacagggcccattggtgtttgggatgtggacagaggggcagggggctgggagaaggctaagccgaggggtcctgtttgtgcctccccttagtcccttccctcccgatttcccgattcccccaccctccctctacacttgaggaccacagttgggggtgtagggaccacccagaccctggttgaattgtttctctctcctgcttgttccaacccttttcactctgggcttctcccaaaacccatcctggcatgacctgcaactccaggtggtggatttgttccaaagcctcaatccctaccccctccaaggggcaggtttccagtccagcctcagagatcaggctctgggacccctgcctggggggtggccttcatgcactagccacttccgcaggtgctgactcccgcactccctggcattttttgcagacaagggcttgggatggaccctcagccccatggtacgccctgcccagtttccagttgccctgtccacttaccctaggtagccccccaccccatcagtgccgagtccttgtccctacctccagcttcctccagcctcaaaccgcctctggatctagctgtccttctccgagtggcacgcctgccccaggatgccccctttccctcccccccatgcccagagccccgcctgcctcagcgggtcaggccttcagaacactgccacccacccagttttataatcccgctccctctccaggcaaccccacccaccagcctaggcctgctcctccacccttcccgggaggcagccccgggatgctgagagttggtggaggggccaggctggacgcttcctgtgggagtcccctccagacctggctggcccctgcagccacagaaaccacgatggcaaaaaatctcattggttctcaaggactaacctgtgggggaaagcaatagagacactctttttctctcttttttttaaagatttatttcttgaaataataaatattttattgggatgtg

SEQ ID NO: 151593 - DNA, 872 bp, Homo sapiens
  Payload ID: 9841
  Gene Symbol: MGAT5B
  Gene Name: mannosyl (alpha-1,6-)-glycoprotein beta-1,6-N-acetyl -glucosaminyltransferase, isozyme B
  ENST ID: ENST00000565675
  CDS Start-End: 315-647
gcgagcccgagcaggcagacgcgcggccggcggtctgggggcgcgccgcctcccggtccccaaaatgtgaagcggggagggcggagacgcagagacggcccggccgggcgccctcgccgccctccggcagccgcgccgctccctccgctgcacgcccaggcctgagcagcgaggccaccgggccgcgcgctcccagcttcgctcggacgcggcttcggcccgcagagggttcgtggcccggacgcggcgagagctgggcccaggacggtgcgtccggcctcgcccgcggctgctcgcaccaacaagtttgaacaatgatcaccgtcaaccccgatgggaagataatggtcagaagatgcctggtcaccctgagaccctttcggctttttgtcctgggcatcggcttcttcactctctgcttcctgatgacgtctctgggaggccagttctcggcccggcgcctgggggactcgccattcaccatccgcacagaagtgatggggggccccgagtcccgcggcgtcctgcgcaagatgagcgacctgctggagctgatggtgaagcgcatggacgcactggccaggctggagaacagcagtgagctgcaccgggccggcggcgacctgcactttcccgcagacaggtgaggggacgtggggaggaggcacacggagcaggggagcggtggcacctgccactccatccggggtgctgtccgtcatctccttttgtgaatctggagaagatttggaccacactgtggtacagcccagagtgcatttctaccacccaaatttaacaaccgttaacatttggtcacatttgtggcctgttttcctctttaaataaaacgtcacagatgaaaactaaaa

SEQ ID NO: 151594 - DNA, 5062 bp, Homo sapiens
  Payload ID: 9842
  Gene Symbol: MGAT3
  Gene Name: mannosyl (beta-1,4-)-glycoprotein beta-1,4-N -acetylglucosaminyltransferase
  Uniprot ID: Q09327
  ENST ID: ENST00000341184
  CDS Start-End: 216-1817
acggggtggaagtgggggtggggggaggggatcggggccgggccggggccgcgctgcctgcgatgccgggcgcccgccgcagccgctgccgccggagcccgggatggggcgagaggctgcggcggacgccagcatctccccgccggggaccccgggggccgcggagccgccgccgccgctgctgccgccgttgctgagacccagcgggcgatgggatgaagatgagacgctacaagctctttctcatgttctgtatggccggcctgtgcctcatctccttcctgcacttcttcaagaccctgtcctatgtcaccttcccccgagaactggcctccctcagccctaacctggtgtccagctttttctggaacaatgccccggtcacgccccaggccagccccgagccaggaggccctgacctgctgcgtaccccactctactcccactcgcccctgctgcagccgctgccgcccagcaaggcggccgaggagctccaccgggtggacttggtgctgcccgaggacaccaccgagtatttcgtgcgcaccaaggccggcggcgtctgcttcaaacccggcaccaagatgctggagaggccgcccccgggacggccggaggagaagcctgagggggccaacggctcctcggcccggcggccaccccggtacctcctgagcgcccgggagcgcacggggggccgaggcgcccggcgcaagtgggtggagtgcgtgtgcctgcccggctggcacggacccagctgcggcgtgcccactgtggtgcagtactccaacctgcccaccaaggagcggctggtgcccagggaggtgccgcgccgcgtcatcaacgccatcaacgtcaaccacgagttcgacctgctggacgtgcgcttccacgagctgggcgacgtggtggacgcctttgtggtgtgcgagtccaacttcacggcttatggggagccgcggccgctcaagttccgggagatgctgaccaatggcaccttcgagtacatccgccacaaggtgctctatgtcttcctggaccacttcccgcccggcggccggcaggacggctggatcgccgacgactacctgcgcaccttcctcacccaggacggcgtctcgcggctgcgcaacctgcggcccgacgacgtcttcatcattgacgatgcggacgagatcccggcccgtgacggcgtccttttcctcaagctctacgatggctggaccgagcccttcgccttccacatgcgcaagtcgctctacggcttcttctggaagcagccgggcaccctggaggtggtgtcaggctgcacggtggacatgctgcaggcagtgtatgggctggacggcatccgcctgcgccgccgccagtactacaccatgcccaacttcagacagtatgagaaccgcaccggccacatcctggtgcagtggtcgctgggcagccccctgcacttcgccggctggcactgctcctggtgcttcacgcccgagggcatctacttcaagctcgtgtccgcccagaatggcgacttcccacgctggggtgactacgaggacaagcgggacctgaactacatccgcggcctgatccgcaccgggggctggttcgacggcacgcagcaggagtacccgcctgcagaccccagcgagcacatgtatgcgcccaagtacctgctgaagaactacgaccggttccactacctgctggacaacccctaccaggagcccaggagcacggcggcgggcgggtggcgccacaggggtcccgagggaaggccgcccgcccggggcaaactggacgaggcggaagtctagagctgcatgatctgatagggtttgtgacagggcgggggtggcggcggcccctagcgctatctccctgcctcctgccggctccttggttcttgaggggaccaggagtgggtggggagtgggggtgggggtagggtttccctactgaagcccttgtgaatcaagggtcaggcctttgagctcagaaaatatccctcctgttgggagagggcgcaggccgtgacgtctgggtggcccttatgactgccaagactgctgtggccaggaggtgccactggagtgtgcgtggtggtccctgggtagcgggggagggtaggcaggattggggaagagagcctgcaggatctcaccaggcagcctctggggggtggccaggccgggaaaaagcccaccatttggcatccctgggccttgggctccgtgtgggagaccggcctgccaggaggacccagggctctgtaagtagatgcatttgggtccaggaggaagcgtggacacctcgtagggaagagatgaaaaagccacatcctaccaagaggaggtgctgagggatgctttgcagtgtagtcagaagtgctgggccagatggagacagaactccaccccctgccgcaaaggacaggacctggctgccctgggatgctggtgcctgagtctgtctctgtgcacccctcaggctgtcgtgagccaacacaggggcctggagaaccctgaggagctttccttttggttctaaacccggcgttgacgttccttctccctttcacattgctgtcttgtggactgtgcactcagtccttgcaaggccaagagtccagttgtaggtgtggccttgagggggaagtggggaggagaagactgacatgagtcctctgcacggatccgtctctccctccccatcaccccttccttctgacacccagtcccagctgtccactgtcccaggtgcagtcactgttgtgcccttccttggggcaggctggctgggggccagaaaggggccatgaggctgtcttgggcccaaaaagggacaataaggccagttgtatgcttcctgttcctcatagcttgccttggtggggatgtctttgttggagttgattctgagctgctgtgattaggagaccctgaaatacagtggtttaagcaagatggaagcttgtttctaattagtctagattgagatggcccagagctggtagggcagctctgcgtttcttcatacgcaccttccaattctgggtacacagcggctgctccagcgcccaccctcctgtgtgcatccaagcctgggggaagcagaaatagacaagagggcacacccactttttgctaaaggcatgagccagaattggcaggctcacctctgctggcctctcattggctgggactcagtcacatggccacaagcagctgctagggaacctgggaagtgtagtcttcagcggggccgccatgtgcctggcctcaccttgggagttatcttattgatggaggagaagagaatggatatgggggaccagtagcatctctgggagagggggagggagcagcaataactcagtcgtcggatccagctctcattgtcagagtttccggaacagcttgctcctgtttccctcactgtgcagcccagggctgggggcagtgaggagcttgcagctctgtgggaaggggaaacaccccctcccctcggcccctcagacgctacccaatgatgccggtttgcagagttggcctgtggaatggctcatgtttgtgcgtgtgtgtgtgtatatttatgggcatgggtgcatgcttggtgtgtatttgtacatgtctgtattgctgtgtccctgtaaatacatgcttgtgtatggatggaagaggccaggcccaggcctggcctcttcctcgggcctgtggccacacctcctgcagctccccaaaatgactgaggcagaaagcccttggggagcctagaaagcaaagctaaaggggatgcagggtctgtctgtctgtctgtctttcagtctgaggaatgagaatcctgacctgagggctgtgcagctgagagcccactacctccccagcccctctcggccccagccgcatcatcccacctgtcccctcccccccacctccagtggggctttctccagatgtcttatggttgggggtttcctgatgggccaggagaggagggcatcttcttgcgacagcactgtctgggttaagtgcccagtgagggcatggtgtggggagctggcctcagaggagccgctggtgggcaagcgtgaagtgggctgaggggctctgagccactttgctcccatctaggggactgccccccatggaactcctttgaagtcacagcagccttcctttctgtttgctcttggggctgagaggtggctcaaacactcggggtccctatggctctgggtcaatctaggccaggctgcaccccatggacagggagtctcagggctcctgatcatgcccaggccctggcctggggcctccctccttggcagctttcccacccccacgcccctggcatcctcagttgctatgggatgcccctccagggcaccagctcagggctaagcgaaggaagataggagcagctcagagctgccaggctctgccttcctcacagacctggtggggcaggtcctgttcacagcagcaggagtgaaggcctggccatcggtggagagggcagctgtcagagggctgggggccagggcacaggattgaagagtttcacatatcatcacagcatacactgggaatttggtgggggcagaagaacccagggccactccctcaatatgaagggaaaccaagctgaatgtgaccaccggcacactgctgccatgtcccatgtccacctttctccccgggaataactggccctgagacccctagacccaaggaggcctgtccatgccaagcatccgggaagcatggctggccttatccacccatgggtcacgtcggttcccaggggcagcatgggagatctttgggggcaacagggagagtctgggtggggagacgggacttgtccaagcagaaggcaggaccctgggaaatgcataatgtaaggacatcaataatagtattattttttttgtaagggaaaatcaatatgtacattctgaaatcattttctctgtaaatggttggatttcatttcacccttaaagggatgcttaaaggagaagataatattaataataaaaacagctacaaagtctgaa

SEQ ID NO: 151595 - DNA, 552 bp, Homo sapiens
  Payload ID: 9842
  Gene Symbol: MGAT3
  Gene Name: mannosyl (beta-1,4-)-glycoprotein beta-1,4-N -acetylglucosaminyltransferase
  ENST ID: ENST00000418314
  CDS Start-End: 228-552
gtatttggtcgtccagcgggaaacccaaatggaaggaaagaaaaaaaaaaaaaaccatgcatttatagaacctctgccaatggccaggctccatgcagaatgctttgacaccgtggctcagccaggtctcccacaggactgcaaaacagagggtgacatctttcttttagatcggagaagactgaggaccagagaagctaagtaacttgccaaagggcacacagcaaatggagtcttgctcttgtcacccaggttctggagtgcaatggcgtgatcatggctcactgcaacttccgccccctgggttcaagatgaagatgagacgctacaagctctttctcatgttctgtatggccggcctgtgcctcatctccttcctgcacttcttcaagaccctgtcctatgtcaccttcccccgagaactggcctccctcagccctaacctggtgtccagctttttctggaacaatgccccggtcacgccccaggccagccccgagccaggaggccctgacctgctgcgtaccccactctactcccactcgcccctgc

SEQ ID NO: 151596 - DNA, 569 bp, Homo sapiens
  Payload ID: 9842
  Gene Symbol: MGAT3
  Gene Name: mannosyl (beta-1,4-)-glycoprotein beta-1,4-N -acetylglucosaminyltransferase
  ENST ID: ENST00000429402
  CDS Start-End: 87-569
acacctgggctcagcctctagggaggaaactgctgccatagagccttgaaagccaggcagaggggactagacactgtgcctcaaggatgaagatgagacgctacaagctctttctcatgttctgtatggccggcctgtgcctcatctccttcctgcacttcttcaagaccctgtcctatgtcaccttcccccgagaactggcctccctcagccctaacctggtgtccagctttttctggaacaatgccccggtcacgccccaggccagccccgagccaggaggccctgacctgctgcgtaccccactctactcccactcgcccctgctgcagccgctgccgcccagcaaggcggccgaggagctccaccgggtggacttggtgctgcccgaggacaccaccgagtatttcgtgcgcaccaaggccggcggcgtctgcttcaaacccggcaccaagatgctggagaggccgcccccgggacggccggaggagaagcctgagggggccaacggctcctcggcccggcggccaccccggtacctcctgagcgcccgggagcgcacggggggc

SEQ ID NO: 151597 - DNA, 2895 bp, Homo sapiens
  Payload ID: 9843
  Gene Symbol: MOGS
  Gene Name: mannosyl-oligosaccharide glucosidase
  Uniprot ID: Q13724
  ENST ID: ENST00000233616
  CDS Start-End: 164-2677
acttccggcgggaggcggaggcggaggcgcaggcgctggctggcaggtgtcgctaaccggacggtggtcgccagggcgagaggcgggagccggagaggtgaggcaggacccgggctccactgccgcctctccgagctcttgtgacgcggacctcagtgccaggatggctcggggcgagcggcggcgccgcgcagtgccggcagagggagtgcggacagccgagagggcggctcggggaggccccgggcgacgggacggccggggcggcgggccgcgtagcacggctggaggagtggctctggccgtcgtggtcctgtctttggccctgggtatgtcggggcgctgggtgctggcgtggtaccgtgcgcggcgggcggtcacgctgcactccgcgcctcctgtgttgcctgccgactcctccagccccgccgtggccccggacctcttctggggaacctaccgccctcacgtctacttcggcatgaagacccgcagcccgaagcccctcctcaccggactgatgtgggcgcagcagggcaccaccccggggactcctaagctcaggcacacgtgtgagcagggggacggtgtgggtccctatggctgggagttccacgacggcctctccttcgggcgccaacacatccaggatggggccttaaggctcaccactgagttcgtcaagaggcctgggggtcagcacggaggggactggagctggagagtgactgtagagcctcaggactcaggtacttctgccctccctttggtctccctgttcttctatgtggtgacagatggcaaggaagtcctactaccagaggttggggccaaggggcagttgaagtttatcagtgggcacaccagtgaacttggtgacttccgctttacacttttgccaccaaccagtccaggggatacagcccccaagtatggcagctacaatgtcttctggacctccaacccaggactgcccctgctgacagagatggtaaagagtcgcctaaatagctggtttcagcatcggcccccaggggccccccctgaacgctacctcggcttgccaggatccctgaagtgggaggacagaggtccaagtgggcaagggcaggggcagttcttgatacagcaggtgaccctgaaaattcccatttccatagagtttgtgtttgaatcaggcagtgcccaggcaggaggaaatcaagccctgccaagactggcaggcagtctactgacccaggccctggagagccatgctgaaggctttagagagcgctttgagaagaccttccagctgaaggagaagggcctgagctctggcgagcaggttttgggtcaggctgccctcagcggcctccttggtggaattggctacttctacggacaagggctggtattgccagacatcggggtggaagggtctgagcagaaggtggacccagccctctttccacccgtacctctttttacagcagtgccctcccggtcattcttcccacgaggcttcctttgggatgaaggctttcaccagctggtggttcagcggtgggatccctccctcacccgggaagcccttggccactggctggggctgctaaatgctgatggctggattgggagggagcagatactgggggatgaggcccgagcccgggtgcctccagaattcctagtacaacgagcagtccacgccaaccccccaaccctacttttgcctgtagcccatatgctagaggttggtgaccctgacgacttggctttcctccgaaaggccttgccccgcctgcatgcctggttttcctggctccatcagagccaggcaggcccactgccactatcttaccgctggcggggacgggaccctgccttaccaaccttactgaaccccaagaccctaccctctgggctggatgactacccccgggcttcacacccttcagtaaccgagcggcacctggacctgcgatgttgggtggcactgggtgcccgtgtgctgacgcggctggcagagcatctgggtgaggctgaggtagctgctgagctgggcccactggctgcctcactggaggcagcagagagcctggatgagctgcactgggccccagagctaggagtctttgcagactttgggaaccacacaaaagcagtacagctgaagcccaggccccctcaggggctcgttcgggtggtgggtcggccccaacctcaactgcagtatgtagatgctcttggctatgtcagtctttttcccttgctgctgcgactgctggaccccacctcatcccgccttgggcccctgctggacattctagccgacagccgccatctctggagcccctttggtttacgctcccttgcagcctccagctccttttatggccagcgcaattcagagcatgatcccccctactggcggggtgctgtgtggctcaatgtcaactacctggctttgggagcactccaccactatgggcatctggagggtcctcaccaggctcgggctgccaaactccacggtgagctccgtgccaacgtggtaggcaatgtatggcgccagtaccaggctacaggctttctttgggagcagtacagtgaccgcgatgggcgaggcatgggctgccgccctttccacggctggaccagccttgtcttactggccatggctgaagactactgaagggagggagaggaggggagccaagacactcatgccactctggctctgaagggacaaaggcttctggcttttgcccccagccccttggataccagtaattcaaaccttcctcatttcatctcaggtgtctccttgctgtcatcccacatagccctggggtgaatgtgaatccagagtctatttttctaaataaattggaaaaaacattttgaactcta

SEQ ID NO: 151598 - DNA, 2668 bp, Homo sapiens
  Payload ID: 9843
  Gene Symbol: MOGS
  Gene Name: mannosyl-oligosaccharide glucosidase
  ENST ID: ENST00000409065
  CDS Start-End: 139-768
ggcgcaggcgctggctggcaggtgtcgctaaccggacggtggtcgccagggcgagaggcgggagccggagaggtgaggcaggacccgggctccactgccgcctctccgagctcttgtgacgcggacctcagtgccaggatggctcggggcgagcggcggcgccgcgcagtgccggcagagggagtgcggacagccgagagggcggctcggggaggccccgggcgacgggacggccggggcggcgggccgcgtagcacggctggaggagtggctctggccgtcgtggtcctgtctttggccctgggtatgtcggggcgctgggtgctggcgtggtaccgtgcgcggcgggcggtcacgctgcactccgcgcctcctgtgttgcctgccgactcctccagccccgccgtggccccggacctcttctggggaacctaccgccctcacgtctacttcggcatgaagacccgcagcccgaagcccctcctcaccggactgatgtgggcgcagcagggcaccaccccggggactcctaagctcaggcacacgtgtgagcagggggacggtgtgggtccctatggctgggagttccacgacggcctctccttcgggcgccaacacatccaggatggggccttaaggctcaccactgagttcgtcaagaggcctgggggtcagcacggaggggactggagctggagagtgactgtagagcctcaggactcagctacaatgtcttctggacctccaacccaggactgcccctgctgacagagatggtaaagagtcgcctaaatagctggtttcagcatcggcccccaggggccccccctgaacgctacctcggcttgccaggatccctgaagtgggaggacagaggtccaagtgggcaagggcaggggcagttcttgatacagcaggtgaccctgaaaattcccatttccatagagtttgtgtttgaatcaggcagtgcccaggcaggaggaaatcaagccctgccaagactggcaggcagtctactgacccaggccctggagagccatgctgaaggctttagagagcgctttgagaagaccttccagctgaaggagaagggcctgagctctggcgagcaggttttgggtcaggctgccctcagcggcctccttggtggaattggctacttctacggacaagggctggtattgccagacatcggggtggaagggtctgagcagaaggtggacccagccctctttccacccgtacctctttttacagcagtgccctcccggtcattcttcccacgaggcttcctttgggatgaaggctttcaccagctggtggttcagcggtgggatccctccctcacccgggaagcccttggccactggctggggctgctaaatgctgatggctggattgggagggagcagatactgggggatgaggcccgagcccgggtgcctccagaattcctagtacaacgagcagtccacgccaaccccccaaccctacttttgcctgtagcccatatgctagaggttggtgaccctgacgacttggctttcctccgaaaggccttgccccgcctgcatgcctggttttcctggctccatcagagccaggcaggcccactgccactatcttaccgctggcggggacgggaccctgccttaccaaccttactgaaccccaagaccctaccctctgggctggatgactacccccgggcttcacacccttcagtaaccgagcggcacctggacctgcgatgttgggtggcactgggtgcccgtgtgctgacgcggctggcagagcatctgggtgaggctgaggtagctgctgagctgggcccactggctgcctcactggaggcagcagagagcctggatgagctgcactgggccccagagctaggagtctttgcagactttgggaaccacacaaaagcagtacagctgaagcccaggccccctcaggggctcgttcgggtggtgggtcggccccaacctcaactgcagtatgtagatgctcttggctatgtcagtctttttcccttgctgctgcgactgctggaccccacctcatcccgccttgggcccctgctggacattctagccgacagccgccatctctggagcccctttggtttacgctcccttgcagcctccagctccttttatggccagcgcaattcagagcatgatcccccctactggcggggtgctgtgtggctcaatgtcaactacctggctttgggagcactccaccactatgggcatctggagggtcctcaccaggctcgggctgccaaactccacggtgagctccgtgccaacgtggtaggcaatgtatggcgccagtaccaggctacaggctttctttgggagcagtacagtgaccgcgatgggcgaggcatgggctgccgccctttccacggctggaccagccttgtcttactggccatggctgaagactactgaagggagggagaggaggggagccaagacactcatgccactctggctctgaagggacaaaggcttctggcttttgcccccagccccttggataccagtaattcaaaccttcctcatttcatctcaggtgtctccttgctgtcatcccacatagccctggggtgaatgtgaatccagagtctatttttctaaataaattggaaaaaaca

SEQ ID NO: 151599 - DNA, 2568 bp, Homo sapiens
  Payload ID: 9843
  Gene Symbol: MOGS
  Gene Name: mannosyl-oligosaccharide glucosidase
  Uniprot ID: Q13724
  ENST ID: ENST00000452063
  CDS Start-End: 156-2351
acttccggcgggaggcggaggcggaggcgcaggcgctggctggcaggtgtcgctaaccggacggtggtcgccagggcgagaggcgggagccggagagccccgccgtggccccggacctcttctggggaacctaccgccctcacgtctacttcggcatgaagacccgcagcccgaagcccctcctcaccggactgatgtgggcgcagcagggcaccaccccggggactcctaagctcaggcacacgtgtgagcagggggacggtgtgggtccctatggctgggagttccacgacggcctctccttcgggcgccaacacatccaggatggggccttaaggctcaccactgagttcgtcaagaggcctgggggtcagcacggaggggactggagctggagagtgactgtagagcctcaggactcaggtacttctgccctccctttggtctccctgttcttctatgtggtgacagatggcaaggaagtcctactaccagaggttggggccaaggggcagttgaagtttatcagtgggcacaccagtgaacttggtgacttccgctttacacttttgccaccaaccagtccaggggatacagcccccaagtatggcagctacaatgtcttctggacctccaacccaggactgcccctgctgacagagatggtaaagagtcgcctaaatagctggtttcagcatcggcccccaggggccccccctgaacgctacctcggcttgccaggatccctgaagtgggaggacagaggtccaagtgggcaagggcaggggcagttcttgatacagcaggtgaccctgaaaattcccatttccatagagtttgtgtttgaatcaggcagtgcccaggcaggaggaaatcaagccctgccaagactggcaggcagtctactgacccaggccctggagagccatgctgaaggctttagagagcgctttgagaagaccttccagctgaaggagaagggcctgagctctggcgagcaggttttgggtcaggctgccctcagcggcctccttggtggaattggctacttctacggacaagggctggtattgccagacatcggggtggaagggtctgagcagaaggtggacccagccctctttccacccgtacctctttttacagcagtgccctcccggtcattcttcccacgaggcttcctttgggatgaaggctttcaccagctggtggttcagcggtgggatccctccctcacccgggaagcccttggccactggctggggctgctaaatgctgatggctggattgggagggagcagatactgggggatgaggcccgagcccgggtgcctccagaattcctagtacaacgagcagtccacgccaaccccccaaccctacttttgcctgtagcccatatgctagaggttggtgaccctgacgacttggctttcctccgaaaggccttgccccgcctgcatgcctggttttcctggctccatcagagccaggcaggcccactgccactatcttaccgctggcggggacgggaccctgccttaccaaccttactgaaccccaagaccctaccctctgggctggatgactacccccgggcttcacacccttcagtaaccgagcggcacctggacctgcgatgttgggtggcactgggtgcccgtgtgctgacgcggctggcagagcatctgggtgaggctgaggtagctgctgagctgggcccactggctgcctcactggaggcagcagagagcctggatgagctgcactgggccccagagctaggagtctttgcagactttgggaaccacacaaaagcagtacagctgaagcccaggccccctcaggggctcgttcgggtggtgggtcggccccaacctcaactgcagtatgtagatgctcttggctatgtcagtctttttcccttgctgctgcgactgctggaccccacctcatcccgccttgggcccctgctggacattctagccgacagccgccatctctggagcccctttggtttacgctcccttgcagcctccagctccttttatggccagcgcaattcagagcatgatcccccctactggcggggtgctgtgtggctcaatgtcaactacctggctttgggagcactccaccactatgggcatctggagggtcctcaccaggctcgggctgccaaactccacggtgagctccgtgccaacgtggtaggcaatgtatggcgccagtaccaggctacaggctttctttgggagcagtacagtgaccgcgatgggcgaggcatgggctgccgccctttccacggctggaccagccttgtcttactggccatggctgaagactactgaagggagggagaggaggggagccaagacactcatgccactctggctctgaagggacaaaggcttctggcttttgcccccagccccttggataccagtaattcaaaccttcctcatttcatctcaggtgtctccttgctgtcatcccacatagccctggggtgaatgtgaatccagagtctatttttctaaataaattggaaaaaacattttgaactct

SEQ ID NO: 151600 - DNA, 520 bp, Homo sapiens
  Payload ID: 9843
  Gene Symbol: MOGS
  Gene Name: mannosyl-oligosaccharide glucosidase
  ENST ID: ENST00000414701
  CDS Start-End: 86-520
gaggcggaggcgcaggcgctggctggcaggtgtcgctaaccggacggtggtcgccagggcgagaggcgggagccggagaggactgatgtgggcgcagcagggcaccaccccggggactcctaagctcaggcacacgtgtgagcagggggacggtgtgggtccctatggctgggagttccacgacggcctctccttcgggcgccaacacatccaggatggggccttaaggctcaccactgagttcgtcaagaggcctgggggtcagcacggaggggactggagctggagagtgactgtagagcctcaggactcaggtacttctgccctccctttggtctccctgttcttctatgtggtgacagatggcaaggaagtcctactaccagaggttggggccaaggggcagttgaagtttatcagtgggcacaccagtgaacttggtgacttccgctttacacttttgccaccaaccagtccaggggatacagcccccaagtatggcagctacaatgtcttctgg

SEQ ID NO: 151601 - DNA, 1616 bp, Homo sapiens
  Payload ID: 9843
  Gene Symbol: MOGS
  Gene Name: mannosyl-oligosaccharide glucosidase
  ENST ID: ENST00000448666
  CDS Start-End: 142-1616
gcggaggcggaggcgcaggcgctggctggcaggtgtcgctaaccggacggtggtcgccagggcgagaggcgggagccggagagccccgccgtggccccggacctcttctggggaacctaccgccctcacgtctacttcggcatgaagacccgcagcccgaagcccctcctcaccggactgatgtgggcgcagcagggcaccaccccggggactcctaagctcaggcacacgtgtgagcagggggacggtgtgggtccctatggctgggagttccacgacggcctctccttcgggcgccaacacatccaggatggggccttaaggctcaccactgagttcgtcaagaggcctgggggtcagcacggaggggactggagctggagagtgactgtagagcctcaggactcaggtacttctgccctccctttggtctccctgttcttctatgtggtgacagatggcaaggaagtcctactaccagaggttggggccaaggggcagttgaagtttatcagtgggcacaccagtgaacttggtgacttccgctttacacttttgccaccaaccagtccaggggatacagcccccaagtatggcagctacaatgtcttctggacctccaacccaggactgcccctgctgacagagatggtaaagagtcgcctaaatagctggtttcagcatcggcccccaggggccccccctgaacgctacctcggcttgccaggatccctgaagtgggaggacagaggtccaagtgggcaagggcaggggcagttcttgatacagcaggtgaccctgaaaattcccatttccatagagtttgtgtttgaatcaggcagtgcccaggcaggaggaaatcaagccctgccaagactggcaggcagtctactgacccaggccctggagagccatgctgaaggctttagagagcgctttgagaagaccttccagctgaaggagaagggcctgagctctggcgagcaggttttgggtcaggctgccctcagcggcctccttggtggaattggctacttctacggacaagggctggtattgccagacatcggggtggaagggtctgagcagaaggtggacccagccctctttccacccgtacctctttttacagcagtgccctcccggtcattcttcccacgaggcttcctttgggatgaaggctttcaccagctggtggttcagcggtgggatccctccctcacccgggaagcccttggccactggctggggctgctaaatgctgatggctggattgggagggagcagatactgggggatgaggcccgagcccgggtgcctccagaattcctagtacaacgagcagtccacgccaaccccccaaccctacttttgcctgtagcccatatgctagaggttggtgaccctgacgacttggctttcctccgaaaggccttgccccgcctgcatgcctggttttcctggctccatcagagccaggcaggcccactgccactatcttaccgctggcggggacgggaccctgccttaccaaccttactgaaccccaagaccctaccctctgggctggatgactacccccgggcttcacacccttcagtaaccgagcggcacct

SEQ ID NO: 151602 - DNA, 2220 bp, Homo sapiens
  Payload ID: 9844
  Gene Symbol: MANSC1
  Gene Name: MANSC domain containing 1
  Uniprot ID: Q9H8J5
  ENST ID: ENST00000396349
  CDS Start-End: 265-1458
cttgctaaccacaaaacccgccaggccggtgcgggagctgcggagcatccgctgcggtcctcgccgagacccccgcgcggattcgccggtccttcccgcgggcgcgacagagctgtcctcgcacctggatggcagcaggggcgccggggtcctctcgacgccagagagaaatctcatcatctgtgcagccttcttaaagcaaactaagaccagagggaggattatccttgacctttgaagaccaaaactaaactgaaatttaaaatgttcttcgggggagaagggagcttgacttacactttgggaatcagaggcaatgagcccgtatatacttcaactcaagaagactgcattaattcttgctgttcaacaaaaaacatatcaggggacaaagcatgtaacttgatgatcttcgacactcgaaaaacagctagacaacccaactgctacctatttttctgtcccaacgaggaagcctgtccattgaaaccagcaaaaggacttatgagttacaggataattacagattttccatctttgaccagaaatttgccaagccaagagttaccccaggaagattctctcttacatggccaattttcacaagcagtcactcccctagcccatcatcacacagattattcaaagcccaccgatatctcatggagagacacactttctcagaagtttggatcctcagatcacttggagaaactatttaagatggatgaagcaagtgcccagctccttgcttataaggaaaaaggccattctcagagttcacaattttcctctgatcaagaaatagctcatctgctgcctgaaaatgtgagtgcgctcccagctacggtggcagttgcttctccacataccacctcggctactccaaagcccgccacccttctacccaccaatgcttcagtgacaccttctgggacttcccagccacagctggccaccacagctccacctgtaaccactgtcacttctcagcctcccacgaccctcatttctacagtttttacacgggctgcggctacactccaagcaatggctacaacagcagttctgactaccacctttcaggcacctacggactcgaaaggcagcttagaaaccataccgtttacagaaatctccaacctaactttgaacacagggaatgtgtataaccctactgcactttctatgtcaaatgtggagtcttccactatgaataaaactgcttcctgggaaggtagggaggccagtccaggcagttcctcccagggcagtgttccagaaaatcagtacggccttccatttgaaaaatggcttcttatcgggtccctgctctttggtgtcctgttcctggtgataggcctcgtcctcctgggtagaatcctctcggaatcactccgcaggaaacgttactcaagactggattatttgatcaatgggatctatgtggacatctaaggatggaactcggtgtctcttaattcatttagtaaccagaagcccaaatgcaatgagtttctgctgacttgctagtcttagcaggaggttgtattttgaagacaggaaaatgcccccttctgctttccttttttttttttggagacagagtcttgctttgttgcccaggctggagtgcagtagcacgatctcggctctcaccgcaacctccgtctcctgggttcaagcgattctcctgcctcagcctcctaagtatctgggattacaggcatgtgccaccacacctgggtgatttttgtatttttagtagagacggggtttcaccatgttggtcaggctggtctcaaactcctgacctagtgatccaccctcctcggcctcccaaagtgctgggattacaggcatgagccaccacagctggcccccttctgttttatgtttggtttttgagaaggaatgaagtgggaaccaaattaggtaattttgggtaatctgtctctaaaatattagctaaaaacaaagctctatgtaaagtaataaagtataattgccatataaatttcaaaattcaactggcttttatgcaaagaaacaggttaggacatctaggttccaattcattcacattcttggttccagataaaatcaactgtttatatcaatttctaatggatttgcttttctttttatatggattcctttaaaacttattccagatgtagttccttccaattaaatatttgaataaatcttttgttactc

SEQ ID NO: 151603 - DNA, 496 bp, Homo sapiens
  Payload ID: 9844
  Gene Symbol: MANSC1
  Gene Name: MANSC domain containing 1
  ENST ID: ENST00000543314
  CDS Start-End: 325-496
acaaaacccgccaggccggtgcgggagctgcggagcatccgctgcggtcctcgccgagacccccgcgcggattcgccggtccttcccgcgggcgcgacagagctgtcctcgcacctggatggcagcaggggcgccggggtcctctcgacgccagatttttgtgtggacataagttttcaattcatttgagtgaatacataggaggacaattgctgaattgtatgagagaaatctcatcatctgtgcagccttcttaaagcaaactaagaccagagggaggattatccttgacctttgaagaccaaaactaaactgaaatttaaaatgttcttcgggggagaagggagcttgacttacactttggtaataatttgcttcctgacactaaggctgtctgctagtcagaattgcctcaaaaagagtctagaagatgttgtcattgacatccagtcatctctttctaagggaatcagaggcaatgagcccgtatatactt

SEQ ID NO: 151604 - DNA, 5831 bp, Homo sapiens
  Payload ID: 9844
  Gene Symbol: MANSC1
  Gene Name: MANSC domain containing 1
  Uniprot ID: Q9H8J5
  ENST ID: ENST00000535902
  CDS Start-End: 565-1860
ttttaacttgcgcgggccgcgaggcaaggctcacctgcagaccctcgggccaccagcagggaggcacgcactccccctcgcagcgcgcccagcccggggtcagcggtgtggctgagctgggggggagcgcggggcggtggggggagccacctccctgcggggctcagcgctggggccgggagcccggagcctccgcggggagggacgcgctaatgttgccgggaagcagctccgggttgcagggcaggaacgtgcccttcccccgcggcaaacttgccgtcgctgcgacggaagcaggaacttgctaaccacaaaacccgccaggccggtgcgggagctgcggagcatccgctgcggtcctcgccgagacccccgcgcggattcgccggtccttcccgcgggcgcgacagagctgtcctcgcacctggatggcagcaggggcgccggggtcctctcgacgccagagagaaatctcatcatctgtgcagccttcttaaagcaaactaagaccagagggaggattatccttgacctttgaagaccaaaactaaactgaaatttaaaatgttcttcgggggagaagggagcttgacttacactttggtaataatttgcttcctgacactaaggctgtctgctagtcagaattgcctcaaaaagagtctagaagatgttgtcattgacatccagtcatctctttctaagggaatcagaggcaatgagcccgtatatacttcaactcaagaagactgcattaattcttgctgttcaacaaaaaacatatcaggggacaaagcatgtaacttgatgatcttcgacactcgaaaaacagctagacaacccaactgctacctatttttctgtcccaacgaggaagcctgtccattgaaaccagcaaaaggacttatgagttacaggataattacagattttccatctttgaccagaaatttgccaagccaagagttaccccaggaagattctctcttacatggccaattttcacaagcagtcactcccctagcccatcatcacacagattattcaaagcccaccgatatctcatggagagacacactttctcagaagtttggatcctcagatcacttggagaaactatttaagatggatgaagcaagtgcccagctccttgcttataaggaaaaaggccattctcagagttcacaattttcctctgatcaagaaatagctcatctgctgcctgaaaatgtgagtgcgctcccagctacggtggcagttgcttctccacataccacctcggctactccaaagcccgccacccttctacccaccaatgcttcagtgacaccttctgggacttcccagccacagctggccaccacagctccacctgtaaccactgtcacttctcagcctcccacgaccctcatttctacagtttttacacgggctgcggctacactccaagcaatggctacaacagcagttctgactaccacctttcaggcacctacggactcgaaaggcagcttagaaaccataccgtttacagaaatctccaacctaactttgaacacagggaatgtgtataaccctactgcactttctatgtcaaatgtggagtcttccactatgaataaaactgcttcctgggaaggtagggaggccagtccaggcagttcctcccagggcagtgttccagaaaatcagtacggccttccatttgaaaaatggcttcttatcgggtccctgctctttggtgtcctgttcctggtgataggcctcgtcctcctgggtagaatcctctcggaatcactccgcaggaaacgttactcaagactggattatttgatcaatgggatctatgtggacatctaaggatggaactcggtgtctcttaattcatttagtaaccagaagcccaaatgcaatgagtttctgctgacttgctagtcttagcaggaggttgtattttgaagacaggaaaatgcccccttctgctttccttttttttttttggagacagagtcttgctttgttgcccaggctggagtgcagtagcacgatctcggctctcaccgcaacctccgtctcctgggttcaagcgattctcctgcctcagcctcctaagtatctgggattacaggcatgtgccaccacacctgggtgatttttgtatttttagtagagacggggtttcaccatgttggtcaggctggtctcaaactcctgacctagtgatccaccctcctcggcctcccaaagtgctgggattacaggcatgagccaccacagctggcccccttctgttttatgtttggtttttgagaaggaatgaagtgggaaccaaattaggtaattttgggtaatctgtctctaaaatattagctaaaaacaaagctctatgtaaagtaataaagtataattgccatataaatttcaaaattcaactggcttttatgcaaagaaacaggttaggacatctaggttccaattcattcacattcttggttccagataaaatcaactgtttatatcaatttctaatggatttgcttttctttttatatggattcctttaaaacttattccagatgtagttccttccaattaaatatttgaataaatcttttgttactcagtagtgttctcataagtagcatgtccagctggataactttccatttatttccactagcaaaatgattatgtggtgaaaatatgcgttccacgttaaaatgacaaccccccctttttcccatcagtgagcaaagagcttcacttgggagaatctagcggaatgttagcccacatggagacaatgataagtcagttctgataaatggccatatccacttgggatctgttctagttaacttgtgtgtgtgtgtgtgtgtgtgtgtgtgtgtgtgtgtgtgtgacagagtcttgctctgtcacccaggctagagtgcagtggcgcgatctcggctcactgccagctccgcctcctgggttcccgccattctcctgcctcagcctcccaagtagctgggactacaggcgcccgccaacacgcccagctaattttttatatttttagtaaagacggggtttcactgtgttagtcaggatggtctcgatctcctgaccttgtgatccgcccgcctcggcctcccaaagtgctgggattacaggcgtgagccaccgtgcccggcctctagttaactttttaaagaagtattatagacattttctaaacttgtactaagttaaaaatgtaccactattattttatatccttacttaaattgaccagcaatcagtctaagcttaatttagaacaacattggaaataataactagcacaggccaggcgcggtggctcacgcctgtaatcccagcactttgggaggccgagatgggcaaatcacgaggtcaggagatcgagaccatcctggctaacacggtgaaaccccgcctctactaaaaatacaaaaaattagccgggcgtggtggcgggcgcctgtagttccagctacttgggaggctgaggcaggagagtagtttgaatccaggaggcggaggttgcggtgagccagattgcaccattgcgctccagcctgggcaacagagccagactccgtctcaaaaataataataataataactagcactaacatgatgctacaatttttactggttaccaattaaaatttctgagaaaggcttttaataaagttttccagacaagttataggtgaggtaacaaagagtccagaagtcccctgggtcagtttgatacctctttcctctggacttcaatttgcttatctgcaaaacaggaaatttgatcccttccaagtgtcaccagagtttttaaagataaaaatggaattcagatgcgaacttaatacagtgagcactagagggcagtagctggttaataagtacagcaattaagacaaatgcaggaaatgacagaaaaggcttttcttctccttcctcctcacctcttccttcctcctcacctccttcccctctgctcttctggtacccctcccccatttccctggtttacactaagttcataaagtacattaagaggaaagctggtctattgaaaatactacttttcttatattttccaacttaacagcttgacacaaatctccaaggggtttacataagctttaagtaggctgaataaataaaaccttgagtcaatttaacttaacaagtatttattgaatatccacatgtaggccagaatcagattagtaaccaggtgccttggaattttaaaatttctcctctctttattaatggatttagcgagtggaaatcaggctttctgtgatggtttataaaggtattttcctggctctcttggagttctctgtccaccttgctgcagtctttgttgtgatggggagaccacatgggagcggtccagatgagtgatgctacgggcccaaactgttagtggccgtgaggatataggttgtaggggacatctggagtggaaagagtgctcttctcacacagctctctctacttactgcccctaggatggtgggtgcaactgtggcaagggcagtcagggtaggggaatcccttagaggaattcagcagtgactagtctggttagcctttcccacaaggcccattgagttatgagccccctcctttggtttgtagaaagagaaggtagcagcctagaacaggtgagaagatgaggtaggtccttctgctcaaacatcctctctccgtattttaccaacacgatactgacctaggttaaaaagctactcttggccaggcgtggtggctcacgcctgtaatcccagcactttgggagtccaaggtgggtggatcacctgaggtcaggagttctagaccagcctggccaacatggtgaaaccccatctctacagaaatacaaaaattagccaggcatggtggcagacacctgtaatcccagctacttgggaggctgaggtaggataattgcttgaggccgggagggggcggttgcagtgagccaagatcgctccattgcactccagcctaggcgacagagcaagactctatctcaaaaaaataaaataaaataaaataaaaataagctactcttagccaggcacatagtggctcacatctgtaatctcagccctttgggagactgaggtgggaggatcacttgagcccaggaggtcgaggctgcagtgagccatgatcacgccactgcactccagcctgggcgacagaacgagagcccatctcaaaaaaaaaaacaaaacaacaacaacaaaaaaaaaactaaaaaactcttaaaaaacctgaggactcctggatgaatactgttatgtgcctgtttctcaattacccctggcctgagtgaggaacttttggaactctttggctcccagactgtggtgggcactaccggtcagctgcccagcagccagccctagtcccacttctgcctcatttgttacaggttggaagtgccaggttcagggatgggcctgtgacccaagttttagctgaaaggaaacctactagggacttctaggagagattttcttgcttgtaaagggaaggctgcacaaggagaaaagccctttctaaccacatccccttatttcatgcttgggatgctgaccatgtgaagacttggttgttggagctgtggtggcctccctgccatgatgaggggagaaggcactgccacactgagcgtggcagtgggtacaggaagagtccagtctccgggatgccttggttaattgacaggacaaaccctggaactgccaacttccatcttgttctgtaataataaatctctaatatttgtaccactttca

SEQ ID NO: 151605 - DNA, 1501 bp, Homo sapiens
  Payload ID: 9844
  Gene Symbol: MANSC1
  Gene Name: MANSC domain containing 1
  ENST ID: ENST00000545735
  CDS Start-End: 135-1187
aaaatgaacaaaggtgtttgtgttggactccataataagtgaagtttttcctacttgccctactctttagaaaatcgcatttcaaaatcatgcttatgaaacctttcattgcaggggacaaagcatgtaacttgatgatcttcgacactcgaaaaacagctagacaacccaactgctacctatttttctgtcccaacgaggaagcctgtccattgaaaccagcaaaaggacttatgagttacaggataattacagattttccatctttgaccagaaatttgccaagccaagagttaccccaggaagattctctcttacatggccaattttcacaagcagtcactcccctagcccatcatcacacagattattcaaagcccaccgatatctcatggagagacacactttctcagaagtttggatcctcagatcacttggagaaactatttaagatggatgaagcaagtgcccagctccttgcttataaggaaaaaggccattctcagagttcacaattttcctctgatcaagaaatagctcatctgctgcctgaaaatgtgagtgcgctcccagctacggtggcagttgcttctccacataccacctcggctactccaaagcccgccacccttctacccaccaatgcttcagtgacaccttctgggacttcccagccacagctggccaccacagctccacctgtaaccactgtcacttctcagcctcccacgaccctcatttctacagtttttacacgggctgcggctacactccaagcaatggctacaacagcagttctgactaccacctttcaggcacctacggactcgaaaggcagcttagaaaccataccgtttacagaaatctccaacctaactttgaacacagggaatgtgtataaccctactgcactttctatgtcaaatgtggagtcttccactatgaataaaactgcttcctgggaaggtagggaggccagtccaggcagttcctcccagggcagtgttccagaaaatcagtacggccttccatttgaaaaatggcttcttatcgggtccctgctctttggtgtcctgttcctggtgataggcctcgtcctcctgggtagaatcctctcggaatcactccgcaggaaacgttactcaagactggattatttgatcaatgggatctatgtggacatctaaggatggaactcggtgtctcttaattcatttagtaaccagaagcccaaatgcaatgagtttctgctgacttgctagtcttagcaggaggttgtattttgaagacaggaaaatgcccccttctgctttccttttttttttttggagacagagtcttgctttgttgcccaggctggagtgcagtagcacgatctcggctctcaccgcaacctccgtctcctgggttcaagcgattctcctgcctcagcctcctaagtatctgggattacaggcatgtgccaccacacctgggtgatttttgtatttttagtagagac

SEQ ID NO: 151606 - DNA, 496 bp, Homo sapiens; identical to SEQ ID NO: 151603
  Payload ID: 9844
  Gene Symbol: MANSC1
  Gene Name: MANSC domain containing 1
  ENST ID: ENST00000628134
  CDS Start-End: 325-496

SEQ ID NO: 151607 - DNA, 1501 bp, Homo sapiens; identical to SEQ ID NO: 151605
  Payload ID: 9844
  Gene Symbol: MANSC1
  Gene Name: MANSC domain containing 1
  ENST ID: ENST00000631077
  CDS Start-End: 135-1187

SEQ ID NO: 151608 - DNA, 2220 bp, Homo sapiens; identical to SEQ ID NO: 151602
  Payload ID: 9844
  Gene Symbol: MANSC1
  Gene Name: MANSC domain containing 1
  Uniprot ID: Q9H8J5
  ENST ID: ENST00000626912
  CDS Start-End: 265-1458

SEQ ID NO: 151609 - DNA, 5831 bp, Homo sapiens; identical to SEQ ID NO: 151604
  Payload ID: 9844
  Gene Symbol: MANSC1
  Gene Name: MANSC domain containing 1
  Uniprot ID: Q9H8J5
  ENST ID: ENST00000629245
  CDS Start-End: 565-1860

SEQ ID NO: 151610 - DNA, 1023 bp, Homo sapiens
  Payload ID: 9845
  Gene Symbol: MANSC4
  Gene Name: MANSC domain containing 4
  Uniprot ID: A6NHS7
  ENST ID: ENST00000381273
  CDS Start-End: 1-1023
atgcatgtggcagaggtagcagtgaacgtgatattgctcctaagcatggggtggacatcagactctctctgctcacccacaattttttacagagactgctggatccgtcgcttcccaggtcttctaatcaatctggaggagtctcagaagctgggagcccagttcttgaagtattattctgaaagcactggccagaagtgcagtaggagctgctgtcttcggaaggatgtttcctgtaacctggctgtcttctaccacagtcctattcatgacaatatcaactgcctccatgttcactgcccaacactggagagctgcatattagagcctggaaccagtgccattttgtacaacataacagacggtatagatccggatttgctggtttttgaacaatctcccacatatctaaatactcgttcttcatccaatagatgggacagactaaggattctaaaagctatgaatttagataaacaaaccaccacgataaatggtatgctgccatccacagaggctccatcctcaaccacgcatcaagatttggttgtaaacacaaacagtaccagttattctaaggaattaaccacagatttttgggcaagatttacttccctgaatgagtccattaccacaaagataaataaggtgtcaccaagtactgatttcatcagcaatccagataataagactatttctcctttctttgaacccatagacacaaaactttctcatatgcctgttccacctggactcaacagtagcaaacaattactaaacaaaaccaaaggatacaatagcagaaaccacacatctgcaaatgaagatgaggtatctgtgacttcaaagacttggctggtttctgtggccctttgcacctctgtcatctttctcggctgttgtatagtcatcctggcatctggatgctgtggaaagcagcagggccagtataaaccaggacagagaaaatcaggatccttgcaaattaaaaaccgtaaccatatgaaggagaactcttcatag

SEQ ID NO: 151611 - DNA, 2422 bp, Homo sapiens
  Payload ID: 9846
  Gene Symbol: MKNK1
  Gene Name: MAP kinase interacting serine/threonine kinase 1
  ENST ID: ENST00000342571
  CDS Start-End: 83-421
cagaaacaactctccaagttccatttccaaggaaagtcttaaccatttgtcccttctggcgtaccctctttcattgaaatccatgcagaatataccagagatgggcagtagcgaaccccttcccatcgcagatggtgacaggaggaggaagaagaagcggaggggccgggccactgactccttgccaggaaagtttgaagatatgtacaagctgacctctgaattgcttggagagggagcctatgccaaagttcaaggtgccgtgagcctacagaatggcaaagagtatgccgtcaaaatcatcgagaaacaagcagggcacagtcggagtagggtgtttcgagaggtggagacgctgtatcagtgtcagggaaacaagttccatcttagcccacatccagaagcaaaagcacttcaatgagcgagaagccagccgagtggtgcgggacgttgctgctgcccttgacttcctgcataccaaaggcattgctcatcgtgatctgaaaccagaaaatatattgtgtgaatctccagaaaaggtgtctccagtgaaaatctgtgactttgacttgggcagtgggatgaaactgaacaactcctgtacccccataaccacaccagagctgaccaccccatgtggctctgcagaatacatggcccctgaggtagtggaggtcttcacggaccaggccacattctacgacaagcgctgtgacctgtggagcctgggcgtggtcctctacatcatgctgagtggctacccacccttcgtgggtcactgcggggccgactgtggctgggaccggggcgaggtctgcagggtgtgccagaacaagctgtttgaaagcatccaggaaggcaagtatgagtttcctgacaaggactgggcacacatctccagtgaagccaaagacctcatctccaagctcctggtgcgagatgcaaagcagagacttagcgccgcccaagttctgcagcacccatgggtgcaggggcaagctccagaaaagggactccccacgccgcaagtcctccagaggaacagcagcacaatggacctgacgctcttcgcagctgaggccatcgcccttaaccgccagctatctcagcacgaagagaacgaactagcagaggagccagaggcactagctgatggcctctgctccatgaagctttcccctccctgcaagtcacgcctggcccggagacgggccctggcccaggcaggccgtggtgaagacaggagcccgcccacagcactctgaaatgctccagtcacaccttataggccctaggcctggccaggcattgtcccctggaaacctgtgtggctaaagtctgctgagcaggcagcagcctctgctctgtggctccattcaggctttttcatctacgaaggccctgaggttcccatcaacccccatttccctagggtcctggaggaaaaagctttttccaaaggggttgtctttgaaaaggaaagcaatcacttctcactttgcataattgcctgcagcaggaacatctcttcactgggctccacctgctcacccgcctgcagatctgggatccagcctgctctcaccgctgtagctgtggcggctggggctgcagcctgcagggagaagcaagaagcatcagttgacagaggctgccgacacgtgcctcttccctctcttctctgtcaccctcctctggcggtccttccaccttcctctgtcctccggatgtcctctttgcccgtcttctcccttggctgagcaaagccatcccctcaattcagggaagggcaaggagccttcctcattcaggaaatcaaatcagtcttccggtctgcagcacggaaaagcacataatctttctttgctgtgactgaaatgtatccctcgtttatcatcccctttgtttgtgattgctgctaaagtcagtagtatcgtttttttaaaaaaaaagtttggtgtttttaaccatgctgttccagcaaagatgataccttaaactcccactgcaagcccatgaacttcccagagagtggaacggcttgctcttctttctagaatgtccatgcacttgggttttaatcagcagttccctattattctgattttaagctgttcctgtgatgaacttagagacagcatcggtgtctgctgctgtgtccccaggtcttgtgtgggtggcacagatctgggcagttagatagtgctctgtgcctaaggtgaagccacactagggtgaagcctcacttccctgtttgagcaatgcagtgcctgctgcccgtgtgcatgaaggtacagccattcagataagtggaactattgagttacataaagaaaatagatttgcatttgtcaggcagacgtttatacaacaccacggtgcttttatacattgtgcttattttaataaaactgaaattcta

SEQ ID NO: 151612 - DNA, 2612 bp, Homo sapiens
  Payload ID: 9846
  Gene Symbol: MKNK1
  Gene Name: MAP kinase interacting serine/threonine kinase 1
  ENST ID: ENST00000341183
  CDS Start-End: 456-1445
tctctgatcgggcccaccccctggatctagcaccgcctcttccgcgttctcggaggagcgatctgcaggtaggggtgcgcgcgaccgctccccggcgggagccagcgaaggtttccatgtcagaggccgatggagaactgaagattgccacctacgcacaaaggccattgagacacttcgtgtagctggaagacaccaacttcctgacaggagctttatttcatttgggatttcaagtttacagatggtatcttctcaaaagttggaaaaacctatagagatgggcagtagcgaaccccttcccatcgcagatggtgacaggaggaggaagaagaagcggaggggccgggccactgactccttgccaggaaagtttgaagatatgtacaagctgacctctgaattgcttggagagggagcctatgccaaagttcaaggtgccgtgagcctacagaatggcaaagagtatgccgtcaaaatcatcgagaaacaagcagggcacagtcggagtagggtgtttcgagaggtggagacgctgtatcagtgtcagggaaacaagttccatcttagcccacatccagaagcaaaagcacttcaatgagcgagaagccagccgagtggtgcgggacgttgctgctgcccttgacttcctgcataccaaaggcattgctcatcgtgatctgaaaccagaaaatatattgtgtgaatctccagaaaaggtgtctccagtgaaaatctgtgactttgacttgggcagtgggatgaaactgaacaactcctgtacccccataaccacaccagagctgaccaccccatgtggctctgcagaatacatggcccctgaggtagtggaggtcttcacggaccaggccacattctacgacaagcgctgtgacctgtggagcctgggcgtggtcctctacatcatgctgagtggctacccacccttcgtgggtcactgcggggccgactgtggctgggaccggggcgaggtctgcagggtgtgccagaacaagctgtttgaaagcatccaggaaggcaagtatgagtttcctgacaaggactgggcacacatctccagtgaagccaaagacctcatctccaagctcctggtgcgagatgcaaagcagagacttagcgccgcccaagttctgcagcacccatgggtgcaggggcaagctccagaaaagggactccccacgccgcaagtcctccagaggaacagcagcacaatggacctgacgctcttcgcagctgaggccatcgcccttaaccgccagctatctcagcacgaagagaacgaactagcagaggagccagaggcactagctgatggcctctgctccatgaagctttcccctccctgcaagtcacgcctggcccggagacgggccctggcccaggcaggccgtggtgaagacaggagcccgcccacagcactctgaaatgctccagtcacaccttataggccctaggcctggccaggcattgtcccctggaaacctgtgtggctaaagtctgctgagcaggcagcagcctctgctctgtggctccattcaggctttttcatctacgaaggccctgaggttcccatcaacccccatttccctagggtcctggaggaaaaagctttttccaaaggggttgtctttgaaaaggaaagcaatcacttctcactttgcataattgcctgcagcaggaacatctcttcactgggctccacctgctcacccgcctgcagatctgggatccagcctgctctcaccgctgtagctgtggcggctggggctgcagcctgcagggagaagcaagaagcatcagttgacagaggctgccgacacgtgcctcttccctctcttctctgtcaccctcctctggcggtccttccaccttcctctgtcctccggatgtcctctttgcccgtcttctcccttggctgagcaaagccatcccctcaattcagggaagggcaaggagccttcctcattcaggaaatcaaatcagtcttccggtctgcagcacggaaaagcacataatctttctttgctgtgactgaaatgtatccctcgtttatcatcccctttgtttgtgattgctgctaaagtcagtagtatcgtttttttaaaaaaaaagtttggtgtttttaaccatgctgttccagcaaagatgataccttaaactcccactgcaagcccatgaacttcccagagagtggaacggcttgctcttctttctagaatgtccatgcacttgggttttaatcagcagttccctattattctgattttaagctgttcctgtgatgaacttagagacagcatcggtgtctgctgctgtgtccccaggtcttgtgtgggtggcacagatctgggcagttagatagtgctctgtgcctaaggtgaagccacactagggtgaagcctcacttccctgtttgagcaatgcagtgcctgctgcccgtgtgcatgaaggtacagccattcagataagtggaactattgagttacataaagaaaatagatttgcatttgtcaggcagacgtttatacaacaccacggtgcttttatacattgtgcttattttaataaaactgaaattctatgtgtggcct

SEQ ID NO: 151613 - DNA, 2618 bp, Homo sapiens
  Payload ID: 9846
  Gene Symbol: MKNK1
  Gene Name: MAP kinase interacting serine/threonine kinase 1
  Uniprot ID: Q9BUB5
  ENST ID: ENST00000371945
  CDS Start-End: 188-1462
gcgatctgcaggtaggggtgcgcgcgaccgctccccggcgggagccagcgaaggtttccatgtcagaggccgatggagaactgaagattgccacctacgcacaaaggccattgagacacttcgtgtagctggaagacaccaacttcctgacaggagctttatttcatttgggatttcaagtttacagatggtatcttctcaaaagttggaaaaacctatagagatgggcagtagcgaaccccttcccatcgcagatggtgacaggaggaggaagaagaagcggaggggccgggccactgactccttgccaggaaagtttgaagatatgtacaagctgacctctgaattgcttggagagggagcctatgccaaagttcaaggtgccgtgagcctacagaatggcaaagagtatgccgtcaaaatcatcgagaaacaagcagggcacagtcggagtagggtgtttcgagaggtggagacgctgtatcagtgtcagggaaacaagaacattttggagctgattgagttctttgaagatgacacaaggttttacttggtctttgagaaattgcaaggaggttccatcttagcccacatccagaagcaaaagcacttcaatgagcgagaagccagccgagtggtgcgggacgttgctgctgcccttgacttcctgcataccaaaggcattgctcatcgtgatctgaaaccagaaaatatattgtgtgaatctccagaaaaggtgtctccagtgaaaatctgtgactttgacttgggcagtgggatgaaactgaacaactcctgtacccccataaccacaccagagctgaccaccccatgtggctctgcagaatacatggcccctgaggtagtggaggtcttcacggaccaggccacattctacgacaagcgctgtgacctgtggagcctgggcgtggtcctctacatcatgctgagtggctacccacccttcgtgggtcactgcggggccgactgtggctgggaccggggcgaggtctgcagggtgtgccagaacaagctgtttgaaagcatccaggaaggcaagtatgagtttcctgacaaggactgggcacacatctccagtgaagccaaagacctcatctccaagctcctggtgcgagatgcaaagcagagacttagcgccgcccaagttctgcagcacccatgggtgcaggggcaagctccagaaaagggactccccacgccgcaagtcctccagaggaacagcagcacaatggacctgacgctcttcgcagctgaggccatcgcccttaaccgccagctatctcagcacgaagagaacgaactagcagaggagccagaggcactagctgatggcctctgctccatgaagctttcccctccctgcaagtcacgcctggcccggagacgggccctggcccaggcaggccgtggtgaagacaggagcccgcccacagcactctgaaatgctccagtcacaccttataggccctaggcctggccaggcattgtcccctggaaacctgtgtggctaaagtctgctgagcaggcagcagcctctgctctgtggctccattcaggctttttcatctacgaaggccctgaggttcccatcaacccccatttccctagggtcctggaggaaaaagctttttccaaaggggttgtctttgaaaaggaaagcaatcacttctcactttgcataattgcctgcagcaggaacatctcttcactgggctccacctgctcacccgcctgcagatctgggatccagcctgctctcaccgctgtagctgtggcggctggggctgcagcctgcagggagaagcaagaagcatcagttgacagaggctgccgacacgtgcctcttccctctcttctctgtcaccctcctctggcggtccttccaccttcctctgtcctccggatgtcctctttgcccgtcttctcccttggctgagcaaagccatcccctcaattcagggaagggcaaggagccttcctcattcaggaaatcaaatcagtcttccggtctgcagcacggaaaagcacataatctttctttgctgtgactgaaatgtatccctcgtttatcatcccctttgtttgtgattgctgctaaagtcagtagtatcgtttttttaaaaaaaaagtttggtgtttttaaccatgctgttccagcaaagatgataccttaaactcccactgcaagcccatgaacttcccagagagtggaacggcttgctcttctttctagaatgtccatgcacttgggttttaatcagcagttccctattattctgattttaagctgttcctgtgatgaacttagagacagcatcggtgtctgctgctgtgtccccaggtcttgtgtgggtggcacagatctgggcagttagatagtgctctgtgcctaaggtgaagccacactagggtgaagcctcacttccctgtttgagcaatgcagtgcctgctgcccgtgtgcatgaaggtacagccattcagataagtggaactattgagttacataaagaaaatagatttgcatttgtcaggcagacgtttatacaacaccacggtgcttttatacattgtgcttattttaataaaactgaaattct

SEQ ID NO: 151614 - DNA, 2719 bp, Homo sapiens
  Payload ID: 9846
  Gene Symbol: MKNK1
  Gene Name: MAP kinase interacting serine/threonine kinase 1
  Uniprot ID: Q9BUB5
  ENST ID: ENST00000371946
  CDS Start-End: 165-1562
gcgaccgctccccggcgggagccagcgaaggtttccatgtcagaggccgatggagaactgaagattgccacctacgcacaaaggccattgagacacttcgtgtagctggaagacaccaacttcctgacaggagctttatttcatttgggatttcaagtttacagatggtatcttctcaaaagttggaaaaacctatagagatgggcagtagcgaaccccttcccatcgcagatggtgacaggaggaggaagaagaagcggaggggccgggccactgactccttgccaggaaagtttgaagatatgtacaagctgacctctgaattgcttggagagggagcctatgccaaagttcaaggtgccgtgagcctacagaatggcaaagagtatgccgtcaaaatcatcgagaaacaagcagggcacagtcggagtagggtgtttcgagaggtggagacgctgtatcagtgtcagggaaacaagaacattttggagctgattgagttctttgaagatgacacaaggttttacttggtctttgagaaattgcaaggaggttccatcttagcccacatccagaagcaaaagcacttcaatgagcgagaagccagccgagtggtgcgggacgttgctgctgcccttgacttcctgcataccaaagacaaagtctctctctgtcacctaggctggagtgctatggcgccatcagggctcactgcagccccaacctccctgggctccagtgatcctcccacctcagcctcccaagtagctgggactacaggcattgctcatcgtgatctgaaaccagaaaatatattgtgtgaatctccagaaaaggtgtctccagtgaaaatctgtgactttgacttgggcagtgggatgaaactgaacaactcctgtacccccataaccacaccagagctgaccaccccatgtggctctgcagaatacatggcccctgaggtagtggaggtcttcacggaccaggccacattctacgacaagcgctgtgacctgtggagcctgggcgtggtcctctacatcatgctgagtggctacccacccttcgtgggtcactgcggggccgactgtggctgggaccggggcgaggtctgcagggtgtgccagaacaagctgtttgaaagcatccaggaaggcaagtatgagtttcctgacaaggactgggcacacatctccagtgaagccaaagacctcatctccaagctcctggtgcgagatgcaaagcagagacttagcgccgcccaagttctgcagcacccatgggtgcaggggcaagctccagaaaagggactccccacgccgcaagtcctccagaggaacagcagcacaatggacctgacgctcttcgcagctgaggccatcgcccttaaccgccagctatctcagcacgaagagaacgaactagcagaggagccagaggcactagctgatggcctctgctccatgaagctttcccctccctgcaagtcacgcctggcccggagacgggccctggcccaggcaggccgtggtgaagacaggagcccgcccacagcactctgaaatgctccagtcacaccttataggccctaggcctggccaggcattgtcccctggaaacctgtgtggctaaagtctgctgagcaggcagcagcctctgctctgtggctccattcaggctttttcatctacgaaggccctgaggttcccatcaacccccatttccctagggtcctggaggaaaaagctttttccaaaggggttgtctttgaaaaggaaagcaatcacttctcactttgcataattgcctgcagcaggaacatctcttcactgggctccacctgctcacccgcctgcagatctgggatccagcctgctctcaccgctgtagctgtggcggctggggctgcagcctgcagggagaagcaagaagcatcagttgacagaggctgccgacacgtgcctcttccctctcttctctgtcaccctcctctggcggtccttccaccttcctctgtcctccggatgtcctctttgcccgtcttctcccttggctgagcaaagccatcccctcaattcagggaagggcaaggagccttcctcattcaggaaatcaaatcagtcttccggtctgcagcacggaaaagcacataatctttctttgctgtgactgaaatgtatccctcgtttatcatcccctttgtttgtgattgctgctaaagtcagtagtatcgtttttttaaaaaaaaagtttggtgtttttaaccatgctgttccagcaaagatgataccttaaactcccactgcaagcccatgaacttcccagagagtggaacggcttgctcttctttctagaatgtccatgcacttgggttttaatcagcagttccctattattctgattttaagctgttcctgtgatgaacttagagacagcatcggtgtctgctgctgtgtccccaggtcttgtgtgggtggcacagatctgggcagttagatagtgctctgtgcctaaggtgaagccacactagggtgaagcctcacttccctgtttgagcaatgcagtgcctgctgcccgtgtgcatgaaggtacagccattcagataagtggaactattgagttacataaagaaaatagatttgcatttgtcaggcagacgtttatacaacaccacggtgcttttatacattgtgcttattttaataaaactgaaattcta

SEQ ID NO: 151615 - DNA, 1270 bp, Homo sapiens
  Payload ID: 9846
  Gene Symbol: MKNK1
  Gene Name: MAP kinase interacting serine/threonine kinase 1
  Uniprot ID: Q9BUB5
  ENST ID: ENST00000428112
  CDS Start-End: 164-1207
ttccgcgttctcggaggagcgatctgcaggtttccatgtcagaggccgatggagaactgaagattgccacctacgcacaaaggccattgagacacttcgtgtagctggaagacaccaacttcctgacaggagctttatttcatttgggatttcaagtttacagatggtatcttctcaaaagttggaaaaacctatagagatgggcagtagcgaaccccttcccatcgcagatggtgacaggaggaggaagaagaagcggaggggccgggccactgactccttgccaggaaagtttgaagatatgtacaagctgacctctgaattgcttggagagggagcctatgccaaagttcaaggtgccgtgagcctacagaatggcaaagagtatgccgtcaaaatcatcgagaaacaagcagggcacagtcggagtagggtgtttcgagaggtggagacgctgtatcagtgtcagggaaacaagaacattttggagctgattgagttctttgaagatgacacaaggttttacttggtctttgagaaattgcaaggaggttccatcttagcccacatccagaagcaaaagcacttcaatgagcgagaagccagccgagtggtgcgggacgttgctgctgcccttgacttcctgcataccaaaggcattgctcatcgtgatctgaaaccagaaaatatattgtgtgaatctccagaaaaggtgtctccagtgaaaatctgtgactttgacttgggcagtgggatgaaactgaacaactcctgtacccccataaccacaccagagctgaccaccccatgtggctctgcagaatacatggcccctgaggtagtggaggtcttcacggaccaggccacattctacgacaagcgctgtgacctgtggagcctgggcgtggtcctctacatcatgctgagtggctacccacccttcgtgggtcactgcggggccgactgtggctgggaccggggcgaggtctgcagggtgtgccagaacaagctgtttgaaagcatccaggaaggcaagtatgagtttcctgacaaggactgggcacacatctccagtgaagccaaagacctcatctccaagctcctggtgcgagatgcaaagcagagacttagcgccgcccaagttctgcagcacccatgggtgcagggggaacagcagcacaatggacctgacgctcttcgcagctgaggccatcgcccttaaccgccagctatctcagcacgaagagaacgaactagcagaggagccaga

SEQ ID NO: 151616 - DNA, 580 bp, Homo sapiens
  Payload ID: 9846
  Gene Symbol: MKNK1
  Gene Name: MAP kinase interacting serine/threonine kinase 1
  ENST ID: ENST00000532783
  CDS Start-End: 68-580
actgggcctgcggtgccgatgagaaaatagatgcagacacgggttgccactggactgcattcaagagatgggcagtagcgaaccccttcccatcgcagatggtgacaggaggaggaagaagaagcggaggggccgggccactgactccttgccaggaaagtttgaagatatgtacaagctgacctctgaattgcttggagagggagcctatgccaaagttcaaggtgccgtgagcctacagaatggcaaagagtatgccgtcaaaatcatcgagaaacaagcagggcacagtcggagtagggtgtttcgagaggtggagacgctgtatcagtgtcagggaaacaagaacattttggagctgattgagttctttgaagatgacacaaggttttacttggtctttgagaaattgcaaggaggttccatcttagcccacatccagaagcaaaagcacttcaatgagcgagaagccagccgagtggtgcgggacgttgctgctgcccttgacttcctgcataccaaaggcattgctcatcgtgatctgaaaccagaaaatatattgtgtgaatctccagaaaag

SEQ ID NO: 151617 - DNA, 494 bp, Homo sapiens
  Payload ID: 9846
  Gene Symbol: MKNK1
  Gene Name: MAP kinase interacting serine/threonine kinase 1
  ENST ID: ENST00000532110
  CDS Start-End: 117-494
ctcttgcctgtgagacttggacttggccactaagagagagagcccagctcatttctctaaaaacgtggatagcagaggagtgcctcgctctgtcacccaggttggagtgcagtggcatgatcttgggtcattgcagcctcgacctcctgggctcaagcaatcctcccacctcagcctcccaagcagctacaggtttccatgtcagaggccgatggagaactgaagattgccacctacgcacaaaggccattgagacacttcgtgtagctggaagacaccaacttcctgacaggagctttatttcatttgggatttcaagtttacagatggtatcttctcaaaagttggaaaaacctatagagatgggcagtagcgaaccccttcccatcgcagatggtgacaggaggaggaagaagaagcggaggggccgggccactgactccttgccaggaaagtttgaagatatgtacaagctgacctctgaattgcttgga

SEQ ID NO: 151618 - DNA, 540 bp, Homo sapiens
  Payload ID: 9846
  Gene Symbol: MKNK1
  Gene Name: MAP kinase interacting serine/threonine kinase 1
  ENST ID: ENST00000474868
  CDS Start-End: 116-229
atggagaactgaagattgccacctacgcacaaaggccattgagacacttcgtgtagctggaagacaccaacttcctgacaggagctttatttcatttgggatttcaagtttacagatggtatcttctcaaaagttggaaaaacctatagtttcagaaacaactctccaagttccatttccaaggaaagtcttaaccatttgtcccttctggcgtaccctctttcattgaaatccatgcagaatataccagagatgggcagtagcgaaccccttcccatcgcagatggtgacaggaggaggaagaagaagcggaggggccgggccactgactccttgccaggaaagtttgaagatatgtacaagctgacctctgaattgcttggagagggagcctatgccaaagttcaaggtgccgtgagcctacagaatggcaaagagtatgccgtcaaagtgagtgtctcagctgaatgccaggctttactttgcaaatagtcattcctagctcatcttgaaccaaataaatgttatattccataagaa

SEQ ID NO: 151619 - DNA, 540 bp, Homo sapiens
  Payload ID: 9846
  Gene Symbol: MKNK1
  Gene Name: MAP kinase interacting serine/threonine kinase 1
  ENST ID: ENST00000528237
  CDS Start-End: 112-540
aagaattcctaggccaagggaagcagtttcagaaacaactctccaagttccatttccaaggaaagtcttaaccatttgtcccttctggcgtaccctctttcattgaaatccatgcagaatataccagagatgggcagtagcgaaccccttcccatcgcagatggtgacaggaggaggaagaagaagcggaggggccgggccactgactccttgccaggaaagtttgaagatatgtacaagctgacctctgaattgcttggagagggagcctatgccaaagttcaaggtgccgtgagcctacagaatggcaaagagtatgccgtcaaaatcatcgagaaacaagcagggcacagtcggagtagggtgtttcgagaggtggagacgctgtatcagtgtcagggaaacaagaacattttggagctgattgagttctttgaagatgacacaaggttttacttggtctttgagaaattgcaaggaggttccatcttagcccacatccagaagcaaaagcacttcaatgagcgagaagccagccga

SEQ ID NO: 151620 - DNA, 1557 bp, Homo sapiens
  Payload ID: 9846
  Gene Symbol: MKNK1
  Gene Name: MAP kinase interacting serine/threonine kinase 1
  ENST ID: ENST00000528077
  CDS Start-End: 219-575
ctagcaccgcctcttccgcgttctcggaggagcgatctgcaggtaggggtgcgcgcgaccgctccccggcgggagccagcgaaggtttccatgtcagaggccgatggagaactgaagattgccacctacgcacaaaggccattgagacacttcgtgtagctggaagacaccaacttcctgacaggagctttatttcatttgggatttcaagtttacagatggtatcttctcaaaagttggaaaaacctatagagatgggcagtagcgaaccccttcccatcgcagatggtgacaggaggaggaagaagaagcggaggggccgggccactgactccttgccaggaaagtttgaagatatgtacaagctgacctctgaattgcttggagagggagcctatgccaaagttcaaggtgccgtgagcctacagaatggcaaagagtatgccgtcaaaatcatcgagaaacaagcagggcacagtcggagtagggtgtttcgagaggtggagacgctgtatcagtgtcagggaaacaagttccatcttagcccacatccagaagcaaaagcacttcaatgagcgagaagccagccgagtggtgcgggacgttgctgctgcccttgacttcctgcataccaaaggcattgctcatcgtgatctgaaaccagaaaatatattgtgtgaatctccagaaaaggtgtctccagtgaaaatctgtgactttgacttgggcagtgggatgaaactgaacaactcctgtacccccataaccacaccagagctgaccaccccatgtggctctgcagaatacatggcccctgaggtagtggaggtcttcacggaccaggccacattctacgacaagcgctgtgacctgtggagcctgggcgtggtcctctacatcatgctgagtggctacccacccttcgtgggtcactgcggggccgactgtggctgggaccggggcgaggtctgcagggtgtgccagaacaagctgtttgaaagcatccaggaaggcaagtatgagtttcctgacaaggactgggcacacatctccagtgaagccaaagacctcatctccaagctcctggtgcgagatgcaaagcagagacttagcgccgcccaagttctgcagcacccatgggtgcagggggaacagcagcacaatggacctgacgctcttcgcagctgaggccatcgcccttaaccgccagctatctcagcacgaagagaacgaactagcagaggagccagaggcactagctgatggcctctgctccatgaagctttcccctccctgcaagtcacgcctggcccggagacgggccctggcccaggcaggccgtggtgaagacaggagcccgcccacagcactctgaaatgctccagtcacaccttataggccctaggcctggccaggcattgtcccctggaaacctgtgtggctaaagtctgctgagcaggcagcagcctctgctctgtggctccattcaggctttttcatctacgaaggccctgaggttcccatcaacccccatttccctagggtcctggaggaaaa

SEQ ID NO: 151621 - DNA, 567 bp, Homo sapiens
  Payload ID: 9846
  Gene Symbol: MKNK1
  Gene Name: MAP kinase interacting serine/threonine kinase 1
  ENST ID: ENST00000531769
  CDS Start-End: 268-567
gcaggagggcagccgcggccggcaggacaggcagacggacaggctgacaggagagagaacaggcactgcgggacctgcaggagaaaggcgatcctgtggctgggaatgtgaccccacggccagaagaggacccgtttccatgtcagaggccgatggagaactgaagattgccacctacgcacaaaggccattgagacacttcgtgtagctggaagacaccaacttcctgacaggagctttatttcatttgggatttcaagtttacagatggtatcttctcaaaagttggaaaaacctatagagatgggcagtagcgaaccccttcccatcgcagatggtgacaggaggaggaagaagaagcggaggggccgggccactgactccttgccaggaaagtttgaagatatgtacaagctgacctctgaattgcttggagagggagcctatgccaaagttcaaggtgccgtgagcctacagaatggcaaagagtatgccgtcaaaatcatcgagaaacaagcagggcacagtcggagtagggtgtttcgagaggtggagacgctgtatcag

SEQ ID NO: 151622 - DNA, 682 bp, Homo sapiens
  Payload ID: 9846
  Gene Symbol: MKNK1
  Gene Name: MAP kinase interacting serine/threonine kinase 1
  ENST ID: ENST00000526513
  CDS Start-End: 175-357
aggggtgcgcgcgaccgctccccggcgggagccagcgaaggtttccatgtcagaggccgatggagaactgaagattgccacctacgcacaaaggccattgagacacttcgtgtagctggaagacaccaacttcctgacaggagctttatttcatttgggatttcaagtttacagatggtatcttctcaaaagttggaaaaacctatagagatgggcagtagcgaaccccttcccatcgcagatggtgacaggaggaggaagaagaagcggaggggccgggccactgactccttgccaggaaagtttgaagatgtgattcttccctcagctattcctggaggggctgctgagagatagaactatataagaggaagagagaaacaccaaaggccatggccgcaaatgaaacttcagtctcctatatgtacaagctgacctctgaattgcttggagagggagcctatgccaaagttcaaggtgccgtgagcctacagaatggcaaagagtatgccgtcaaaatcatcgagaaacaagcagggcacagtcggagtagggtgtttcgagaggtggagacgctgtatcagtgtcagggaaacaagaacattttggagctgattgagttctttgaagatgacacaaggttttacttggtctttgagaaattgcaaggaggttccatctt

SEQ ID NO: 151623 - DNA, 1121 bp, Homo sapiens
  Payload ID: 9846
  Gene Symbol: MKNK1
  Gene Name: MAP kinase interacting serine/threonine kinase 1
  ENST ID: ENST00000531355
  CDS Start-End: 188-358
accccctggatctagcaccgcctcttccgcgttctcggaggagcgatctgcaggtttccatgtcagaggccgatggagaactgaagattgccacctacgcacaaaggccattgagacacttcgtgtagctggaagacaccaacttcctgacaggagctttatttcatttgggatttcaagtttacagatggtatcttctcaaaagttggaaaaacctatagagatgggcagtagcgaaccccttcccatcgcagatggtgacaggaggaggaagaagaagcggaggggccgggccactgactccttgccaggaaagtttgaagatcatcgagaaacaagcagggcacagtcggagtagggtgtttcgagaggtggagacgctgtatcagtgtcagggaaacaagaacattttggagctgattgagttctttgaagatgacacaaggttttacttggtctttgagaaattgcaaggaggttccatcttagcccacatccagaagcaaaagcacttcaatgagcgagaagccagccgagtggtgcgggacgttgctgctgcccttgacttcctgcataccaaaggcattgctcatcgtgatctgaaaccagaaaatatattgtgtgaatctccagaaaaggtgtctccagtgaaaatctgtgactttgacttgggcagtgggatgaaactgaacaactcctgtacccccataaccacaccagagctgaccaccccatgtggctctgcagaatacatggcccctgaggtagtggaggtcttcacggaccaggccacattctacgacaagcgctgtgacctgtggagcctgggcgtggtcctctacatcatgctgagtggctacccacccttcgtgggtcactgcggggccgactgtggctgggaccggggcgaggtctgcagggtgtgccagtgtggcctcaggaggaatcttttgtacctagaacaagctgtttgaaagcatccaggaaggcaagtatgagtttcctgacaaggactgggcacacatctccagtgaagccaaagacctcatctccaagctcctggtgcgagatgcaaagcagagacttagcgccgcccaagttctgcagcacccatgggtgca

SEQ ID NO: 151624 - DNA, 464 bp, Homo sapiens
  Payload ID: 9846
  Gene Symbol: MKNK1
  Gene Name: MAP kinase interacting serine/threonine kinase 1
  ENST ID: ENST00000465783
  CDS Start-End: 135-410
gtttccatgtcagaggccgatggagaactgaagattgccacctacgcacaaaggccattgagacacttcgtgtagctggaagacaccaacttcctgacaggagctttatttcatttgggatttcaagtttacagatggtatcttctcaaaagttggaaaaacctatagagatgggcagtagcgaaccccttcccatcgcagatggtgacaggaggaggaagaagaagcggaggggccgggccactgactccttgccaggaaagtttgaagatatgtacaagctgacctctgaattgcttggagagggagcctatgccaaagttcaaggtgccgtgagcctacagaatggcaaagagtatgccgtcaaagtgagtgtctcagctgaatgccaggctttactttgcaaatagtcattcctagctcatcttgaaccaaataaatgttatattccataagaatgggga

SEQ ID NO: 151625 - DNA, 786 bp, Homo sapiens
  Payload ID: 9846
  Gene Symbol: MKNK1
  Gene Name: MAP kinase interacting serine/threonine kinase 1
  ENST ID: ENST00000524749
  CDS Start-End: 1-257
ccacaccagagctgaccaccccatgtggctctgcagaatacatggcccctgaggtagtggaggtcttcacggaccaggccacattctacgacaagcgctgtgacctgtggagcctgggcgtggtcctctacatcatgctgagtggctacccacccttcgtgggtcactgcggggccgactgtggctgggaccggggcgaggtctgcagggtgtgccaggaacagcagcacaatggacctgacgctcttcgcagctgaggccatcgcccttaaccgccagctatctcagcacgaagagaacgaactagcagaggagccagaggcactagctgatggcctctgctccatgaagctttcccctccctgcaagtcacgcctggcccggagacgggccctggcccaggcaggccgtggtgaagacaggagcccgcccacagcactctgaaatgctccagtcacaccttataggccctaggcctggccaggcattgtcccctggaaacctgtgtggctaaagtctgctgagcaggcagcagcctctgctctgtggctccattcaggctttttcatctacgaaggccctgaggttcccatcaacccccatttccctagggtcctggaggaaaaagctttttccaaaggggttgtctttgaaaaggaaagcaatcacttctcactttgcataattgcctgcagcaggaacatctcttcactgggctccacctgctcacccgcctgcagatctgggatccagcctgctctcaccgctgtagctgtggcggctggg

SEQ ID NO: 151626 - DNA, 530 bp, Homo sapiens
  Payload ID: 9846
  Gene Symbol: MKNK1
  Gene Name: MAP kinase interacting serine/threonine kinase 1
  ENST ID: ENST00000529170
  CDS Start-End: 226-530
ttccgcgttctcggaggagcgatctgcaggtaggggtgcgcgcgaccgctccccggcgggagccagcgaaggtaaaagcgagacctgcgaggtttccatgtcagaggccgatggagaactgaagattgccacctacgcacaaaggccattgagacacttcgtgtagctggaagacaccaacttcctgacaggagctttatttcatttgggatttcaagtttacagatggtatcttctcaaaagttggaaaaacctatagagatgggcagtagcgaaccccttcccatcgcagatggtgacaggaggaggaagaagaagcggaggggccgggccactgactccttgccaggaaagtttgaagatatgtacaagctgacctctgaattgcttggagagggagcctatgccaaagttcaaggtgccgtgagcctacagaatggcaaagagtatgccgtcaaaatcatcgagaaacaagcagggcacagtcggagtagggtgtttcgagaggtggagacgctgtatcagtgtca

SEQ ID NO: 151627 - DNA, 738 bp, Homo sapiens
  Payload ID: 9846
  Gene Symbol: MKNK1
  Gene Name: MAP kinase interacting serine/threonine kinase 1
  ENST ID: ENST00000496619
  CDS Start-End: 203-738
tctctgatcgggcccaccccctggatctagcaccgcctcttccgcgttctcggaggagcgatctgcaggtttccatgtcagaggccgatggagaactgaagattgccacctacgcacaaaggccattgagacacttcgtgtagctggaagacaccaacttcctgacaggagctttatttcatttgggatttcaagtttacagatggtatcttctcaaaagttggaaaaacctatagagatgggcagtagcgaaccccttcccatcgcagatggtgacaggaggaggaagaagaagcggaggggccgggccactgactccttgccaggaaagtttgaagatatgtacaagctgacctctgaattgcttggagagggagcctatgccaaagttcaaggtgccgtgagcctacagaatggcaaagagtatgccgtcaaaatcatcgagaaacaagcagggcacagtcggagtagggtgtttcgagaggtggagacgctgtatcagtgtcagggaaacaagaacattttggagctgattgagttctttgaagatgacacaaggttttacttggtctttgagaaattgcaaggaggttccatcttagcccacatccagaagcaaaagcacttcaatgagcgagaagccagccgagtggtgcgggacgttgctgctgcccttgacttcctgcataccaaaggcattgctcatcgtgatctgaaaccagaaaatatattgtgtga

SEQ ID NO: 151628 - DNA, 3774 bp, Homo sapiens
  Payload ID: 9847
  Gene Symbol: MKNK2
  Gene Name: MAP kinase interacting serine/threonine kinase 2
  Uniprot ID: Q9HBH9
  ENST ID: ENST00000250896
  CDS Start-End: 246-1643
cggctcctctcagcggcggtggcccaggtagaggggtccgcgctggcggcggcggcggcgctgttccccgcgcggtccgcggagcggggtccgggctgcgcgacgtggggcggcggcggcactgcggccccggcccaagcccgaccccgggtcccctcctcggccgccccccgcccggccgcccgccctcgggcctccccccgggccctcggtcccctcccccgctggcggggcccggacagaagatggtgcagaagaaaccagccgaacttcagggtttccaccgttcgttcaaggggcagaaccccttcgagctggccttctccctagaccagcccgaccacggagactctgactttggcctgcagtgctcagcccgccctgacatgcccgccagccagcccattgacatcccggacgccaagaagaggggcaagaagaagaagcgcggccgggccaccgacagcttctcgggcaggtttgaagacgtctaccagctgcaggaagatgtgctgggggagggcgctcatgcccgagtgcagacctgcatcaacctgatcaccagccaggagtacgccgtcaagatcattgagaagcagccaggccacattcggagcagggttttcagggaggtggagatgctgtaccagtgccagggacacaggaacgtcctagagctgattgagttcttcgaggaggaggaccgcttctacctggtgtttgagaagatgcggggaggctccatcctgagccacatccacaagcgccggcacttcaacgagctggaggccagcgtggtggtgcaggacgtggccagcgccttggactttctgcataacaaaggcatcgcccacagggacctaaagccggaaaacatcctctgtgagcaccccaaccaggtctcccccgtgaagatctgtgacttcgacctgggcagcggcatcaaactcaacggggactgctcccctatctccaccccggagctgctcactccgtgcggctcggcggagtacatggccccggaggtagtggaggccttcagcgaggaggctagcatctacgacaagcgctgcgacctgtggagcctgggcgtcatcttgtatatcctactcagcggctacccgcccttcgtgggccgctgtggcagcgactgcggctgggaccgcggcgaggcctgccctgcctgccagaacatgctgtttgagagcatccaggagggcaagtacgagttccccgacaaggactgggcccacatctcctgcgctgccaaagacctcatctccaagctgctggtccgtgacgccaagcagaggctgagtgccgcccaagtcctgcagcacccctgggttcaggggtgcgccccggagaacaccttgcccactcccatggtcctgcagaggaacagctgtgccaaagacctcacgtccttcgcggctgaggccattgccatgaaccggcagctggcccagcacgacgaggacctggctgaggaggaggccgcggggcagggccagcccgtcctggtccgagctacctcacgctgcctgcagctgtctccaccctcccagtccaagctggcgcagcggcggcaaagggccagtctgtcctcggccccagtggtcctggtgggagaccacgcctgaccctcccatctcccctctgtacataggtcacccgtcccccaatcaaatctaaaggttttttaagctatcgccagccggtgtccagcgggctgcccctcctctgcctggattcccaggcactaagctcagctgaggggggtgttttatagaaggtttttgcttttgggttttttttttcctgtttccacccctccccgttattttttcctttggatggttaaaagcattgcaggcacccgggaaggtgagcagagggtaggtgggtgggcttgtcccctccccggtcccccgccctgctcacctctactatgaaggtgcccccaggtcacctgtgctgcccgccatctgcccacgtggcttgcagtgactcaggagagcaggcccacagcgtttgccatcttgcagagctggggaggggcacaggaccctgccctcgtgttccctcccagcccgcagtatttcagggacaggctcttcccctctatccctcaccctgagagcacccctggtggcttggttggggaagggaggggctgcctgtctctggaggtgtcaggcaggcaggtggcaggcagctcacccacccaccccatgggatcccccagcccttcacccgcgcctgccttgtccccatgatagttgacaatcggggcttcctgcaaggcccgtctgtctgtccaggactcctggtggccagattcggcctccgaccttgaccttaaactgcagctgaccccaggggctcgccgctgcccctcccctccacaccaaggcctgagacagcaggagccccgcctggcccgaagccgtttccaccgcagcaggcagaggggctggacaggcactgtcagccaatgtggggggtcctgaagacacccccttggggcacccgagtgccccttctcagggctcagtctgaccgtagccacgtcctgcctcgcgccgcccctcgggcctgacctggaagctccgtcagctccgtccttgtccttagagctgagcccagaccccggggtctggccgaatcctcacccccagggcagtgtttttggtctgccaccttcaggaaaacggctgcggcctcggcctcccttcgggcacccaggaatgcgggggtctgctcagtccccccaccctccatgctccaacccccgggggctgcggagcctgctgccccctccccgcgggtggggacgttctatgcaatacagggttccactttagaagtgcgcgcggctagggtcaccgcccgcccttcccggcgcagcccccgagctccacagctggggcagcccctctggcttctaaatccgcggtcgggattcttcctcctgtttagttttttagtttttccttaaaaaaaaacaacacatcgatggactttgcttccctgttcttgaagaatacttgaatgtcggggggcctgggggtgggggcctcggagaccgtctgcctggccctgctgcccctcctgaatctcgtatgatggtcacagtccggtggccgtgggggtgctctgccttccctggtccccactgcccatatctgtggactgccccttccaaagacccctggggggggtggggcattccgcccacccctttcccccatcacttctcgcctgtcagtgattccatgtttcgtaacgggggattctctgcctttttgtatcaaagaacaagcaaatggacccccgcccgctgcaggcgcccatagccatcgggtctctaaagctgagtggctagcagcgtttgtttgtttgtttttttttttttttctgaaggtgggacagtcacttcctcctccctccccacccctgtcgcatccacgtgcgacctggaggactggtcagaaccgttactgtgaatgagtgaagatcctggaggaccctgggccccaggccagctcccatcgctgggggacggtgaacggccatgtgttaatgttacgatgtttttaaaagacaaaaaaaaaaaaaaaacctcaaaagtttttttaaagtgggggaaaaacatccaagcactttaattccaatgtaccaggtgaactgacggagctcagaagttttcctttacaccaactgtcaatgccggaattttgtattctgttttgtaaagatttaataaaagtc

SEQ ID NO: 151629 - DNA, 1744 bp, Homo sapiens
  Payload ID: 9847
  Gene Symbol: MKNK2
  Gene Name: MAP kinase interacting serine/threonine kinase 2
  Uniprot ID: Q9HBH9
  ENST ID: ENST00000309340
  CDS Start-End: 226-1470
ggcccaggtagaggggtccgcgctggcggcggcggcggcgctgttccccgcgcggtccgcggagcggggtccgggctgcgcgacgtggggcggcggcggcactgcggccccggcccaagcccgaccccgggtcccctcctcggccgccccccgcccggccgcccgccctcgggcctccccccgggccctcggtcccctcccccgctggcggggcccggacagaagatggtgcagaagaaaccagccgaacttcagggtttccaccgttcgttcaaggggcagaaccccttcgagctggccttctccctagaccagcccgaccacggagactctgactttggcctgcagtgctcagcccgccctgacatgcccgccagccagcccattgacatcccggacgccaagaagaggggcaagaagaagaagcgcggccgggccaccgacagcttctcgggcaggtttgaagacgtctaccagctgcaggaagatgtgctgggggagggcgctcatgcccgagtgcagacctgcatcaacctgatcaccagccaggagtacgccgtcaagatcattgagaagcagccaggccacattcggagcagggttttcagggaggtggagatgctgtaccagtgccagggacacaggaacgtcctagagctgattgagttcttcgaggaggaggaccgcttctacctggtgtttgagaagatgcggggaggctccatcctgagccacatccacaagcgccggcacttcaacgagctggaggccagcgtggtggtgcaggacgtggccagcgccttggactttctgcataacaaaggcatcgcccacagggacctaaagccggaaaacatcctctgtgagcaccccaaccaggtctcccccgtgaagatctgtgacttcgacctgggcagcggcatcaaactcaacggggactgctcccctatctccaccccggagctgctcactccgtgcggctcggcggagtacatggccccggaggtagtggaggccttcagcgaggaggctagcatctacgacaagcgctgcgacctgtggagcctgggcgtcatcttgtatatcctactcagcggctacccgcccttcgtgggccgctgtggcagcgactgcggctgggaccgcggcgaggcctgccctgcctgccagaacatgctgtttgagagcatccaggagggcaagtacgagttccccgacaaggactgggcccacatctcctgcgctgccaaagacctcatctccaagctgctggtccgtgacgccaagcagaggctgagtgccgcccaagtcctgcagcacccctgggttcaggggtgcgccccggagaacaccttgcccactcccatggtcctgcagaggtgggacagtcacttcctcctccctccccacccctgtcgcatccacgtgcgacctggaggactggtcagaaccgttactgtgaatgagtgaagatcctggaggaccctgggccccaggccagctcccatcgctgggggacggtgaacggccatgtgttaatgttacgatgtttttaaaagacaaaaaaaaaaaaaaaacctcaaaagtttttttaaagtgggggaaaaacatccaagcactttaattccaatgtaccaggtgaactgacggagctcagaagttttcctttacaccaactgtcaatgccggaattttgtattctgttttgtaaagatttaataaaagtcaaaaaacttgctgtgtg

SEQ ID NO: 151630 - DNA, 631 bp, Homo sapiens
  Payload ID: 9847
  Gene Symbol: MKNK2
  Gene Name: MAP kinase interacting serine/threonine kinase 2
  ENST ID: ENST00000591588
  CDS Start-End: 67-456
acgtaatgctgggaaaccccggctgacgcgcccctcccccgcccgcagtgcggctcggcggagtacatggccccggaggtagtggaggccttcagcgaggaggctagcatctacgacaagcgctgcgacctgtggagcctgggcgtcatcttgtatatcctactcagcggctacccgcccttcgtgggccgctgtggcagcgactgcggctgggaccgcggcgaggcctgccctgcctgccagaacatgctgtttgagagcatccaggagggcaagtacgagttccccgacaaggactgggcccacatctcctgcgctgccaaagacctcatctccaagctgctggtccgtgacgccaagcagaggctgagtgccgcccaagtcctgcagcacccctgggttcaggggtgcgccccggagaacaccttgcccactcccatggtcctgcagaggtaaggcccgcaggggtgctcgggacccctgagtccagggggcggggtttccaggttaagacatttgtgaaagacccggagaactgctttggggtcggggaggcaggcaagcctggtgactcagtgaagctcccggtggggccctggtgctcagaggagccccagggtgggggctggga

SEQ ID NO: 151631 - DNA, 2413 bp, Homo sapiens
  Payload ID: 9847
  Gene Symbol: MKNK2
  Gene Name: MAP kinase interacting serine/threonine kinase 2
  ENST ID: ENST00000588014
  CDS Start-End: 1-531
aacatcctctgtgagcaccccaaccaggtctcccccgtgaagatctgtgacttcgacctgggcagcggcatcaaactcaacggggactgctcccctatctccaccccggagctgctcactccgtgcggctcggcggagtacatggccccggaggtagtggaggccttcagcgaggaggctagcatctacgacaagcgctgcgacctgtggagcctgggcgtcatcttgtatatcctactcagcggctacccgcccttcgtgggccgctgtggcagcgactgcggctgggaccgcggcgaggcctgccctgcctgccagaacatgctgtttgagagcatccaggagggcaagtacgagttccccgacaaggactgggcccacatctcctgcgctgccaaagacctcatctccaagctgctggtccgtgacgccaagcagaggctgagtgccgcccaagtcctgcagcacccctgggttcaggggtgcgccccggagaacaccttgcccactcccatggtcctgcagaggtaaggcccgcaggggtgctcgggacccctgagtccagggggcggggtttccaggttaagacatttgtgaaagacccggagaactgctttggggtcggggaggcaggcaagcctggtgactcagtgaagctcccggtggggccctggtgctcagaggagccccagggtgggggctgggaggggggcatgaagccccttcccccagggccttcacagaccccaggggtcccctgaggggtgcctcttggtgaccacctacccccaccccgtttcccaggaacagctgtgccaaagacctcacgtccttcgcggctgaggccattgccatgaaccggcagctggcccagcacgacgaggacctggctgaggaggaggccgcggggcagggccagcccgtcctggtccgagctacctcacgctgcctgcagctgtctccaccctcccagtccaagctggcgcagcggcggcaaagggccagtctgtcctcggccccagtggtcctggtgggagaccacgcctgaccctcccatctcccctctgtacataggtcacccgtcccccaatcaaatctaaaggttttttaagctatcgccagccggtgtccagcgggctgcccctcctctgcctggattcccaggcactaagctcagctgaggggggtgttttatagaaggtttttgcttttgggttttttttttcctgtttccacccctccccgttattttttcctttggatggttaaaagcattgcaggcacccgggaaggtgagcagagggtaggtgggtgggcttgtcccctccccggtcccccgccctgctcacctctactatgaaggtgcccccaggtcacctgtgctgcccgccatctgcccacgtggcttgcagtgactcaggagagcaggcccacagcgtttgccatcttgcagagctggggaggggcacaggaccctgccctcgtgttccctcccagcccgcagtatttcagggacaggctcttcccctctatccctcaccctgagagcacccctggtggcttggttggggaagggaggggctgcctgtctctggaggtgtcaggcaggcaggtggcaggcagctcacccacccaccccatgggatcccccagcccttcacccgcgcctgccttgtccccatgatagttgacaatcggggcttcctgcaaggcccgtctgtctgtccaggactcctggtggccagattcggcctccgaccttgaccttaaactgcagctgaccccaggggctcgccgctgcccctcccctccacaccaaggcctgagacagcaggagccccgcctggcccgaagccgtttccaccgcagcaggcagaggggctggacaggcactgtcagccaatgtggggggtcctgaagacacccccttggggcacccgagtgccccttctcagggctcagtctgaccgtagccacgtcctgcctcgcgccgcccctcgggcctgacctggaagctccgtcagctccgtccttgtccttagagctgagcccagaccccggggtctggccgaatcctcacccccagggcagtgtttttggtctgccaccttcaggaaaacggctgcggcctcggcctcccttcgggcacccaggaatgcgggggtctgctcagtccccccaccctccatgctccaacccccgggggctgcggagcctgctgccccctccccgcgggtggggacgttctatgcaatacagggttccactttagaagtgcgcgcggctagggtcaccgcccgcccttcccggcgcagcccccgagctccacagctggggcagcccctctggcttctaaatccgcggtcgggattcttcctcctgtttagttttttagtttttccttaaaaaaaaa

SEQ ID NO: 151632 - DNA, 1503 bp, Homo sapiens
  Payload ID: 9847
  Gene Symbol: MKNK2
  Gene Name: MAP kinase interacting serine/threonine kinase 2
  ENST ID: ENST00000586828
  CDS Start-End: 3-251
agatggtgcagaagaaaccagccgaacttcagggtttccaccgttcgttcaaggggcagaaccccttcgagctggccttctccctagaccagcccgaccacggagactctgactttggcctgcagtgctcagcccgccctgacatgcccgccagccagcccattgacatcccggacgccaagaagaggggcaagaagaagaagcgcggccgggccaccgacagcttctcgggcaggtttgaagatcattgagaagcagccaggccacattcggagcagggttttcagggaggtggagatgctgtaccagtgccagggacacaggaacgtcctagagctgattgagttcttcgaggaggaggaccgcttctacctggtgtttgagaagatgcggggaggctccatcctgagccacatccacaagcgccggcacttcaacgagctggaggccagcgtggtggtgcaggacgtggccagcgccttggactttctgcataacaaaggcatcgcccacagggacctaaagccggaaaacatcctctgtgagcaccccaaccaggtctcccccgtgaagatctgtgacttcgacctgggcagcggcatcaaactcaacggggactgctcccctatctccaccccggagctgctcactccgtgcggctcggcggagtacatggccccggaggtagtggaggccttcagcgaggaggctagcatctacgacaagcgctgcgacctgtggagcctgggcgtcatcttgtatatcctactcagcggctacccgcccttcgtgggccgctgtggcagcgactgcggctgggaccgcggcgaggcctgccctgcctgccagaacatgctgtttgagagcatccaggagggcaagtacgagttccccgacaaggactgggcccacatctcctgcgctgccaaagacctcatctccaagctgctggtccgtgacgccaagcagaggctgagtgccgcccaagtcctgcagcacccctgggttcaggggtgcgccccggagaacaccttgcccactcccatggtcctgcagaggaacagctgtgccaaagacctcacgtccttcgcggctgaggccattgccatgaaccggcagctggcccagcacgacgaggacctggctgaggaggaggccgcggggcagggccagcccgtcctggtccgagctacctcacgctgcctgcagctgtctccaccctcccagtccaagctggcgcagcggcggcaaagggccagtctgtcctcggccccagtggtcctggtgggagaccacgcctgaccctcccatctcccctctgtacataggtcacccgtcccccaatcaaatctaaaggttttttaagctatcgccagccggtgtccagcgggctgcccctcctctgcctggattcccaggcactaagctcagctgaggggggtgttttatagaaggtttttgcttttgggttttttttttcctgtttccacccctccccgttat

SEQ ID NO: 151633 - DNA, 875 bp, Homo sapiens
  Payload ID: 9847
  Gene Symbol: MKNK2
  Gene Name: MAP kinase interacting serine/threonine kinase 2
  ENST ID: ENST00000591142
  CDS Start-End: 125-601
ggggcggggtccgagccggctggcgcaggtgacccgcagttacccgggctcggttcccacgtaatgctgggaaaccccggctgacgcgcccctcccccgcccgcagtgcggctcggcggagtacatggccccggaggtagtggaggccttcagcgaggaggctagcatctacgacaagcgctgcgacctgtggagcctgggcgtcatcttgtatatcctactcagcggctacccgcccttcgtgggccgctgtggcagcgactgcggctgggaccgcggcgaggcctgccctgcctgccagaacatgctgtttgagagcatccaggagggcaagtacgagttccccgacaaggactgggcccacatctcctgcgctgccaaagacctcatctccaagctgctggtccgtgacgccaagcagaggctgagtgccgcccaagtcctgcagcacccctgggttcaggggtgcgccccggagaacaccttgcccactcccatggtcctgcagaggtgggacagtcacttcctcctccctccccacccctgtcgcatccacgtgcgacctggaggactggtcagaaccgttactgtgaatgagtgaagatcctggaggaccctgggccccaggccagctcccatcgctgggggacggtgaacggccatgtgttaatgttacgatgtttttaaaagacaaaaaaaaaaaaaaaacctcaaaagtttttttaaagtgggggaaaaacatccaagcactttaattccaatgtaccaggtgaactgacggagctcagaagttttcctttacaccaactgtcaatgccggaattttgtattctgttttgtaaagatttaataaaagtcaaaaaacttgctgtgtg

SEQ ID NO: 151634 - DNA, 454 bp, Homo sapiens
  Payload ID: 9847
  Gene Symbol: MKNK2
  Gene Name: MAP kinase interacting serine/threonine kinase 2
  ENST ID: ENST00000589534
  CDS Start-End: 234-454
gcggcggtggcccaggtagaggggtccgcgctggcggcggcggcggcgctgttccccgcgcggtccgcggagcggggtccgggctgcgcgacgtggggcggcggcggcactgcggccccggcccaagcccgaccccgggtcccctcctcggccgccccccgcccggccgcccgccctcgggcctccccccgggccctcggtcccctcccccgctggcggggcccggacagaagatggtgcagaagaaaccagccgaacttcagggtttccaccgttcgttcaaggggcagaaccccttcgagctggccttctccctagaccagcccgaccacggagactctgactttggcctgcagtgctcagcccgccctggtgaggggcccgagggggaggagggcacagggcagctgctgtcgctgccatggcagtggccagcccctgcaggggggtgggg

SEQ ID NO: 151635 - DNA, 352 bp, Homo sapiens
  Payload ID: 9847
  Gene Symbol: MKNK2
  Gene Name: MAP kinase interacting serine/threonine kinase 2
  ENST ID: ENST00000589509
  CDS Start-End: 124-352
cggctcctctcagcggcggtggcccagggtcccctcctcggccgccccccgcccggccgcccgccctcgggcctccccccgggccctcggtcccctcccccgctggcggggcccggacagaagatggtgcagaagaaaccagccgaacttcagggtttccaccgttcgttcaaggggcagaaccccttcgagctggccttctccctagaccagcccgaccacggagactctgactttggcctgcagtgctcagcccgccctggtgaggggcccgagggggaggagggcacagggcagctgctgtcgctgccatggcagtggccagcccctgcaggggggtggggacatgccc

SEQ ID NO: 151636 - DNA, 803 bp, Homo sapiens
  Payload ID: 9847
  Gene Symbol: MKNK2
  Gene Name: MAP kinase interacting serine/threonine kinase 2
  ENST ID: ENST00000589441
  CDS Start-End: 1-130
cagaacatgctgtttgagagcatccaggagggcaagtacgagttccccgacaaggactgggcccacatctcctgcgctgccaaagacctcatctccaagctgctggtccgtgacgccaagcagaggctgagtgccgcccaagtcctgcagcacccctgggttcaggggtgcgccccggagaacaccttgcccactcccatggtcctgcagaggaacagctgtgccaaagacctcacgtccttcgcggctgaggccattgccatgaaccggcagctggcccagcacgacgaggacctggctgaggaggaggccgcggggcagggccagcccgtcctggtccgagctacctcacgctgcctgcagctgtctccaccctcccagtccaagctggcgcagcggcggcaaagggccagtctgtcctcggccccagtggtcctggtgggacagtcacttcctcctccctccccacccctgtcgcatccacgtgcgacctggaggactggtcagaaccgttactgtgaatgagtgaagatcctggaggaccctgggccccaggccagctcccatcgctgggggacggtgaacggccatgtgttaatgttacgatgtttttaaaagacaaaaaaaaaaaaaaaacctcaaaagtttttttaaagtgggggaaaaacatccaagcactttaattccaatgtaccaggtgaactgacggagctcagaagttttcctttacaccaactgtcaatgccggaattttgtattctgttttgtaaagatttaataaaagtcaaaaaacttgctgtgtg

SEQ ID NO: 151637 - DNA, 3582 bp, Homo sapiens
  Payload ID: 9847
  Gene Symbol: MKNK2
  Gene Name: MAP kinase interacting serine/threonine kinase 2
  Uniprot ID: Q9HBH9
  ENST ID: ENST00000591601
  CDS Start-End: 37-1434
cggtcccctcccccgctggcggggcccggacagaagatggtgcagaagaaaccagccgaacttcagggtttccaccgttcgttcaaggggcagaaccccttcgagctggccttctccctagaccagcccgaccacggagactctgactttggcctgcagtgctcagcccgccctgacatgcccgccagccagcccattgacatcccggacgccaagaagaggggcaagaagaagaagcgcggccgggccaccgacagcttctcgggcaggtttgaagacgtctaccagctgcaggaagatgtgctgggggagggcgctcatgcccgagtgcagacctgcatcaacctgatcaccagccaggagtacgccgtcaagatcattgagaagcagccaggccacattcggagcagggttttcagggaggtggagatgctgtaccagtgccagggacacaggaacgtcctagagctgattgagttcttcgaggaggaggaccgcttctacctggtgtttgagaagatgcggggaggctccatcctgagccacatccacaagcgccggcacttcaacgagctggaggccagcgtggtggtgcaggacgtggccagcgccttggactttctgcataacaaaggcatcgcccacagggacctaaagccggaaaacatcctctgtgagcaccccaaccaggtctcccccgtgaagatctgtgacttcgacctgggcagcggcatcaaactcaacggggactgctcccctatctccaccccggagctgctcactccgtgcggctcggcggagtacatggccccggaggtagtggaggccttcagcgaggaggctagcatctacgacaagcgctgcgacctgtggagcctgggcgtcatcttgtatatcctactcagcggctacccgcccttcgtgggccgctgtggcagcgactgcggctgggaccgcggcgaggcctgccctgcctgccagaacatgctgtttgagagcatccaggagggcaagtacgagttccccgacaaggactgggcccacatctcctgcgctgccaaagacctcatctccaagctgctggtccgtgacgccaagcagaggctgagtgccgcccaagtcctgcagcacccctgggttcaggggtgcgccccggagaacaccttgcccactcccatggtcctgcagaggaacagctgtgccaaagacctcacgtccttcgcggctgaggccattgccatgaaccggcagctggcccagcacgacgaggacctggctgaggaggaggccgcggggcagggccagcccgtcctggtccgagctacctcacgctgcctgcagctgtctccaccctcccagtccaagctggcgcagcggcggcaaagggccagtctgtcctcggccccagtggtcctggtgggagaccacgcctgaccctcccatctcccctctgtacataggtcacccgtcccccaatcaaatctaaaggttttttaagctatcgccagccggtgtccagcgggctgcccctcctctgcctggattcccaggcactaagctcagctgaggggggtgttttatagaaggtttttgcttttgggttttttttttcctgtttccacccctccccgttattttttcctttggatggttaaaagcattgcaggcacccgggaaggtgagcagagggtaggtgggtgggcttgtcccctccccggtcccccgccctgctcacctctactatgaaggtgcccccaggtcacctgtgctgcccgccatctgcccacgtggcttgcagtgactcaggagagcaggcccacagcgtttgccatcttgcagagctggggaggggcacaggaccctgccctcgtgttccctcccagcccgcagtatttcagggacaggctcttcccctctatccctcaccctgagagcacccctggtggcttggttggggaagggaggggctgcctgtctctggaggtgtcaggcaggcaggtggcaggcagctcacccacccaccccatgggatcccccagcccttcacccgcgcctgccttgtccccatgatagttgacaatcggggcttcctgcaaggcccgtctgtctgtccaggactcctggtggccagattcggcctccgaccttgaccttaaactgcagctgaccccaggggctcgccgctgcccctcccctccacaccaaggcctgagacagcaggagccccgcctggcccgaagccgtttccaccgcagcaggcagaggggctggacaggcactgtcagccaatgtggggggtcctgaagacacccccttggggcacccgagtgccccttctcagggctcagtctgaccgtagccacgtcctgcctcgcgccgcccctcgggcctgacctggaagctccgtcagctccgtccttgtccttagagctgagcccagaccccggggtctggccgaatcctcacccccagggcagtgtttttggtctgccaccttcaggaaaacggctgcggcctcggcctcccttcgggcacccaggaatgcgggggtctgctcagtccccccaccctccatgctccaacccccgggggctgcggagcctgctgccccctccccgcgggtggggacgttctatgcaatacagggttccactttagaagtgcgcgcggctagggtcaccgcccgcccttcccggcgcagcccccgagctccacagctggggcagcccctctggcttctaaatccgcggtcgggattcttcctcctgtttagttttttagtttttccttaaaaaaaaacaacacatcgatggactttgcttccctgttcttgaagaatacttgaatgtcggggggcctgggggtgggggcctcggagaccgtctgcctggccctgctgcccctcctgaatctcgtatgatggtcacagtccggtggccgtgggggtgctctgccttccctggtccccactgcccatatctgtggactgccccttccaaagacccctggggggggtggggcattccgcccacccctttcccccatcacttctcgcctgtcagtgattccatgtttcgtaacgggggattctctgcctttttgtatcaaagaacaagcaaatggacccccgcccgctgcaggcgcccatagccatcgggtctctaaagctgagtggctagcagcgtttgtttgtttgtttttttttttttttctgaaggtgggacagtcacttcctcctccctccccacccctgtcgcatccacgtgcgacctggaggactggtcagaaccgttactgtgaatgagtgaagatcctggaggaccctgggccccaggccagctcccatcgctgggggacggtgaacggccatgtgttaatgttacgatgtttttaaaagacaaaaaaaaaaaaaaaacctcaaaagtttttttaaagtgggggaaaaacatccaagcactttaattccaatgtaccaggtgaactgacggagctcagaagttttcctttacaccaactgtcaatgccggaattttgtattctgttttgtaaagatttaataaaagtcaaaaaacttgctgtgtg

SEQ ID NO: 151638 - DNA, 2946 bp, Homo sapiens
  Payload ID: 9848
  Gene Symbol: MARK1
  Gene Name: MAP/microtubule affinity-regulating kinase 1
  Uniprot ID: Q9P0L2
  ENST ID: ENST00000366917
  CDS Start-End: 267-2654
cgggcaaccgcctcgcccgaagccctccctcgttactgtccgcataccccggcggcgccgccgcgggaagcggctccccctcctcttcctccgcgtcctcttccctctttcccccgccggggccgcttgttgcaccgccccgcggcctgcgggagccgctcgccccggccttgtgctcgcgtccgcacccctttcctgtcgccccccggggcccgcaccacagcccggccggcgagaccccggccagaccccgctgcccgcacaaaatgtcggcccggacgccattgccgacggtgaacgagcgggacacggaaaatcatacatctgtggatggatatactgaaccacacatccagcctaccaagtcgagtagcagacagaacatcccccggtgtagaaactccattacgtcagcaacagatgaacagcctcacattggaaattaccgtttacaaaaaacaatagggaagggaaattttgccaaagtcaaattggcaagacacgttctaactggtagagaggttgctgtgaaaataatagacaaaactcagctaaatcctaccagtctacaaaagttatttcgagaagtacgaataatgaagatactgaatcatcctaatatagtaaaattgtttgaagttattgaaacagagaagactctctatttagtcatggaatacgcgagtgggggtgaagtatttgattacttagttgcccatggaagaatgaaagagaaagaggcccgtgcaaaatttaggcagattgtatctgctgtacagtattgtcatcaaaagtacattgttcaccgtgatcttaaggctgaaaaccttctccttgatggtgatatgaatattaaaattgctgactttggttttagtaatgaatttacagttgggaacaaattggacacattttgtggaagcccaccctatgctgctcccgagcttttccaaggaaagaagtatgatgggcctgaagtggatgtgtggagtctgggcgtcattctctatacattagtcagtggctccttgcctttcgatggccagaatttaaaggaactgcgagagcgagttttacgagggaagtaccgtattcccttctatatgtccacagactgtgaaaatcttctgaagaaattattagtcctgaatccaataaagagaggcagcttggaacaaataatgaaagatcgatggatgaatgttggtcatgaagaggaagaactaaagccatatactgagcctgatccggatttcaatgacacaaaaagaatagacattatggtcaccatgggctttgcacgagatgaaataaatgatgccttaataaatcagaagtatgatgaagttatggctacttatattcttctaggtagaaaaccacctgaatttgaaggtggtgaatcgttatccagtggaaacttgtgtcagaggtcccggcccagtagtgacttaaacaacagcactcttcagtcccctgctcacctgaaggtccagagaagtatctcagcaaatcagaagcagcggcgtttcagtgatcatgctggtccatccattcctcctgctgtatcatataccaaaagacctcaggctaacagtgtggaaagtgaacagaaagaggagtgggacaaagatgtggctcgaaaacttggcagcacaacagttggatcaaaaagcgagatgactgcaagccctcttgtagggccagagaggaaaaaatcttcaactattccaagtaacaatgtgtattctggaggtagcatggcaagaaggaatacatatgtctgtgaaaggaccacagatcgatacgtagcattgcagaatggaaaagacagcagccttacggagatgtctgtgagtagcatatcttctgcaggctcttctgtggcctctgctgtcccctcagcacgaccccgccaccagaagtccatgtccacttctggtcatcctattaaagtcacactgccaaccattaaagacggctctgaagcttaccggcctggtacaacccagagagtgcctgctgcttccccatctgctcacagtattagtactgcgactccagaccggacccgttttccccgagggagctcaagccgaagcactttccatggtgaacagctccgggagcgacgcagcgttgcttataatgggccacctgcttcaccatcccatgaaacgggtgcatttgcacatgccagaaggggaacgtcaactggtataataagcaaaatcacatccaaatttgttcgcagggatccaagtgaaggcgaagccagtggcagaaccgacacctcaagaagtacatcaggggaaccaaaagaaagagacaaggaagagggtaaagattctaagccgcgttctttgcggttcacatggagtatgaagaccactagttcaatggaccctaatgacatgatgagagaaatccgaaaagtgttagatgcaaataactgtgattatgagcaaaaagagagatttttgcttttctgtgtccatggagacgctagacaggatagcctcgtgcagtgggagatggaagtctgcaagttgccacgactgtcacttaatggggttcgcttcaagcgaatatctgggacatctattgcctttaagaacattgcatcaaaaatagcaaatgagcttaagctgtaaagaagtccaaatttacaggttcagggaagatacatacatatatgaggtacagtttttgaatgtactggtaatgcctaatgtggtctgcctgtgaatctccccatgtagaatttgcccttaatgcaataaggttatacatagttatgaactgtaaaattaaagtcagtatgaactataataaatatctgtagcttaaaaagtaggttcacatgtacaggtaagtatattgtgtatttctgttcattttctgttcatagagttgtataataaaacatgattgcttaaaaacttg

SEQ ID NO: 151639 - DNA, 5169 bp, Homo sapiens
  Payload ID: 9848
  Gene Symbol: MARK1
  Gene Name: MAP/microtubule affinity-regulating kinase 1
  Uniprot ID: Q9P0L2
  ENST ID: ENST00000366918
  CDS Start-End: 598-2874
ggcgcggcggcggcggtggctgtgaccgcgcggaccgagccgagacattcgcgccgggggatcgggcgccgccgccgctgggccccgggcgcgtggatgcggctgggtcgggcggcgccgtacacctgaggcggagaacggggcgcggcgcgggtgacgctgtcagggccgcggttcctgacgcccaggcgctcgccaggacgagccaggcagtgatttgaggcaccggcttcaccttcacccatggtccggagagcctagcggggctcgccaccgcctcccggctccccttccacgcctcatcctgccagcctcgccgccccgccagcgccgggcaaccgcctcgcccgaagccctccctcgttactgtccgcataccccggcggcgccgccgcgggaagcggctccccctcctcttcctccgcgtcctcttccctctttcccccgccggggccgcttgttgcaccgccccgcggcctgcgggagccgctcgccccggccttgtgctcgcgtccgcacccctttcctgtcgccccccggggcccgcaccacagcccggccggcgagaccccggccagaccccgctgcccgcacaaaatgtcggcccggacgccattgccgacggtgaacgagcgggacacggaaaatcatacatctgtggatggatatactgaaccacacatccagcctaccaagtcgagtagcagacagaacatcccccggtgtagaaactccattacgtcagcaacagatgaacagcctcacattggaaattaccgtttacaaaaaacaatagggaagggaaattttgccaaagtcaaattggcaagacacgttctaactggtagagaggttgctgtgaaaataatagacaaaactcagctaaatcctaccagtctacaaaagttatttcgagaagtacgaataatgaagatactgaatcatcctaatataggtgaagtatttgattacttagttgcccatggaagaatgaaagagaaagaggcccgtgcaaaatttaggcagattgtatctgctgtacagtattgtcatcaaaagtacattgttcaccgtgatcttaaggctgaaaaccttctccttgatggtgatatgaatattaaaattgctgactttggttttagtaatgaatttacagttgggaacaaattggacacattttgtggaagcccaccctatgctgctcccgagcttttccaaggaaagaagtatgatgggcctgaagtggatgtgtggagtctgggcgtcattctctatacattagtcagtggctccttgcctttcgatggccagaatttaaaggaactgcgagagcgagttttacgagggaagtaccgtattcccttctatatgtccacagactgtgaaaatcttctgaagaaattattagtcctgaatccaataaagagaggcagcttggaacaaataatgaaagatcgatggatgaatgttggtcatgaagaggaagaactaaagccatatactgagcctgatccggatttcaatgacacaaaaagaatagacattatggtcaccatgggctttgcacgagatgaaataaatgatgccttaataaatcagaagtatgatgaagttatggctacttatattcttctaggtagaaaaccacctgaatttgaaggtggtgaatcgttatccagtggaaacttgtgtcagaggtcccggcccagtagtgacttaaacaacagcactcttcagtcccctgctcacctgaaggtccagagaagtatctcagcaaatcagaagcagcggcgtttcagtgatcatgctggtccatccattcctcctgctgtatcatataccaaaagacctcaggctaacagtgtggaaagtgaacagaaagaggagtgggacaaagatgtggctcgaaaacttggcagcacaacagttggatcaaaaagcgagatgactgcaagccctcttgtagggccagagaggaaaaaatcttcaactattccaagtaacaatgtgtattctggaggtagcatggcaagaaggaatacatatgtctgtgaaaggaccacagatcgatacgtagcattgcagaatggaaaagacagcagccttacggagatgtctgtgagtagcatatcttctgcaggctcttctgtggcctctgctgtcccctcagcacgaccccgccaccagaagtccatgtccacttctggtcatcctattaaagtcacactgccaaccattaaagacggctctgaagcttaccggcctggtacaacccagagagtgcctgctgcttccccatctgctcacagtattagtactgcgactccagaccggacccgttttccccgagggagctcaagccgaagcactttccatggtgaacagctccgggagcgacgcagcgttgcttataatgggccacctgcttcaccatcccatgaaacgggtgcatttgcacatgccagaaggggaacgtcaactggtataataagcaaaatcacatccaaatttgttcgcagaagtacatcaggggaaccaaaagaaagagacaaggaagagggtaaagattctaagccgcgttctttgcggttcacatggagtatgaagaccactagttcaatggaccctaatgacatgatgagagaaatccgaaaagtgttagatgcaaataactgtgattatgagcaaaaagagagatttttgcttttctgtgtccatggagacgctagacaggatagcctcgtgcagtgggagatggaagtctgcaagttgccacgactgtcacttaatggggttcgcttcaagcgaatatctgggacatctattgcctttaagaacattgcatcaaaaatagcaaatgagcttaagctgtaaagaagtccaaatttacaggttcagggaagatacatacatatatgaggtacagtttttgaatgtactggtaatgcctaatgtggtctgcctgtgaatctccccatgtagaatttgcccttaatgcaataaggttatacatagttatgaactgtaaaattaaagtcagtatgaactataataaatatctgtagcttaaaaagtaggttcacatgtacaggtaagtatattgtgtatttctgttcattttctgttcatagagttgtataataaaacatgattgcttaaaaacttgtatagttgtctagatttctgcacctgaatgtatgtttgatgctttgatttgaaaatgttcttccctgttatttacattctggtgggtttttaaaattcttacctccatcatgcaattttgaaaattgtgtccagaattaaaagtgcatagaaatagcctttacaattgtagcatggacctttaaaaattgttttaaaatcttatttaaatttaaaccagaagctgaaaaatagatcagctttattatacacaaaattattactgcttatctttgctcttttccttgttatcccgcaaggtttagttgagaagatacaaaatgtttacagtgttggcacttagagtttttaaattcaagtacatgaaattcagtaatagcattgccttgagctaactaggaagtaccgggaaaaaagttaaatctacatcaagtttcttttgaactttgaagtgttttctgacccactgctaactgtagcaacaaaatttaaaagaaaaaaaacatactttatctggctattataacataaactgtcacgtaggtttgctgccttcagaataccgcaatttaattgcgggaatataataatattgggactgtttcacagcacaaactcatctttacagtgttgatcaatgcatcagttaagaaataatgccacctcaggaattaactggcattgggaacatttgcctcattctcctgctatcctcttcattcacccctgccactgtaatatctataagtacttaagagacttgtgagcaaaacatactatttataacagtatatgattgatttatgcttatgtggttgttcagtttgttcccatgtaactcgtttgttttaaatattttgccagatttcttgtatttattccacatcattatgcctataatgtgccgctttgtgattgggcatttgcctacttttctttcataattagtgatatatgcgatgtaaaaccactagtaaaggtacattttaatacttgttattttatactgaattagccttggaggttgactgtgcaatgttatttactgttgtaattactgtaataccaacatatgggccccatctgcacactcctgaaaaacagaaagtgtattcaaattttatcagtttaaagaaaataaagctgtgataaatactgtaattccaacctacattagaaggtctaagtgtaggtgatgtgccattccataatggcttccagactagggtgaattttatgttctgtactgtactgtgatgtagctttcttctgtaacagttatgttttaaaattaagtgagttttttttttgccttagcaaagggtggtgtttgaaaaaaaaaatgtgtagcccctttttaacctagtgttcattcaaaaaaaaattgatgcaaatctttattcactttcactggtgcacactgaaattttacttgaacagttctcataataaagcacttgtcttttgctctttatcagaatgtgaattacctgttttctggtacaaaagtattctgtatgaggagtttattgtatgtgttctaaatttagttggcaaagggtgaagctgtgaaggttttcaagattattgaaactatgaaggtttcttgtcattatgacaagaaagtttaatctttttataggaattcctgtcactgaaatacgtttttaaaaaaatagactcatgtgttttccacggtagaaactgatatttttttacattttctcactgtggccaactcttctgtgtttgtagaaaggaatttgacttcaatatcttttatgaactaaaaatgaaatcttgatactcactttagatttttcattttatgtgttcatgacaacataaatatttttcaaagatttagaggaattttgcaatgtgtttgcataaataaataccagtttatgttcaccggctatgtgataccaggatttccttggcttctgttgaaatattatttgatatgacatcccttatattaaattaattattttgtagaaa

SEQ ID NO: 151640 - DNA, 5273 bp, Homo sapiens
  Payload ID: 9848
  Gene Symbol: MARK1
  Gene Name: MAP/microtubule affinity-regulating kinase 1
  ENST ID: ENST00000402574
  CDS Start-End: 641-2983
gctgctccgcgcgcagccggctcgggccgctcctcctgactgaggcgcggcggcggcggtggctgtgaccgcgcggaccgagccgagacattcgcgccgggggatcgggcgccgccgccgctgggccccgggcgcgtggatgcggctgggtcgggcggcgccgtacacctgaggcggagaacggggcgcggcgcgggtgacgctgtcagggccgcggttcctgacgcccaggcgctcgccaggacgagccaggcagtgatttgaggcaccggcttcaccttcacccatggtccggagagcctagcggggctcgccaccgcctcccggctccccttccacgcctcatcctgccagcctcgccgccccgccagcgccgggcaaccgcctcgcccgaagccctccctcgttactgtccgcataccccggcggcgccgccgcgggaagcggctccccctcctcttcctccgcgtcctcttccctctttcccccgccggggccgcttgttgcaccgccccgcggcctgcgggagccgctcgccccggccttgtgctcgcgtccgcacccctttcctgtcgccccccggggcccgcaccacagcccggccggcgagaccccggccagaccccgctgcccgcacaaaatgtcggcccggacgccattgccgacggtgaacgagcgggacacggaaaatcatacatctgtggatggatatactgaaccacacatccagcctaccaagtcgagtagcagacagaacatcccccggtgtagaaactccattacgtcagcaacagatgaacagcctcacattggaaattaccgtttacaaaaaacaatagggaagggaaattttgccaaagtcaaattggcaagacacgttctaactggtagagaggttgctgtgaaaataatagacaaaactcagctaaatcctaccagtctacaaaagttatttcgagaagtacgaataatgaagatactgaatcatcctaatatagtaaaattgtttgaagttattgaaacagagaagactctctatttagtcatggaatacgcgagtgggggtgaagtatttgattacttagttgcccatggaagaatgaaagagaaagaggcccgtgcaaaatttaggcagattgtatctgctgtacagtattgtcatcaaaagtacattgttcaccgtgatcttaaggctgaaaaccttctccttgatggtgatatgaatattaaaattgctgactttggttttagtaatgaatttacagttgggaacaaattggacacattttgtggaagcccaccctatgctgctcccgagcttttccaaggaaagaagtatgatgggcctgaagtggatgtgtggagtctgggcgtcattctctatacattagtcagtggctccttgcctttcgatggccagaatttaaaggaactgcgagagcgagttttacgagggaagtaccgtattcccttctatatgtccacagactgtgaaaatcttctgaagaaattattagtcctgaatccaataaagagaggcagcttggaacaaataatgaaagatcgatggatgaatgttggtcatgaagaggaagaactaaagccatatactgagcctgatccggatttcaatgacacaaaaagaatagacattatggtcaccatgggctttgcacgagatgaaataaatgatgccttaataaatcagaagtatgatgaagttatggctacttatattcttctaggtagaaaaccacctgaatttgaaggtggtgaatcgttatccagtggaaacttgtgtcagaggtcccggcccagtagtgacttaaacaacagcactcttcagtcccctgctcacctgaaggtccagagaagtatctcagcaaatcagaagcagcggcgtttcagtgatcatgctggtccatccattcctcctgctgtatcatataccaaaagacctcaggctaacagtgtggaaagtgaacagaaagaggagtgggacaaagatgtggctcgaaaacttggcagcacaacagttggatcaaaaagcgagatgactgcaagccctcttgtagggccagagaggaaaaaatcttcaactattccaagtaacaatgtgtattctggaggtagcatggcaagaaggaatacatatgtctgtgaaaggaccacagatcgatacgtagcattgcagaatggaaaagacagcagccttacggagatgtctgtgagtagcatatcttctgcaggctcttctgtggcctctgctgtcccctcagcacgaccccgccaccagaagtccatgtccacttctggtcatcctattaaagtcacactgccaaccattaaagacggctctgaagcttaccggcctggtacaacccagagagtgcctgctgcttccccatctgctcacagtattagtactgcgactccagaccggacccgttttccccgagggagctcaagccgaagcactttccatggtgaacagctccgggagcgacgcagcgttgcttataatgggccacctgcttcaccatcccatgaaacgggtgcatttgcacatgccagaaggggaacgtcaactggtataataagcaaaatcacatccaaatttgttcgcagaagtacatcaggggaaccaaaagaaagagacaaggaagagggtaaagattctaagccgcgttctttgcggttcacatggagtatgaagaccactagttcaatggaccctaatgacatgatgagagaaatccgaaaagtgttagatgcaaataactgtgattatgagcaaaaagagagatttttgcttttctgtgtccatggagacgctagacaggatagcctcgtgcagtgggagatggaagtctgcaagttgccacgactgtcacttaatggggttcgcttcaagcgaatatctgggacatctattgcctttaagaacattgcatcaaaaatagcaaatgagcttaagctgtaaagaagtccaaatttacaggttcagggaagatacatacatatatgaggtacagtttttgaatgtactggtaatgcctaatgtggtctgcctgtgaatctccccatgtagaatttgcccttaatgcaataaggttatacatagttatgaactgtaaaattaaagtcagtatgaactataataaatatctgtagcttaaaaagtaggttcacatgtacaggtaagtatattgtgtatttctgttcattttctgttcatagagttgtataataaaacatgattgcttaaaaacttgtatagttgtctagatttctgcacctgaatgtatgtttgatgctttgatttgaaaatgttcttccctgttatttacattctggtgggtttttaaaattcttacctccatcatgcaattttgaaaattgtgtccagaattaaaagtgcatagaaatagcctttacaattgtagcatggacctttaaaaattgttttaaaatcttatttaaatttaaaccagaagctgaaaaatagatcagctttattatacacaaaattattactgcttatctttgctcttttccttgttatcccgcaaggtttagttgagaagatacaaaatgtttacagtgttggcacttagagtttttaaattcaagtacatgaaattcagtaatagcattgccttgagctaactaggaagtaccgggaaaaaagttaaatctacatcaagtttcttttgaactttgaagtgttttctgacccactgctaactgtagcaacaaaatttaaaagaaaaaaaacatactttatctggctattataacataaactgtcacgtaggtttgctgccttcagaataccgcaatttaattgcgggaatataataatattgggactgtttcacagcacaaactcatctttacagtgttgatcaatgcatcagttaagaaataatgccacctcaggaattaactggcattgggaacatttgcctcattctcctgctatcctcttcattcacccctgccactgtaatatctataagtacttaagagacttgtgagcaaaacatactatttataacagtatatgattgatttatgcttatgtggttgttcagtttgttcccatgtaactcgtttgttttaaatattttgccagatttcttgtatttattccacatcattatgcctataatgtgccgctttgtgattgggcatttgcctacttttctttcataattagtgatatatgcgatgtaaaaccactagtaaaggtacattttaatacttgttattttatactgaattagccttggaggttgactgtgcaatgttatttactgttgtaattactgtaataccaacatatgggccccatctgcacactcctgaaaaacagaaagtgtattcaaattttatcagtttaaagaaaataaagctgtgataaatactgtaattccaacctacattagaaggtctaagtgtaggtgatgtgccattccataatggcttccagactagggtgaattttatgttctgtactgtactgtgatgtagctttcttctgtaacagttatgttttaaaattaagtgagttttttttttgccttagcaaagggtggtgtttgaaaaaaaaaatgtgtagcccctttttaacctagtgttcattcaaaaaaaaattgatgcaaatctttattcactttcactggtgcacactgaaattttacttgaacagttctcataataaagcacttgtcttttgctctttatcagaatgtgaattacctgttttctggtacaaaagtattctgtatgaggagtttattgtatgtgttctaaatttagttggcaaagggtgaagctgtgaaggttttcaagattattgaaactatgaaggtttcttgtcattatgacaagaaagtttaatctttttataggaattcctgtcactgaaatacgtttttaaaaaaatagactcatgtgttttccacggtagaaactgatatttttttacattttctcactgtggccaactcttctgtgtttgtagaaaggaatttgacttcaatatcttttatgaactaaaaatgaaatcttgatactcactttagatttttcattttatgtgttcatgacaacataaatatttttcaaagatttagaggaattttgcaatgtgtttgcataaataaataccagtttatgttcaccggctatgtgataccaggatttccttggcttctgttgaaatattatttgatatgacatcccttatattaaattaattattttgt

SEQ ID NO: 151641 - DNA, 5321 bp, Homo sapiens
  Payload ID: 9848
  Gene Symbol: MARK1
  Gene Name: MAP/microtubule affinity-regulating kinase 1
  ENST ID: ENST00000611084
  CDS Start-End: 641-3031
gctgctccgcgcgcagccggctcgggccgctcctcctgactgaggcgcggcggcggcggtggctgtgaccgcgcggaccgagccgagacattcgcgccgggggatcgggcgccgccgccgctgggccccgggcgcgtggatgcggctgggtcgggcggcgccgtacacctgaggcggagaacggggcgcggcgcgggtgacgctgtcagggccgcggttcctgacgcccaggcgctcgccaggacgagccaggcagtgatttgaggcaccggcttcaccttcacccatggtccggagagcctagcggggctcgccaccgcctcccggctccccttccacgcctcatcctgccagcctcgccgccccgccagcgccgggcaaccgcctcgcccgaagccctccctcgttactgtccgcataccccggcggcgccgccgcgggaagcggctccccctcctcttcctccgcgtcctcttccctctttcccccgccggggccgcttgttgcaccgccccgcggcctgcgggagccgctcgccccggccttgtgctcgcgtccgcacccctttcctgtcgccccccggggcccgcaccacagcccggccggcgagaccccggccagaccccgctgcccgcacaaaatgtcggcccggacgccattgccgacggtgaacgagcgggacacggaaaatcatacatctgtggatggatatactgaaccacacatccagcctaccaagtcgagtagcagacagaacatcccccggtgtagaaactccattacgtcagcaacagatgaacagcctcacattggaaattaccgtttacaaaaaacaatagggaagggaaattttgccaaagtcaaattggcaagacacgttctaactggtagagaggttgctgtgaaaataatagacaaaactcagctaaatcctaccagtctacaaaagttatttcgagaagtacgaataatgaagatactgaatcatcctaatatagtaaaattgtttgaagttattgaaacagagaagactctctatttagtcatggaatacgcgagtgggggtgaagtatttgattacttagttgcccatggaagaatgaaagagaaagaggcccgtgcaaaatttaggcagattgtatctgctgtacagtattgtcatcaaaagtacattgttcaccgtgatcttaaggctgaaaaccttctccttgatggtgatatgaatattaaaattgctgactttggttttagtaatgaatttacagttgggaacaaattggacacattttgtggaagcccaccctatgctgctcccgagcttttccaaggaaagaagtatgatgggcctgaagtggatgtgtggagtctgggcgtcattctctatacattagtcagtggctccttgcctttcgatggccagaatttaaaggaactgcgagagcgagttttacgagggaagtaccgtattcccttctatatgtccacagactgtgaaaatcttctgaagaaattattagtcctgaatccaataaagagaggcagcttggaacaaataatgaaagatcgatggatgaatgttggtcatgaagaggaagaactaaagccatatactgagcctgatccggatttcaatgacacaaaaagaatagacattatggtcaccatgggctttgcacgagatgaaataaatgatgccttaataaatcagaagtatgatgaagttatggctacttatattcttctaggtagaaaaccacctgaatttgaaggtggtgaatcgttatccagtggaaacttgtgtcagaggtcccggcccagtagtgacttaaacaacagcactcttcagtcccctgctcacctgaaggtccagagaagtatctcagcaaatcagaagcagcggcgtttcagtgatcatgctggtccatccattcctcctgctgtatcatataccaaaagacctcaggctaacagtgtggaaagtgaacagaaagaggagtgggacaaagatgtggctcgaaaacttggcagcacaacagttggatcaaaaagcgagatgactgcaagccctcttgtagggccagagaggaaaaaatcttcaactattccaagtaacaatgtgtattctggaggtagcatggcaagaaggaatacatatgtctgtgaaaggaccacagatcgatacgtagcattgcagaatggaaaagacagcagccttacggagatgtctgtgagtagcatatcttctgcaggctcttctgtggcctctgctgtcccctcagcacgaccccgccaccagaagtccatgtccacttctggtcatcctattaaagtcacactgccaaccattaaagacggctctgaagcttaccggcctggcagtacaacccagagagtgcctgctgcttccccatctgctcacagtattagtactgcgactccagaccggacccgttttccccgagggagctcaagccgaagcactttccatggtgaacagctccgggagcgacgcagcgttgcttataatgggccacctgcttcaccatcccatgaaacgggtgcatttgcacatgccagaaggggaacgtcaactggtataataagcaaaatcacatccaaatttgttcgcagggatccaagtgaaggcgaagccagtggcagaaccgacacctcaagaagtacatcaggggaaccaaaagaaagagacaaggaagagggtaaagattctaagccgcgttctttgcggttcacatggagtatgaagaccactagttcaatggaccctaatgacatgatgagagaaatccgaaaagtgttagatgcaaataactgtgattatgagcaaaaagagagatttttgcttttctgtgtccatggagacgctagacaggatagcctcgtgcagtgggagatggaagtctgcaagttgccacgactgtcacttaatggggttcgcttcaagcgaatatctgggacatctattgcctttaagaacattgcatcaaaaatagcaaatgagcttaagctgtaaagaagtccaaatttacaggttcagggaagatacatacatatatgaggtacagtttttgaatgtactggtaatgcctaatgtggtctgcctgtgaatctccccatgtagaatttgcccttaatgcaataaggttatacatagttatgaactgtaaaattaaagtcagtatgaactataataaatatctgtagcttaaaaagtaggttcacatgtacaggtaagtatattgtgtatttctgttcattttctgttcatagagttgtataataaaacatgattgcttaaaaacttgtatagttgtctagatttctgcacctgaatgtatgtttgatgctttgatttgaaaatgttcttccctgttatttacattctggtgggtttttaaaattcttacctccatcatgcaattttgaaaattgtgtccagaattaaaagtgcatagaaatagcctttacaattgtagcatggacctttaaaaattgttttaaaatcttatttaaatttaaaccagaagctgaaaaatagatcagctttattatacacaaaattattactgcttatctttgctcttttccttgttatcccgcaaggtttagttgagaagatacaaaatgtttacagtgttggcacttagagtttttaaattcaagtacatgaaattcagtaatagcattgccttgagctaactaggaagtaccgggaaaaaagttaaatctacatcaagtttcttttgaactttgaagtgttttctgacccactgctaactgtagcaacaaaatttaaaagaaaaaaaacatactttatctggctattataacataaactgtcacgtaggtttgctgccttcagaataccgcaatttaattgcgggaatataataatattgggactgtttcacagcacaaactcatctttacagtgttgatcaatgcatcagttaagaaataatgccacctcaggaattaactggcattgggaacatttgcctcattctcctgctatcctcttcattcacccctgccactgtaatatctataagtacttaagagacttgtgagcaaaacatactatttataacagtatatgattgatttatgcttatgtggttgttcagtttgttcccatgtaactcgtttgttttaaatattttgccagatttcttgtatttattccacatcattatgcctataatgtgccgctttgtgattgggcatttgcctacttttctttcataattagtgatatatgcgatgtaaaaccactagtaaaggtacattttaatacttgttattttatactgaattagccttggaggttgactgtgcaatgttatttactgttgtaattactgtaataccaacatatgggccccatctgcacactcctgaaaaacagaaagtgtattcaaattttatcagtttaaagaaaataaagctgtgataaatactgtaattccaacctacattagaaggtctaagtgtaggtgatgtgccattccataatggcttccagactagggtgaattttatgttctgtactgtactgtgatgtagctttcttctgtaacagttatgttttaaaattaagtgagttttttttttgccttagcaaagggtggtgtttgaaaaaaaaaatgtgtagcccctttttaacctagtgttcattcaaaaaaaaattgatgcaaatctttattcactttcactggtgcacactgaaattttacttgaacagttctcataataaagcacttgtcttttgctctttatcagaatgtgaattacctgttttctggtacaaaagtattctgtatgaggagtttattgtatgtgttctaaatttagttggcaaagggtgaagctgtgaaggttttcaagattattgaaactatgaaggtttcttgtcattatgacaagaaagtttaatctttttataggaattcctgtcactgaaatacgtttttaaaaaaatagactcatgtgttttccacggtagaaactgatatttttttacattttctcactgtggccaactcttctgtgtttgtagaaaggaatttgacttcaatatcttttatgaactaaaaatgaaatcttgatactcactttagatttttcattttatgtgttcatgacaacataaatatttttcaaagatttagaggaattttgcaatgtgtttgcataaataaataccagtttatgttcaccggctatgtgataccaggatttccttggcttctgttgaaatattatttgatatgacatcccttatattaaattaattattttgt

SEQ ID NO: 151642 - DNA, 2903 bp, Homo sapiens
  Payload ID: 9849
  Gene Symbol: MARK2
  Gene Name: MAP/microtubule affinity-regulating kinase 2
  Uniprot ID: Q7KZI7
  ENST ID: ENST00000350490
  CDS Start-End: 415-2544
gaaaagagccgagggccggcggtggtggcggccatgttgggagcagcaggtccggcggcggctgcctgtgtgccgggcgcggagcagtgccgctgagggcaggggaggagcgaggcaggcggccggctgcggcggcagagagtaggcggagcggcgcggcccggccgaaaggcggcacagcccagccgggggtcgggggggtgcggtccggagccgctcggagccggcgcggcctagcccgagcggcgcatccccgggctggcgtgagcggctgcccggcctccccgcacccccggccggggcccatgcggcgggtgctcctgctgtgagaagccccgcccggccgggctccgcgccttcccttccctcccttcctccaagcttctcggttccctcccccgagataccggcgccatgtccagcgctcggacccccctacccacgctgaacgagagggacacggagcagcccaccttgggacaccttgactccaagcccagcagtaagtccaacatgattcggggccgcaactcagccacctctgctgatgagcagccccacattggaaactaccggctcctcaagaccattggcaagggtaattttgccaaggtgaagttggcccgacacatcctgactgggaaagaggtagctgtgaagatcattgacaagactcaactgaactcctccagcctccagaaactattccgcgaagtaagaataatgaaggttttgaatcatcccaacatagttaaattatttgaagtgattgagactgagaaaacgctctaccttgtcatggagtacgctagtggcggagaggtatttgattacctagtggctcatggcaggatgaaagaaaaagaggctcgagccaaattccgccagatagtgtctgctgtgcagtactgtcaccagaagtttattgtccatagagacttaaaggcagaaaacctgctcttggatgctgatatgaacatcaagattgcagactttggcttcagcaatgaattcacctttgggaacaagctggacaccttctgtggcagtcccccttatgctgccccagaactcttccagggcaaaaaatatgatggacccgaggtggatgtgtggagcctaggagttatcctctatacactggtcagcggatccctgccttttgatggacagaacctcaaggagctgcgggaacgggtactgaggggaaaataccgtattccattctacatgtccacggactgtgaaaacctgcttaagaaatttctcattcttaatcccagcaagagaggcactttagagcaaatcatgaaagatcgatggatgaatgtgggtcacgaagatgatgaactaaagccttacgtggagccactccctgactacaaggacccccggcggacagagctgatggtgtccatgggttatacacgggaagagatccaggactcgctggtgggccagagatacaacgaggtgatggccacctatctgctcctgggctacaagagctccgagctggaaggcgacaccatcaccctgaaaccccggccttcagctgatctgaccaatagcagcgccccatccccatcccacaaggtacagcgcagcgtgtcggccaatcccaagcagcggcgcttcagcgaccaggctggtcctgccattcccacctctaattcttactctaagaagactcagagtaacaacgcagaaaataagcggcctgaggaggaccgggagtcagggcggaaagccagcagcacagccaaggtgcctgccagccccctgcccggtctggagaggaagaagaccaccccaaccccctccacgaacagcgtcctctccaccagcacaaatcgaagcaggaattccccacttttggagcgggccagcctcggccaggcctccatccagaatggcaaagacagcacagccccccagcgtgtccctgttgcctccccatccgcccacaacatcagcagcagtggtggagccccagaccgaactaacttcccccggggtgtgtccagccgaagcaccttccatgctgggcagctccgacaggtgcgggaccagcagaatttgccctacggtgtgaccccagcctctccctctggccacagccagggccggcggggggcctctgggagcatcttcagcaagttcacctccaagtttgtacgcagacctcacgtggtgggcagtggcggcaacgacaaagaaaaggaagaatttcgggaggccaagccccgctccctccgcttcacgtggagtatgaagaccacgagctccatggagcccaacgagatgatgcgggagatccgcaaggtgctggacgcgaacagctgccagagcgagctgcatgagaagtacatgctgctgtgcatgcacggcacgccgggccacgaggacttcgtgcagtgggagatggaggtgtgcaaactgccgcggctctctctcaacggggttcgatttaagcggatatcgggcacctccatggccttcaaaaacattgcctccaaaatagccaacgagctgaagctttaacaggctgccaggagcgggggcggcgggggcgggccagctggacgggctgccggccgctgcgccgccccacctgggcgagactgcagcgatggattggtgtgtctcccctgctggcacttctcccctccctggcccttctcagttttctcttacatgtttgtggggggtgggagattgttctccagcaccccacattcacccctgcccagagattcccccttctcctctcccctactggaggcaaaggaaggggagggtggatgggggggcagggctccccctcggtactgcggttgcacagagtatttcgcctaaaccaagaaattttttattaccaaaaagaaaaaagaaaaaaaaaa

SEQ ID NO: 151643 - DNA, 3004 bp, Homo sapiens
  Payload ID: 9849
  Gene Symbol: MARK2
  Gene Name: MAP/microtubule affinity-regulating kinase 2
  Uniprot ID: Q7KZI7
  ENST ID: ENST00000361128
  CDS Start-End: 503-2662
gaattcacccgtagtctgtggccgggaggagaaggcgcgccccacctcccgtttctagccgcttcggatgtttccggctgctgccggcgaaaagagccgagggccggcggtggtggcggccatgttgggagcagcaggtccggcggcggctgcctgtgtgccgggcgcggagcagtgccgctgagggcaggggaggagcgaggcaggcggccggctgcggcggcagagagtaggcggagcggcgcggcccggccgaaaggcggcacagcccagccgggggtcgggggggtgcggtccggagccgctcggagccggcgcggcctagcccgagcggcgcatccccgggctggcgtgagcggctgcccggcctccccgcacccccggccggggcccatgcggcgggtgctcctgctgtgagaagccccgcccggccgggctccgcgccttcccttccctcccttcctccaagcttctcggttccctcccccgagataccggcgccatgtccagcgctcggacccccctacccacgctgaacgagagggacacggagcagcccaccttgggacaccttgactccaagcccagcagtaagtccaacatgattcggggccgcaactcagccacctctgctgatgagcagccccacattggaaactaccggctcctcaagaccattggcaagggtaattttgccaaggtgaagttggcccgacacatcctgactgggaaagaggtagctgtgaagatcattgacaagactcaactgaactcctccagcctccagaaactattccgcgaagtaagaataatgaaggttttgaatcatcccaacatagttaaattatttgaagtgattgagactgagaaaacgctctaccttgtcatggagtacgctagtggcggagaggtatttgattacctagtggctcatggcaggatgaaagaaaaagaggctcgagccaaattccgccagatagtgtctgctgtgcagtactgtcaccagaagtttattgtccatagagacttaaaggcagaaaacctgctcttggatgctgatatgaacatcaagattgcagactttggcttcagcaatgaattcacctttgggaacaagctggacaccttctgtggcagtcccccttatgctgccccagaactcttccagggcaaaaaatatgatggacccgaggtggatgtgtggagcctaggagttatcctctatacactggtcagcggatccctgccttttgatggacagaacctcaaggagctgcgggaacgggtactgaggggaaaataccgtattccattctacatgtccacggactgtgaaaacctgcttaagaaatttctcattcttaatcccagcaagagaggcactttagagcaaatcatgaaagatcgatggatgaatgtgggtcacgaagatgatgaactaaagccttacgtggagccactccctgactacaaggacccccggcggacagagctgatggtgtccatgggttatacacgggaagagatccaggactcgctggtgggccagagatacaacgaggtgatggccacctatctgctcctgggctacaagagctccgagctggaaggcgacaccatcaccctgaaaccccggccttcagctgatctgaccaatagcagcgccccatccccatcccacaaggtacagcgcagcgtgtcggccaatcccaagcagcggcgcttcagcgaccaggcagctggtcctgccattcccacctctaattcttactctaagaagactcagagtaacaacgcagaaaataagcggcctgaggaggaccgggagtcagggcggaaagccagcagcacagccaaggtgcctgccagccccctgcccggtctggagaggaagaagaccaccccaaccccctccacgaacagcgtcctctccaccagcacaaatcgaagcaggaattccccacttttggagcgggccagcctcggccaggcctccatccagaatggcaaagacagcacagccccccagcgtgtccctgttgcctccccatccgcccacaacatcagcagcagtggtggagccccagaccgaactaacttcccccggggtgtgtccagccgaagcaccttccatgctgggcagctccgacaggtgcgggaccagcagaatttgccctacggtgtgaccccagcctctccctctggccacagccagggccggcggggggcctctgggagcatcttcagcaagttcacctccaagtttgtacgcagaaatctgtctttcaggtttgccagaagacctcacgtggtgggcagtggcggcaacgacaaagaaaaggaagaatttcgggaggccaagccccgctccctccgcttcacgtggagtatgaagaccacgagctccatggagcccaacgagatgatgcgggagatccgcaaggtgctggacgcgaacagctgccagagcgagctgcatgagaagtacatgctgctgtgcatgcacggcacgccgggccacgaggacttcgtgcagtgggagatggaggtgtgcaaactgccgcggctctctctcaacggggttcgatttaagcggatatcgggcacctccatggccttcaaaaacattgcctccaaaatagccaacgagctgaagctttaacaggctgccaggagcgggggcggcgggggcgggccagctggacgggctgccggccgctgcgccgccccacctgggcgagactgcagcgatggattggtgtgtctcccctgctggcacttctcccctccctggcccttctcagttttctcttacatgtttgtggggggtgggagattgttctccagcaccccacattcacccctgcccagagattcccccttctcctctcccctactggaggcaaaggaaggggagggtggatgggggggcagggctccccctcggtactgcggttgcacagagtatttcgcctaaaccaagaaattttttattaccaaaaag

SEQ ID NO: 151644 - DNA, 4560 bp, Homo sapiens
  Payload ID: 9849
  Gene Symbol: MARK2
  Gene Name: MAP/microtubule affinity-regulating kinase 2
  ENST ID: ENST00000377810
  CDS Start-End: 679-2778
aaacagagccgaagcttcgtcttcggaatcgaggaggagagcgcgtccccggggtttaccttcttcggctgtttccggaattcacccgtagtctgtggccgggaggagaaggcgcgccccacctcccgtttctagccgcttcggatgtttccggctgctgccggcgaaaagagccgagggccggcggtggtggcggccatgttgggagcagcaggtccggcggcggctgcctgtgtgccgggcgcggagcagtgccgctgagggcaggggaggagcgaggcaggcggccggctgcggcggcagagagtaggcggagcggcgcggcccggccgaaaggcggcacagcccagccgggggtcgggggggtgcggtccggagccgctcggagccggcgcggcctagcccgagcggcgcatccccgggctggcgtgagcggctgcccggcctccccgcacccccggccggggcccatgcggcgggtgctcctgctgtgagaagccccgcccggccgggctccgcgccttcccttccctcccttcctccaagcttctcggttccctcccccgagataccggcgccatgtccagcgctcggacccccctacccacgctgaacgagagggacacggagcagcccaccttgggacaccttgactccaagcccagcagtaagtccaacatgattcggggccgcaactcagccacctctgctgatgagcagccccacattggaaactaccggctcctcaagaccattggcaagggtaattttgccaaggtgaagttggcccgacacatcctgactgggaaagaggtagctgtgaagatcattgacaagactcaactgaactcctccagcctccagaaactattccgcgaagtaagaataatgaaggttttgaatcatcccaacatagttaaattatttgaagtgattgagactgagaaaacgctctaccttgtcatggagtacgctagtggcggagaggtatttgattacctagtggctcatggcaggatgaaagaaaaagaggctcgagccaaattccgccagatagtgtctgctgtgcagtactgtcaccagaagtttattgtccatagagacttaaaggcagaaaacctgctcttggatgctgatatgaacatcaagattgcagactttggcttcagcaatgaattcacctttgggaacaagctggacaccttctgtggcagtcccccttatgctgccccagaactcttccagggcaaaaaatatgatggacccgaggtggatgtgtggagcctaggagttatcctctatacactggtcagcggatccctgccttttgatggacagaacctcaaggagctgcgggaacgggtactgaggggaaaataccgtattccattctacatgtccacggactgtgaaaacctgcttaagaaatttctcattcttaatcccagcaagagaggcactttagagcaaatcatgaaagatcgatggatgaatgtgggtcacgaagatgatgaactaaagccttacgtggagccactccctgactacaaggacccccggcggacagagctgatggtgtccatgggttatacacgggaagagatccaggactcgctggtgggccagagatacaacgaggtgatggccacctatctgctcctgggctacaagagctccgagctggaaggcgacaccatcaccctgaaaccccggccttcagctgatctgaccaatagcagcgccccatccccatcccacaaggtacagcgcagcgtgtcggccaatcccaagcagcggcgcttcagcgaccaggctggtcctgccattcccacctctaattcttactctaagaagactcagagtaacaacgcagaaaataagcggcctgaggaggaccgggagtcagggcggaaagccagcagcacagccaaggtgcctgccagccccctgcccggtctggagaggaagaagaccaccccaaccccctccacgaacagcgtcctctccaccagcacaaatcgaagcaggaattccccacttttggagcgggccagcctcggccaggcctctgggctgccccccacggagagtaactgtgaggtgccgcggcccagcacagccccccagcgtgtccctgttgcctccccatccgcccacaacatcagcagcagtggtggagccccagaccgaactaacttcccccggggtgtgtccagccgaagcaccttccatgctgggcagctccgacaggtgcgggaccagcagaatttgccctacggtgtgaccccagcctctccctctggccacagccagggccggcggggggcctctgggagcatcttcagcaagttcacctccaagtttgtacgcaggaacctgaatgaacctgaaagcaaagaccgagtggagacgctcagacctcacgtggtgggcagtggcggcaacgacaaagaaaaggaagaatttcgggaggccaagccccgctccctccgcttcacgtggagtatgaagaccacgagctccatggagcccaacgagatgatgcgggagatccgcaaggtgctggacgcgaacagctgccagagcgagctgcatgagaagtacatgctgctgtgcatgcacggcacgccgggccacgaggacttcgtgcagtgggagatggaggtgtgcaaactgccgcggctctctctcaacggggttcgatttaagcggatatcgggcacctccatggccttcaaaaacattgcctccaaaatagccaacgagctgaagctttaacaggctgccaggagcgggggcggcgggggcgggccagctggacgggctgccggccgctgcgccgccccacctgggcgagactgcagcgatggattggtgtgtctcccctgctggcacttctcccctccctggcccttctcagttttctcttacatgtttgtggggggtgggagattgttctccagcaccccacattcacccctgcccagagattcccccttctcctctcccctactggaggcaaaggaaggggagggtggatgggggggcagggctccccctcggtactgcggttgcacagagtatttcgcctaaaccaagaaattttttattaccaaaaagaaaaaagaaaaaaaaaatcccagcggccacctttcctccctgccccattgggacagtcgagactggatctgtggggtttcccgggagggtggctcagggctggaacactctcaggcaagagtggtggagctcccgtcaggccctccgccaggcccactgtgggcttctcccctctcctccctccttcccctccaagcaaaccaccagaggtggccttcccctgacctcaggcccctgggctggaggcctgggcggtggggcagggggcgggggtgctgcgcagccctgcagtgggtggggctgggggctgctccggggctgctgaggctggagggccggcacaaggctccgcctccctccacactgtaccctctgcccctcctccccagagctgggcatttccttccacaagctgctgtggggacgtgtgttccctcaaagtctgtgccatcttctcccacccctcccgggtagaaggaggggctgaccccagggctgggagaggggaggggactggagggcagactggcttctcggtccccagggggccgcttgggctgttggtctccagagcagggccactgggcactctgtgatgggggagcctttgtctgaaagcacagccccctcgcccttcctctccccatggcttccccttcattggcattaatctgggcaccagctctctccatagcagtgacttccctcaccactctcatctctcagccttgccttttcttcctgacactgtcgccccctcctctcaggagacactgccgagggccacctggcagaaggctgagttaggcagcagggccgggagcgtctgccctccacagggtgggggacagataggctaagcgactcccagcttgctaccctcagtggccagtgtgggcgtgggcggtttggggcgcttggctggtggtggccactgcatcccttaatttatttctctgctgtttctgttcttgagaaattgggggtgggagtcctacacagaggctgcccctaccctcacctgagttgtacatttttttgtgatgggttttattttttattattttattttattttttttttttttgatttatgatgactccacccctcttcatcacccccgctcccaggccaggctcagcgattaagccgagcccttgcgtcctaggaaggggccttgccaacctcagccctcctgccccacactcctactgcggctcagaccaagggctccccctccctcccttcccccctcctgccctatggaacagcccgggtgctctgagggggctgggagggcatggcttggctcccaaagggggtaggggcccggggcacccaggcaaggtggcccctccccgtctagccccctcctccccaaccctgcacttagtttctcctctggatcaaacacgtaataaagagaatgtttggaatctg

SEQ ID NO: 151645 - DNA, 4728 bp, Homo sapiens
  Payload ID: 9849
  Gene Symbol: MARK2
  Gene Name: MAP/microtubule affinity-regulating kinase 2
  Uniprot ID: Q7KZI7
  ENST ID: ENST00000402010
  CDS Start-End: 580-2946
aaacagagccgaagcttcgtcttcggaatcgaggaggagagcgcgtccccggggtttaccttcttcggctgtttccggaattcacccgtagtctgtggccgggaggagaaggcgcgccccacctcccgtttctagccgcttcggatgtttccggctgctgccggcgaaaagagccgagggccggcggtggtggcggccatgttgggagcagcaggtccggcggcggctgcctgtgtgccgggcgcggagcagtgccgctgagggcaggggaggagcgaggcaggcggccggctgcggcggcagagagtaggcggagcggcgcggcccggccgaaaggcggcacagcccagccgggggtcgggggggtgcggtccggagccgctcggagccggcgcggcctagcccgagcggcgcatccccgggctggcgtgagcggctgcccggcctccccgcacccccggccggggcccatgcggcgggtgctcctgctgtgagaagccccgcccggccgggctccgcgccttcccttccctcccttcctccaagcttctcggttccctcccccgagataccggcgccatgtccagcgctcggacccccctacccacgctgaacgagagggacacggagcagcccaccttgggacaccttgactccaagcccagcagtaagtccaacatgattcggggccgcaactcagccacctctgctgatgagcagccccacattggaaactaccggctcctcaagaccattggcaagggtaattttgccaaggtgaagttggcccgacacatcctgactgggaaagaggtagctgtgaagatcattgacaagactcaactgaactcctccagcctccagaaactattccgcgaagtaagaataatgaaggttttgaatcatcccaacatagttaaattatttgaagtgattgagactgagaaaacgctctaccttgtcatggagtacgctagtggcggagaggtatttgattacctagtggctcatggcaggatgaaagaaaaagaggctcgagccaaattccgccagatagtgtctgctgtgcagtactgtcaccagaagtttattgtccatagagacttaaaggcagaaaacctgctcttggatgctgatatgaacatcaagattgcagactttggcttcagcaatgaattcacctttgggaacaagctggacaccttctgtggcagtcccccttatgctgccccagaactcttccagggcaaaaaatatgatggacccgaggtggatgtgtggagcctaggagttatcctctatacactggtcagcggatccctgccttttgatggacagaacctcaaggagctgcgggaacgggtactgaggggaaaataccgtattccattctacatgtccacggactgtgaaaacctgcttaagaaatttctcattcttaatcccagcaagagaggcactttagagcaaatcatgaaagatcgatggatgaatgtgggtcacgaagatgatgaactaaagccttacgtggagccactccctgactacaaggacccccggcggacagagctgatggtgtccatgggttatacacgggaagagatccaggactcgctggtgggccagagatacaacgaggtgatggccacctatctgctcctgggctacaagagctccgagctggaaggcgacaccatcaccctgaaaccccggccttcagctgatctgaccaatagcagcgccccatccccatcccacaaggtacagcgcagcgtgtcggccaatcccaagcagcggcgcttcagcgaccaggcagctggtcctgccattcccacctctaattcttactctaagaagactcagagtaacaacgcagaaaataagcggcctgaggaggaccgggagtcagggcggaaagccagcagcacagccaaggtgcctgccagccccctgcccggtctggagaggaagaagaccaccccaaccccctccacgaacagcgtcctctccaccagcacaaatcgaagcaggaattccccacttttggagcgggccagcctcggccaggcctccatccagaatggcaaagacagcctaaccatgccagggtcccgggcctccacggcttctgcttctgccgcagtctctgcggcccggccccgccagcaccagaaatccatgtcggcctccgtgcaccccaacaaggcctctgggctgccccccacggagagtaactgtgaggtgccgcggcccagcacagccccccagcgtgtccctgttgcctccccatccgcccacaacatcagcagcagtggtggagccccagaccgaactaacttcccccggggtgtgtccagccgaagcaccttccatgctgggcagctccgacaggtgcgggaccagcagaatttgccctacggtgtgaccccagcctctccctctggccacagccagggccggcggggggcctctgggagcatcttcagcaagttcacctccaagtttgtacgcagaaatctgtctttcaggtttgccagaaggaacctgaatgaacctgaaagcaaagaccgagtggagacgctcagacctcacgtggtgggcagtggcggcaacgacaaagaaaaggaagaatttcgggaggccaagccccgctccctccgcttcacgtggagtatgaagaccacgagctccatggagcccaacgagatgatgcgggagatccgcaaggtgctggacgcgaacagctgccagagcgagctgcatgagaagtacatgctgctgtgcatgcacggcacgccgggccacgaggacttcgtgcagtgggagatggaggtgtgcaaactgccgcggctctctctcaacggggttcgatttaagcggatatcgggcacctccatggccttcaaaaacattgcctccaaaatagccaacgagctgaagctttaacaggctgccaggagcgggggcggcgggggcgggccagctggacgggctgccggccgctgcgccgccccacctgggcgagactgcagcgatggattggtgtgtctcccctgctggcacttctcccctccctggcccttctcagttttctcttacatgtttgtggggggtgggagattgttctccagcaccccacattcacccctgcccagagattcccccttctcctctcccctactggaggcaaaggaaggggagggtggatgggggggcagggctccccctcggtactgcggttgcacagagtatttcgcctaaaccaagaaattttttattaccaaaaagaaaaaagaaaaaaaaaatcccagcggccacctttcctccctgccccattgggacagtcgagactggatctgtggggtttcccgggagggtggctcagggctggaacactctcaggcaagagtggtggagctcccgtcaggccctccgccaggcccactgtgggcttctcccctctcctccctccttcccctccaagcaaaccaccagaggtggccttcccctgacctcaggcccctgggctggaggcctgggcggtggggcagggggcgggggtgctgcgcagccctgcagtgggtggggctgggggctgctccggggctgctgaggctggagggccggcacaaggctccgcctccctccacactgtaccctctgcccctcctccccagagctgggcatttccttccacaagctgctgtggggacgtgtgttccctcaaagtctgtgccatcttctcccacccctcccgggtagaaggaggggctgaccccagggctgggagaggggaggggactggagggcagactggcttctcggtccccagggggccgcttgggctgttggtctccagagcagggccactgggcactctgtgatgggggagcctttgtctgaaagcacagccccctcgcccttcctctccccatggcttccccttcattggcattaatctgggcaccagctctctccatagcagtgacttccctcaccactctcatctctcagccttgccttttcttcctgacactgtcgccccctcctctcaggagacactgccgagggccacctggcagaaggctgagttaggcagcagggccgggagcgtctgccctccacagggtgggggacagataggctaagcgactcccagcttgctaccctcagtggccagtgtgggcgtgggcggtttggggcgcttggctggtggtggccactgcatcccttaatttatttctctgctgtttctgttcttgagaaattgggggtgggagtcctacacagaggctgcccctaccctcacctgagttgtacatttttttgtgatgggttttattttttattattttattttattttttttttttttgatttatgatgactccacccctcttcatcacccccgctcccaggccaggctcagcgattaagccgagcccttgcgtcctaggaaggggccttgccaacctcagccctcctgccccacactcctactgcggctcagaccaagggctccccctccctcccttcccccctcctgccctatggaacagcccgggtgctctgagggggctgggagggcatggcttggctcccaaagggggtaggggcccggggcacccaggcaaggtggcccctccccgtctagccccctcctccccaaccctgcacttagtttctcctctggatcaaacacgtaataaagagaatgtttggaatctg

SEQ ID NO: 151646 - DNA, 2112 bp, Homo sapiens
  Payload ID: 9849
  Gene Symbol: MARK2
  Gene Name: MAP/microtubule affinity-regulating kinase 2
  Uniprot ID: Q7KZI7
  ENST ID: ENST00000408948
  CDS Start-End: 19-2094
cccagcagtaagtccaacatgattcggggccgcaactcagccacctctgctgatgagcagccccacattggaaactaccggctcctcaagaccattggcaagggtaattttgccaaggtgaagttggcccgacacatcctgactgggaaagaggtagctgtgaagatcattgacaagactcaactgaactcctccagcctccagaaactattccgcgaagtaagaataatgaaggttttgaatcatcccaacatagttaaattatttgaagtgattgagactgagaaaacgctctaccttgtcatggagtacgctagtggcggagaggtatttgattacctagtggctcatggcaggatgaaagaaaaagaggctcgagccaaattccgccagatagtgtctgctgtgcagtactgtcaccagaagtttattgtccatagagacttaaaggcagaaaacctgctcttggatgctgatatgaacatcaagattgcagactttggcttcagcaatgaattcacctttgggaacaagctggacaccttctgtggcagtcccccttatgctgccccagaactcttccagggcaaaaaatatgatggacccgaggtggatgtgtggagcctaggagttatcctctatacactggtcagcggatccctgccttttgatggacagaacctcaaggagctgcgggaacgggtactgaggggaaaataccgtattccattctacatgtccacggactgtgaaaacctgcttaagaaatttctcattcttaatcccagcaagagaggcactttagagcaaatcatgaaagatcgatggatgaatgtgggtcacgaagatgatgaactaaagccttacgtggagccactccctgactacaaggacccccggcggacagagctgatggtgtccatgggttatacacgggaagagatccaggactcgctggtgggccagagatacaacgaggtgatggccacctatctgctcctgggctacaagagctccgagctggaaggcgacaccatcaccctgaaaccccggccttcagctgatctgaccaatagcagcgccccatccccatcccacaaggtacagcgcagcgtgtcggccaatcccaagcagcggcgcttcagcgaccaggctggtcctgccattcccacctctaattcttactctaagaagactcagagtaacaacgcagaaaataagcggcctgaggaggaccgggagtcagggcggaaagccagcagcacagccaaggtgcctgccagccccctgcccggtctggagaggaagaagaccaccccaaccccctccacgaacagcgtcctctccaccagcacaaatcgaagcaggaattccccacttttggagcgggccagcctcggccaggcctccatccagaatggcaaagacagcacagccccccagcgtgtccctgttgcctccccatccgcccacaacatcagcagcagtggtggagccccagaccgaactaacttcccccggggtgtgtccagccgaagcaccttccatgctgggcagctccgacaggtgcgggaccagcagaatttgccctacggtgtgaccccagcctctccctctggccacagccagggccggcggggggcctctgggagcatcttcagcaagttcacctccaagtttgtacgcaggaacctgaatgaacctgaaagcaaagaccgagtggagacgctcagacctcacgtggtgggcagtggcggcaacgacaaagaaaaggaagaatttcgggaggccaagccccgctccctccgcttcacgtggagtatgaagaccacgagctccatggagcccaacgagatgatgcgggagatccgcaaggtgctggacgcgaacagctgccagagcgagctgcatgagaagtacatgctgctgtgcatgcacggcacgccgggccacgaggacttcgtgcagtgggagatggaggtgtgcaaactgccgcggctctctctcaacggggttcgatttaagcggatatcgggcacctccatggccttcaaaaacattgcctccaaaatagccaacgagctgaagctttaacaggctgccaggagcggg

SEQ ID NO: 151647 - DNA, 2100 bp, Homo sapiens
  Payload ID: 9849
  Gene Symbol: MARK2
  Gene Name: MAP/microtubule affinity-regulating kinase 2
  ENST ID: ENST00000425897
  CDS Start-End: 1-2100
atgattcggggccgcaactcagccacctctgctgatgagcagccccacattggaaactaccggctcctcaagaccattggcaagggtaattttgccaaggtgaagttggcccgacacatcctgactgggaaagaggtagctgtgaagatcattgacaagactcaactgaactcctccagcctccagaaactattccgcgaagtaagaataatgaaggttttgaatcatcccaacatagttaaattatttgaagtgattgagactgagaaaacgctctaccttgtcatggagtacgctagtggcggagaggtatttgattacctagtggctcatggcaggatgaaagaaaaagaggctcgagccaaattccgccagatagtgtctgctgtgcagtactgtcaccagaagtttattgtccatagagacttaaaggcagaaaacctgctcttggatgctgatatgaacatcaagattgcagactttggcttcagcaatgaattcacctttgggaacaagctggacaccttctgtggcagtcccccttatgctgccccagaactcttccagggcaaaaaatatgatggacccgaggtggatgtgtggagcctaggagttatcctctatacactggtcagcggatccctgccttttgatggacagaacctcaaggagctgcgggaacgggtactgaggggaaaataccgtattccattctacatgtccacggactgtgaaaacctgcttaagaaatttctcattcttaatcccagcaagagaggcactttagagcaaatcatgaaagatcgatggatgaatgtgggtcacgaagatgatgaactaaagccttacgtggagccactccctgactacaaggacccccggcggacagagctgatggtgtccatgggttatacacgggaagagatccaggactcgctggtgggccagagatacaacgaggtgatggccacctatctgctcctgggctacaagagctccgagctggaaggcgacaccatcaccctgaaaccccggccttcagctgatctgaccaatagcagcgccccatccccatcccacaaggtacagcgcagcgtgtcggccaatcccaagcagcggcgcttcagcgaccaggctggtcctgccattcccacctctaattcttactctaagaagactcagagtaacaacgcagaaaataagcggcctgaggaggaccgggagtcagggcggaaagccagcagcacagccaaggtgcctgccagccccctgcccggtctggagaggaagaagaccaccccaaccccctccacgaacagcgtcctctccaccagcacaaatcgaagcaggaattccccacttttggagcgggccagcctcggccaggcctctgggctgccccccacggagagtaactgtgaggtgccgcggcccagcacagccccccagcgtgtccctgttgcctccccatccgcccacaacatcagcagcagtggtggagccccagaccgaactaacttcccccggggtgtgtccagccgaagcaccttccatgctgggcagctccgacaggtgcgggaccagcagaatttgccctacggtgtgaccccagcctctccctctggccacagccagggccggcggggggcctctgggagcatcttcagcaagttcacctccaagtttgtacgcaggaacctgaatgaacctgaaagcaaagaccgagtggagacgctcagacctcacgtggtgggcagtggcggcaacgacaaagaaaaggaagaatttcgggaggccaagccccgctccctccgcttcacgtggagtatgaagaccacgagctccatggagcccaacgagatgatgcgggagatccgcaaggtgctggacgcgaacagctgccagagcgagctgcatgagaagtacatgctgctgtgcatgcacggcacgccgggccacgaggacttcgtgcagtgggagatggaggtgtgcaaactgccgcggctctctctcaacggggttcgatttaagcggatatcgggcacctccatggccttcaaaaacattgcctccaaaatagccaacgagctgaagctttaa

SEQ ID NO: 151648 - DNA, 2671 bp, Homo sapiens
  Payload ID: 9849
  Gene Symbol: MARK2
  Gene Name: MAP/microtubule affinity-regulating kinase 2
  Uniprot ID: Q7KZI7
  ENST ID: ENST00000513765
  CDS Start-End: 50-2317
gcagcccaccttgggacaccttgactccaagcccagcagtaagtccaacatgattcggggccgcaactcagccacctctgctgatgagcagccccacattggaaactaccggctcctcaagaccattggcaagggtaattttgccaaggtgaagttggcccgacacatcctgactgggaaagaggtagctgtgaagatcattgacaagactcaactgaactcctccagcctccagaaactattccgcgaagtaagaataatgaaggttttgaatcatcccaacatagttaaattatttgaagtgattgagactgagaaaacgctctaccttgtcatggagtacgctagtggcggagaggtatttgattacctagtggctcatggcaggatgaaagaaaaagaggctcgagccaaattccgccagatagtgtctgctgtgcagtactgtcaccagaagtttattgtccatagagacttaaaggcagaaaacctgctcttggatgctgatatgaacatcaagattgcagactttggcttcagcaatgaattcacctttgggaacaagctggacaccttctgtggcagtcccccttatgctgccccagaactcttccagggcaaaaaatatgatggacccgaggtggatgtgtggagcctaggagttatcctctatacactggtcagcggatccctgccttttgatggacagaacctcaaggagctgcgggaacgggtactgaggggaaaataccgtattccattctacatgtccacggactgtgaaaacctgcttaagaaatttctcattcttaatcccagcaagagaggcactttagagcaaatcatgaaagatcgatggatgaatgtgggtcacgaagatgatgaactaaagccttacgtggagccactccctgactacaaggacccccggcggacagagctgatggtgtccatgggttatacacgggaagagatccaggactcgctggtgggccagagatacaacgaggtgatggccacctatctgctcctgggctacaagagctccgagctggaaggcgacaccatcaccctgaaaccccggccttcagctgatctgaccaatagcagcgccccatccccatcccacaaggtacagcgcagcgtgtcggccaatcccaagcagcggcgcttcagcgaccaggcagctggtcctgccattcccacctctaattcttactctaagaagactcagagtaacaacgcagaaaataagcggcctgaggaggaccgggagtcagggcggaaagccagcagcacagccaaggtgcctgccagccccctgcccggtctggagaggaagaagaccaccccaaccccctccacgaacagcgtcctctccaccagcacaaatcgaagcaggaattccccacttttggagcgggccagcctcggccaggcctccatccagaatggcaaagacagcctaaccatgccagggtcccgggcctccacggcttctgcttctgccgcagtctctgcggcccggccccgccagcaccagaaatccatgtcggcctccgtgcaccccaacaaggcctctgggctgccccccacggagagtaactgtgaggtgccgcggcccagcacagccccccagcgtgtccctgttgcctccccatccgcccacaacatcagcagcagtggtggagccccagaccgaactaacttcccccggggtgtgtccagccgaagcaccttccatgctgggcagctccgacaggtgcgggaccagcagaatttgccctacggtgtgaccccagcctctccctctggccacagccagggccggcggggggcctctgggagcatcttcagcaagttcacctccaagtttgtacgcagaaatctgtctttcaggtttgccagaaggaacctgaatgaacctgaaagcaaagaccgagtggagacgctcagacctcacgtggtgggcagtggcggcaacgacaaagaaaaggaagaatttcgggaggccaagccccgctccctccgcttcacgtggagtatgaagaccacgagctccatggagcccaacgagatgatgcgggagatccgcaaggtgctggacgcgaacagctgccagagcgagctgcatgagaagtacatgctgctgtgcatgcacggcacgccgggccacgaggacttcgtgcagtgggagatggaggtgtgcaaactgccgcggctctctctcaacggggttcgatttaagcggatatcgggcacctccatggccttcaaaaacattgcctccaaaatagccaacgagctgaagctttaacaggctgccaggagcgggggcggcgggggcgggccagctggacgggctgccggccgctgcgccgccccacctgggcgagactgcagcgatggattggtgtgtctcccctgctggcacttctcccctccctggcccttctcagttttctcttacatgtttgtggggggtgggagattgttctccagcaccccacattcacccctgcccagagattcccccttctcctctcccctactggaggcaaaggaaggggagggtggatgggggggcagggctccccctcggtactgcggttgcacagagtatttcgcctaaaccaagaaattttttattaccaaaaagaaaaaagaaaaa

SEQ ID NO: 151649 - DNA, 2885 bp, Homo sapiens
  Payload ID: 9849
  Gene Symbol: MARK2
  Gene Name: MAP/microtubule affinity-regulating kinase 2
  ENST ID: ENST00000502399
  CDS Start-End: 213-2549
gcggtccggagccgctcggagccggcgcggcctagcccgagcggcgcatccccgggctggcgtgagcggctgcccggcctccccgcacccccggccggggcccatgcggcgggtgctcctgctgtgagaagccccgcccggccgggctccgcgccttcccttccctcccttcctccaagcttctcggttccctcccccgagataccggcgccatgtccagcgctcggacccccctacccacgctgaacgagagggacacggagcagcccaccttgggacaccttgactccaagcccagcagtaagtccaacatgattcggggccgcaactcagccacctctgctgatgagcagccccacattggaaactaccggctcctcaagaccattggcaagggtaattttgccaaggtgaagttggcccgacacatcctgactgggaaagaggtagctgtgaagatcattgacaagactcaactgaactcctccagcctccagaaactattccgcgaagtaagaataatgaaggttttgaatcatcccaacatagttaaattatttgaagtgattgagactgagaaaacgctctaccttgtcatggagtacgctagtggcggagaggtatttgattacctagtggctcatggcaggatgaaagaaaaagaggctcgagccaaattccgccagatagtgtctgctgtgcagtactgtcaccagaagtttattgtccatagagacttaaaggcagaaaacctgctcttggatgctgatatgaacatcaagattgcagactttggcttcagcaatgaattcacctttgggaacaagctggacaccttctgtggcagtcccccttatgctgccccagaactcttccagggcaaaaaatatgatggacccgaggtggatgtgtggagcctaggagttatcctctatacactggtcagcggatccctgccttttgatggacagaacctcaaggagctgcgggaacgggtactgaggggaaaataccgtattccattctacatgtccacggactgtgaaaacctgcttaagaaatttctcattcttaatcccagcaagagaggcactttagagcaaatcatgaaagatcgatggatgaatgtgggtcacgaagatgatgaactaaagccttacgtggagccactccctgactacaaggacccccggcggacagagctgatggtgtccatgggttatacacgggaagagatccaggactcgctggtgggccagagatacaacgaggtgatggccacctatctgctcctgggctacaagagctccgagctggaaggcgacaccatcaccctgaaaccccggccttcagctgatctgaccaatagcagcgccccatccccatcccacaaggtacagcgcagcgtgtcggccaatcccaagcagcggcgcttcagcgaccaggctggtcctgccattcccacctctaattcttactctaagaagactcagagtaacaacgcagaaaataagcggcctgaggaggaccgggagtcagggcggaaagccagcagcacagccaaggtgcctgccagccccctgcccggtctggagaggaagaagaccaccccaaccccctccacgaacagcgtcctctccaccagcacaaatcgaagcaggaattccccacttttggagcgggccagcctcggccaggcctccatccagaatggcaaagacagcctaaccatgccagggtcccgggcctccacggcttctgcttctgccgcagtctctgcggcccggccccgccagcaccagaaatccatgtcggcctccgtgcaccccaacaaggcctctgggctgccccccacggagagtaactgtgaggtgccgcggcccagcacagccccccagcgtgtccctgttgcctccccatccgcccacaacatcagcagcagtggtggagccccagaccgaactaacttcccccggggtgtgtccagccgaagcaccttccatgctgggcagctccgacaggtgcgggaccagcagaatttgccctacggtgtgaccccagcctctccctctggccacagccagggccggcggggggcctctgggagcatcttcagcaagttcacctccaagtttgtacgcaggaacctgaatgaacctgaaagcaaagaccgagtggagacgctcagacctcacgtggtgggcagtggcggcaacgacaaagaaaaggaagaatttcgggaggccaagccccgctccctccgcttcacgtggagtatgaagaccacgagctccatggagcccaacgagatgatgcgggagatccgcaaggtgctggacgcgaacagctgccagagcgagctgcatgagaagtacatgctgctgtgcatgcacggcacgccgggccacgaggacttcgtgcagtgggagatggaggtgtgcaaactgccgcggctctctctcaacggggttcgatttaagcggatatcgggcacctccatggccttcaaaaacattgcctccaaaatagccaacgagctgaagctttaacaggctgccaggagcgggggcggcgggggcgggccagctggacgggctgccggccgctgcgccgccccacctgggcgagactgcagcgatggattggtgtgtctcccctgctggcacttctcccctccctggcccttctcagttttctcttacatgtttgtggggggtgggagattgttctccagcaccccacattcacccctgcccagagattcccccttctcctctcccctactggaggcaaaggaaggggagggtggatgggggggcagggctccccctcggtactgcggttgcacagagtatttcgcctaaaccaagaaattttttattacc

SEQ ID NO: 151650 - DNA, 411 bp, Homo sapiens
  Payload ID: 9849
  Gene Symbol: MARK2
  Gene Name: MAP/microtubule affinity-regulating kinase 2
  ENST ID: ENST00000512060
  CDS Start-End: 230-411
ctctctgctagtggtggtttcggttgcgacaccgtccaggttcccaggcaggaaccgctcggcctggctgcttagctacttttcactgaggaggtggtggaaggtgtcgcctgctctggctgagtaagggtggctggctgagccggcagcccccgccctaggcctggctcttcccggcctctgtactttgccctcgctgcctgacaggttctgctgtgggctctgctgaatggaagtcgctggtagtccttttccctttctccagtcggtggcttgcctccttaccctggctcacatccctgctgtgggaaacatcttacagcatagaagaaggggtgcagggcccaccttgggacaccttgactccaagcccagcagtaagtccaacatgattcggggccgcaactcagc

SEQ ID NO: 151651 - DNA, 2862 bp, Homo sapiens
  Payload ID: 9849
  Gene Symbol: MARK2
  Gene Name: MAP/microtubule affinity-regulating kinase 2
  Uniprot ID: Q7KZI7
  ENST ID: ENST00000509502
  CDS Start-End: 464-2701
cttcctgccctattcccctcctgccccttccctcccaccttgcttctggtgtgctgtcctggaattgcacgcgcttcctgaccaccaggctctggcccttgagaagccagcggggctttgtccctgttgctctccttgccaaacccagtctctctgctagtggtggtttcggttgcgacaccgtccaggttcccaggcaggaaccgctcggcctggctgcttagctacttttcactgaggaggtggtggaaggtgtcgcctgctctggctgagtaagggtggctggctgagccggcagcccccgccctaggcctggctcttcccggcctctgtactttgccctcgctgcctgacaggttctgctgtgggctctgctgaatggaagtcgctggtagtccttttccctttctccagtcggcccaccttgggacaccttgactccaagcccagcagtaagtccaacatgattcggggccgcaactcagccacctctgctgatgagcagccccacattggaaactaccggctcctcaagaccattggcaagggtaattttgccaaggtgaagttggcccgacacatcctgactgggaaagaggtagctgtgaagatcattgacaagactcaactgaactcctccagcctccagaaactattccgcgaagtaagaataatgaaggttttgaatcatcccaacatagttaaattatttgaagtgattgagactgagaaaacgctctaccttgtcatggagtacgctagtggcggagaggtatttgattacctagtggctcatggcaggatgaaagaaaaagaggctcgagccaaattccgccagatagtgtctgctgtgcagtactgtcaccagaagtttattgtccatagagacttaaaggcagaaaacctgctcttggatgctgatatgaacatcaagattgcagactttggcttcagcaatgaattcacctttgggaacaagctggacaccttctgtggcagtcccccttatgctgccccagaactcttccagggcaaaaaatatgatggacccgaggtggatgtgtggagcctaggagttatcctctatacactggtcagcggatccctgccttttgatggacagaacctcaaggagctgcgggaacgggtactgaggggaaaataccgtattccattctacatgtccacggactgtgaaaacctgcttaagaaatttctcattcttaatcccagcaagagaggcactttagagcaaatcatgaaagatcgatggatgaatgtgggtcacgaagatgatgaactaaagccttacgtggagccactccctgactacaaggacccccggcggacagagctgatggtgtccatgggttatacacgggaagagatccaggactcgctggtgggccagagatacaacgaggtgatggccacctatctgctcctgggctacaagagctccgagctggaaggcgacaccatcaccctgaaaccccggccttcagctgatctgaccaatagcagcgccccatccccatcccacaaggtacagcgcagcgtgtcggccaatcccaagcagcggcgcttcagcgaccaggctggtcctgccattcccacctctaattcttactctaagaagactcagagtaacaacgcagaaaataagcggcctgaggaggaccgggagtcagggcggaaagccagcagcacagccaaggtgcctgccagccccctgcccggtctggagaggaagaagaccaccccaaccccctccacgaacagcgtcctctccaccagcacaaatcgaagcaggaattccccacttttggagcgggccagcctcggccaggcctccatccagaatggcaaagacagcctaaccatgccagggtcccgggcctccacggcttctgcttctgccgcagtctctgcggcccggccccgccagcaccagaaatccatgtcggcctccgtgcaccccaacaaggcctctgggctgccccccacggagagtaactgtgaggtgccgcggcccagcacagccccccagcgtgtccctgttgcctccccatccgcccacaacatcagcagcagtggtggagccccagaccgaactaacttcccccggggtgtgtccagccgaagcaccttccatgctgggcagctccgacaggtgcgggaccagcagaatttgccctacggtgtgaccccagcctctccctctggccacagccagggccggcggggggcctctgggagcatcttcagcaagttcacctccaagtttgtacgcaggaacctgaatgaacctgaaagcaaagaccgagtggagacgctcagacctcacgtggtgggcagtggcggcaacgacaaagaaaaggaagaatttcgggaggccaagccccgctccctccgcttcacgtggagtatgaagaccacgagctccatggagcccaacgagatgatgcgggagatccgcaaggtgctggacgcgaacagctgccagagcgagctgcatgagaagtacatgctgctgtgcatgcacggcacgccgggccacgaggacttcgtgcagtgggagatggaggtgtgcaaactgccgcggctctctctcaacggggttcgatttaagcggatatcgggcacctccatggccttcaaaaacattgcctccaaaatagccaacgagctgaagctttaacaggctgccaggagcgggggcggcgggggcgggccagctggacgggctgccggccgctgcgccgccccacctgggcgagactgcagcgatggattggtgtgtctcccctgctggcacttctcccctccctggcccttctcagttttctcttacatgtttgt

SEQ ID NO: 151652 - DNA, 2924 bp, Homo sapiens
  Payload ID: 9849
  Gene Symbol: MARK2
  Gene Name: MAP/microtubule affinity-regulating kinase 2
  Uniprot ID: Q7KZI7
  ENST ID: ENST00000508192
  CDS Start-End: 503-2677
gaattcacccgtagtctgtggccgggaggagaaggcgcgccccacctcccgtttctagccgcttcggatgtttccggctgctgccggcgaaaagagccgagggccggcggtggtggcggccatgttgggagcagcaggtccggcggcggctgcctgtgtgccgggcgcggagcagtgccgctgagggcaggggaggagcgaggcaggcggccggctgcggcggcagagagtaggcggagcggcgcggcccggccgaaaggcggcacagcccagccgggggtcgggggggtgcggtccggagccgctcggagccggcgcggcctagcccgagcggcgcatccccgggctggcgtgagcggctgcccggcctccccgcacccccggccggggcccatgcggcgggtgctcctgctgtgagaagccccgcccggccgggctccgcgccttcccttccctcccttcctccaagcttctcggttccctcccccgagataccggcgccatgtccagcgctcggacccccctacccacgctgaacgagagggacacggagcagcccaccttgggacaccttgactccaagcccagcagtaagtccaacatgattcggggccgcaactcagccacctctgctgatgagcagccccacattggaaactaccggctcctcaagaccattggcaagggtaattttgccaaggtgaagttggcccgacacatcctgactgggaaagaggtagctgtgaagatcattgacaagactcaactgaactcctccagcctccagaaactattccgcgaagtaagaataatgaaggttttgaatcatcccaacatagttaaattatttgaagtgattgagactgagaaaacgctctaccttgtcatggagtacgctagtggcggagaggtatttgattacctagtggctcatggcaggatgaaagaaaaagaggctcgagccaaattccgccagatagtgtctgctgtgcagtactgtcaccagaagtttattgtccatagagacttaaaggcagaaaacctgctcttggatgctgatatgaacatcaagattgcagactttggcttcagcaatgaattcacctttgggaacaagctggacaccttctgtggcagtcccccttatgctgccccagaactcttccagggcaaaaaatatgatggacccgaggtggatgtgtggagcctaggagttatcctctatacactggtcagcggatccctgccttttgatggacagaacctcaaggagctgcgggaacgggtactgaggggaaaataccgtattccattctacatgtccacggactgtgaaaacctgcttaagaaatttctcattcttaatcccagcaagagaggcactttagagcaaatcatgaaagatcgatggatgaatgtgggtcacgaagatgatgaactaaagccttacgtggagccactccctgactacaaggacccccggcggacagagctgatggtgtccatgggttatacacgggaagagatccaggactcgctggtgggccagagatacaacgaggtgatggccacctatctgctcctgggctacaagagctccgagctggaaggcgacaccatcaccctgaaaccccggccttcagctgatctgaccaatagcagcgccccatccccatcccacaaggtacagcgcagcgtgtcggccaatcccaagcagcggcgcttcagcgaccaggctggtcctgccattcccacctctaattcttactctaagaagactcagagtaacaacgcagaaaataagcggcctgaggaggaccgggagtcagggcggaaagccagcagcacagccaaggtgcctgccagccccctgcccggtctggagaggaagaagaccaccccaaccccctccacgaacagcgtcctctccaccagcacaaatcgaagcaggaattccccacttttggagcgggccagcctcggccaggcctccatccagaatggcaaagacagcacagccccccagcgtgtccctgttgcctccccatccgcccacaacatcagcagcagtggtggagccccagaccgaactaacttcccccggggtgtgtccagccgaagcaccttccatgctgggcagctccgacaggtgcgggaccagcagaatttgccctacggtgtgaccccagcctctccctctggccacagccagggccggcggggggcctctgggagcatcttcagcaagttcacctccaagtttgtacgcaggaacctgaatgaacctgaaagcaaagaccgagtggagacgctcagacctcacgtggtgggcagtggcggcaacgacaaagaaaaggaagaatttcgggaggccaagccccgctccctccgcttcacgtggagtatgaagaccacgagctccatggagcccaacgagatgatgcgggagatccgcaaggtgctggacgcgaacagctgccagagcgagctgcatgagaagtacatgctgctgtgcatgcacggcacgccgggccacgaggacttcgtgcagtgggagatggaggtgtgcaaactgccgcggctctctctcaacggggttcgatttaagcggatatcgggcacctccatggccttcaaaaacattgcctccaaaatagccaacgagctgaagctttaacaggctgccaggagcgggggcggcgggggcgggccagctggacgggctgccggccgctgcgccgccccacctgggcgagactgcagcgatggattggtgtgtctcccctgctggcacttctcccctccctggcccttctcagttttctcttacatgtttgtggggggtgggagattgttctccagcaccccacattcacccctgcccagagattcccccttctcctctcccctactggaggcaaagg

SEQ ID NO: 151653 - DNA, 558 bp, Homo sapiens
  Payload ID: 9849
  Gene Symbol: MARK2
  Gene Name: MAP/microtubule affinity-regulating kinase 2
  ENST ID: ENST00000540169
  CDS Start-End: 224-558
agtttctcttcatggattacctgctcgcggcaggcaggcaggcagctccccacctggaagcctgcagactcgccgagctgagagaatcatgctgcagatctcatgcttcttttttactttgtgttggcaaaaaccccaggagaagatgggagattctgggaggagatgattatgctggcccaccttgggacaccttgactccaagcccagcagtaagtccaacatgattcggggccgcaactcagccacctctgctgatgagcagccccacattggaaactaccggctcctcaagaccattggcaagggtaattttgccaaggtgaagttggcccgacacatcctgactgggaaagaggtagctgtgaagatcattgacaagactcaactgaactcctccagcctccagaaactattccgcgaagtaagaataatgaaggttttgaatcatcccaacatagttaaattatttgaagtgattgagactgagaaaacgctctaccttgtcatggagtacgctagtggcggagaggtatttgattacctagtggctcatgg

SEQ ID NO: 151654 - DNA, 557 bp, Homo sapiens
  Payload ID: 9849
  Gene Symbol: MARK2
  Gene Name: MAP/microtubule affinity-regulating kinase 2
  ENST ID: ENST00000543674
  CDS Start-End: 285-557
agtatcttaagtaggtgtggtaatgactacagagaagtgctttttcaggatgagaagatgagggagaaaatttacaccattgctggattgtgttaagaactcggagaggaaaccacagggaggatgcactgctgaggaaatcgtctggcttcctggagtggggaccagagccagagagccaagccctcctggctttgctgagttctgtccttgcccctgacaccaacgtgtctgcctgcgttgttgctcctggttacagtgggctcagtcttgcctcttttttgatgggtgggcagaggaacactagtgttgggaatattgtccagcgttggagagatcatgtggtctgtcagaaggctggagttatttatagtgggagaaaagcccaggagcatggcacgggaagaactgatttcacaccagctcagcgcctgatgatgcccaccttgggacaccttgactccaagcccagcagtaagtccaacatgattcggggccgcaactcagccacctctgctgatgagcagccccacattggaaactaccggctcctcaag

SEQ ID NO: 151655 - DNA, 595 bp, Homo sapiens
  Payload ID: 9849
  Gene Symbol: MARK2
  Gene Name: MAP/microtubule affinity-regulating kinase 2
  ENST ID: ENST00000543220
  CDS Start-End: 113-595
gatcattgtcattattgttccagttgaacaacacagtgaattttatctgagcaccacacaactctagcccaccttgggacaccttgactccaagcccagcagtaagtccaacatgattcggggccgcaactcagccacctctgctgatgagcagccccacattggaaactaccggctcctcaagaccattggcaagggtaattttgccaaggtgaagttggcccgacacatcctgactgggaaagaggtagctgtgaagatcattgacaagactcaactgaactcctccagcctccagaaactattccgcgaagtaagaataatgaaggttttgaatcatcccaacatagttaaattatttgaagtgattgagactgagaaaacgctctaccttgtcatggagtacgctagtggcggagaggtatttgattacctagtggctcatggcaggatgaaagaaaaagaggctcgagccaaattccgccagatagtgtctgctgtgcagtactgtcaccagaagtttattgtccatagagacttaaaggcagaaaacctgctcttggatgctgatatgaacatcaagattgcagacttt

SEQ ID NO: 151656 - DNA, 2911 bp, Homo sapiens
  Payload ID: 9850
  Gene Symbol: MARK3
  Gene Name: MAP/microtubule affinity-regulating kinase 3
  ENST ID: ENST00000216288
  CDS Start-End: 171-2312
gacggcccgggccaggcccgggatctagacggccgtagggggaagggagccgccctccccacggcgccttttcggaactgccgtggactcgaggacgctggtcgccggcctcctagggctgtgctgttttgttttgaccctcgcattgtgcagaattaaagtgcagtaaaatgtccactaggaccccattgccaacggtgaatgaacgagacactgaaaaccacacgtcacatggagatgggcgtcaagaagttacctctcgtaccagccgctcaggagctcggtgtagaaactctatagcctcctgtgcagatgaacaacctcacatcggaaactacagactgttgaaaacaatcggcaaggggaattttgcaaaagtaaaattggcaagacatatccttacaggcagagaggttgcaataaaaataattgacaaaactcagttgaatccaacaagtctacaaaagctcttcagagaagtaagaataatgaagattttaaatcatcccaatatagtgaagttattcgaagtcattgaaactgaaaaaacactctacctaatcatggaatatgcaagtggaggtgaagtatttgactatttggttgcacatggcaggatgaaggaaaaagaagcaagatctaaatttagacagattgtgtctgcagttcaatactgccatcagaaacggatcgtacatcgagacctcaaggctgaaaatctattgttagatgccgatatgaacattaaaatagcagatttcggttttagcaatgaatttactgttggcggtaaactcgacacgttttgtggcagtcctccatacgcagcacctgagctcttccagggcaagaaatatgacgggccagaagtggatgtgtggagtctgggggtcattttatacacactagtcagtggctcacttccctttgatgggcaaaacctaaaggaactgagagagagagtattaagagggaaatacagaattcccttctacatgtctacagactgtgaaaaccttctcaaacgtttcctggtgctaaatccaattaaacgcggcactctagagcaaatcatgaaggacaggtggatcaatgcagggcatgaagaagatgaactcaaaccatttgttgaaccagagctagacatctcagaccaaaaaagaatagatattatggtgggaatgggatattcacaagaagaaattcaagaatctcttagtaagatgaaatacgatgaaatcacagctacatatttgttattggggagaaaatcttcagaggttaggccgagcagtgatctcaacaacagtactggccagtctcctcaccacaaagtgcagagaagtgtttcttcaagccaaaagcaaagacgctacagtgaccatgctggaccagctattccttctgttgtggcgtatccgaaaaggagtcagaccagcactgcagatagtgacctcaaagaagatggaatttcctcccggaaatcaagtggcagtgctgttggaggaaagggaattgctccagccagtcccatgcttgggaatgcaagtaatcctaataaggcggatattcctgaacgcaagaaaagctccactgtccctagtagtaacacagcatctggtggaatgacacgacgaaatacttatgtttgcagtgagagaactacagctgatagacactcagtgattcagaatggcaaagaaaacagcactattcctgatcagagaactccagttgcttcaacacacagtatcagtagtgcagccaccccagatcgaatccgcttcccaagaggcactgccagtcgtagcactttccacggccagccccgggaacggcgaaccgcaacatataatggccctcctgcctctcccagcctgtcccatgaagccacaccattgtcccagactcgaagccgaggctccactaatctctttagtaaattaacttcaaaactcacaaggagtcgcaatgtatctgctgagcaaaaagatgaaaacaaagaagcaaagcctcgatccctacgcttcacctggagcatgaaaaccactagttcaatggatcccggggacatgatgcgggaaatccgcaaagtgttggacgccaataactgcgactatgagcagagggagcgcttcttgctcttctgcgtccacggagatgggcacgcggagaacctcgtgcagtgggaaatggaagtgtgcaagctgccaagactgtctctgaacggggtccggtttaagcggatatcggggacatccatagccttcaaaaatattgcttccaaaattgccaatgagctaaagctgtaacccagtgattatgatgtaaattaagtagcaattaaagtgttttcctgaacactgatggaaatgtatagaataatatttaggcaataacgtctgcatcttctaaatcatgaaattaaagtctgaggacgagagcacgcctgggagcgaaagctggccttttttctacgaatgcactacattaaagatgtgcaacctatgcgccccctgccctacttccgttaccctgagagtcggtgtgtggccccatctccatgtgcctcccgtctgggtgggtgtgagagtggacggtatgtgtgtgaagtggtgtatatggaagcatctccctacactggcagccagtcattactagtacctctgcgggagatcatccggtgctaaaacattacagttgccaaggaggaaaatactgaatgactgctaagaattaaccttaagaccagttcatagttaatacaggtttacagttcatgcctgtggttttgtgtttgttgttttgtgtttttttagtgcaaaaggtttaaatttatagttgtgaacattgcttgtgtgtgtttttctaagtagattcacaagataattaaaaattcactttttctcag

SEQ ID NO: 151657 - DNA, 3283 bp, Homo sapiens
  Payload ID: 9850
  Gene Symbol: MARK3
  Gene Name: MAP/microtubule affinity-regulating kinase 3
  Uniprot ID: P27448
  ENST ID: ENST00000303622
  CDS Start-End: 490-2679
gctccatggtcggcgcccacagcccgcggcggcctgtcttgcgctccacttccttcacatcctcctccgcctcctcgttttcaggcgccgccggcggcgctgtgtggaggcccgcgagctgaaattcgcggtgcgacgggagggagtggagaaggaggtgagggggcccaggatcgcggggcgccctgaggcaaggggacgccggcgggccgaagcgcagcccgccgcccgcaggctcggctccgccactgccgccctcccggtctcctcgcctcggccgccgaggcagggagagaatgagccccgggacccgccgggggacggcccgggccaggcccgggatctagacggccgtagggggaagggagccgccctccccacggcgccttttcggaactgccgtggactcgaggacgctggtcgccggcctcctagggctgtgctgttttgttttgaccctcgcattgtgcagaattaaagtgcagtaaaatgtccactaggaccccattgccaacggtgaatgaacgagacactgaaaaccacacgtcacatggagatgggcgtcaagaagttacctctcgtaccagccgctcaggagctcggtgtagaaactctatagcctcctgtgcagatgaacaacctcacatcggaaactacagactgttgaaaacaatcggcaaggggaattttgcaaaagtaaaattggcaagacatatccttacaggcagagaggttgcaataaaaataattgacaaaactcagttgaatccaacaagtctacaaaagctcttcagagaagtaagaataatgaagattttaaatcatcccaatatagtgaagttattcgaagtcattgaaactgaaaaaacactctacctaatcatggaatatgcaagtggaggtgaagtatttgactatttggttgcacatggcaggatgaaggaaaaagaagcaagatctaaatttagacagattgtgtctgcagttcaatactgccatcagaaacggatcgtacatcgagacctcaaggctgaaaatctattgttagatgccgatatgaacattaaaatagcagatttcggttttagcaatgaatttactgttggcggtaaactcgacacgttttgtggcagtcctccatacgcagcacctgagctcttccagggcaagaaatatgacgggccagaagtggatgtgtggagtctgggggtcattttatacacactagtcagtggctcacttccctttgatgggcaaaacctaaaggaactgagagagagagtattaagagggaaatacagaattcccttctacatgtctacagactgtgaaaaccttctcaaacgtttcctggtgctaaatccaattaaacgcggcactctagagcaaatcatgaaggacaggtggatcaatgcagggcatgaagaagatgaactcaaaccatttgttgaaccagagctagacatctcagaccaaaaaagaatagatattatggtgggaatgggatattcacaagaagaaattcaagaatctcttagtaagatgaaatacgatgaaatcacagctacatatttgttattggggagaaaatcttcagagctggatgctagtgattccagttctagcagcaatctttcacttgctaaggttaggccgagcagtgatctcaacaacagtactggccagtctcctcaccacaaagtgcagagaagtgtttcttcaagccaaaagcaaagacgctacagtgaccatgctggaccagctattccttctgttgtggcgtatccgaaaaggagtcagaccagcactgcagatagtgacctcaaagaagatggaatttcctcccggaaatcaagtggcagtgctgttggaggaaagggaattgctccagccagtcccatgcttgggaatgcaagtaatcctaataaggcggatattcctgaacgcaagaaaagctccactgtccctagtagtaacacagcatctggtggaatgacacgacgaaatacttatgtttgcagtgagagaactacagctgatagacactcagtgattcagaatggcaaagaaaacagcactattcctgatcagagaactccagttgcttcaacacacagtatcagtagtgcagccaccccagatcgaatccgcttcccaagaggcactgccagtcgtagcactttccacggccagccccgggaacggcgaaccgcaacatataatggccctcctgcctctcccagcctgtcccatgaagccacaccattgtcccagactcgaagccgaggctccactaatctctttagtaaattaacttcaaaactcacaaggagtcgcaatgtatctgctgagcaaaaagatgaaaacaaagaagcaaagcctcgatccctacgcttcacctggagcatgaaaaccactagttcaatggatcccggggacatgatgcgggaaatccgcaaagtgttggacgccaataactgcgactatgagcagagggagcgcttcttgctcttctgcgtccacggagatgggcacgcggagaacctcgtgcagtgggaaatggaagtgtgcaagctgccaagactgtctctgaacggggtccggtttaagcggatatcggggacatccatagccttcaaaaatattgcttccaaaattgccaatgagctaaagctgtaacccagtgattatgatgtaaattaagtagcaattaaagtgttttcctgaacactgatggaaatgtatagaataatatttaggcaataacgtctgcatcttctaaatcatgaaattaaagtctgaggacgagagcacgcctgggagcgaaagctggccttttttctacgaatgcactacattaaagatgtgcaacctatgcgccccctgccctacttccgttaccctgagagtcggtgtgtggccccatctccatgtgcctcccgtctgggtgggtgtgagagtggacggtatgtgtgtgaagtggtgtatatggaagcatctccctacactggcagccagtcattactagtacctctgcgggagatcatccggtgctaaaacattacagttgccaaggaggaaaatactgaatgactgctaagaattaaccttaagaccagttcatagttaatacaggtttacagttcatgcctgtggttttgtgtttgttgttttgtgtttttttagtgcaaaaggtttaaatttatagttgtgaacattgcttgtgtgtgtttttctaagtagattcacaagataattaaaaattcactttttctcagtaaaa

SEQ ID NO: 151658 - DNA, 2331 bp, Homo sapiens
  Payload ID: 9850
  Gene Symbol: MARK3
  Gene Name: MAP/microtubule affinity-regulating kinase 3
  ENST ID: ENST00000335102
  CDS Start-End: 1-2331
atgtccactaggaccccattgccaacggtgaatgaacgagacactgaaaaccacacgtcacatggagatgggcgtcaagaagttacctctcgtaccagccgctcaggagctcggtgtagaaactctatagcctcctgtgcagatgaacaacctcacatcggaaactacagactgttgaaaacaatcggcaaggggaattttgcaaaagtaaaattggcaagacatatccttacaggcagagaggttgcaataaaaataattgacaaaactcagttgaatccaacaagtctacaaaagctcttcagagaagtaagaataatgaagattttaaatcatcccaatatagtgaagttattcgaagtcattgaaactgaaaaaacactctacctaatcatggaatatgcaagtggaggtgaagtatttgactatttggttgcacatggcaggatgaaggaaaaagaagcaagatctaaatttagacagggttgtcaagctggacagactattaaagttcaagtctcctttgatttgcttagtctgatgtttacatttattgtgtctgcagttcaatactgccatcagaaacggatcgtacatcgagacctcaaggctgaaaatctattgttagatgccgatatgaacattaaaatagcagatttcggttttagcaatgaatttactgttggcggtaaactcgacacgttttgtggcagtcctccatacgcagcacctgagctcttccagggcaagaaatatgacgggccagaagtggatgtgtggagtctgggggtcattttatacacactagtcagtggctcacttccctttgatgggcaaaacctaaaggaactgagagagagagtattaagagggaaatacagaattcccttctacatgtctacagactgtgaaaaccttctcaaacgtttcctggtgctaaatccaattaaacgcggcactctagagcaaatcatgaaggacaggtggatcaatgcagggcatgaagaagatgaactcaaaccatttgttgaaccagagctagacatctcagaccaaaaaagaatagatattatggtgggaatgggatattcacaagaagaaattcaagaatctcttagtaagatgaaatacgatgaaatcacagctacatatttgttattggggagaaaatcttcagagctggatgctagtgattccagttctagcagcaatctttcacttgctaaggttaggccgagcagtgatctcaacaacagtactggccagtctcctcaccacaaagtgcagagaagtgtttcttcaagccaaaagcaaagacgctacagtgaccatgctggaccagctattccttctgttgtggcgtatccgaaaaggagtcagaccagcactgcagatagtgacctcaaagaagatggaatttcctcccggaaatcaagtggcagtgctgttggaggaaagggaattgctccagccagtcccatgcttgggaatgcaagtaatcctaataaggcggatattcctgaacgcaagaaaagctccactgtccctagtagtaacacagcatctggtggaatgacacgacgaaatacttatgtttgcagtgagagaactacagctgatagacactcagtgattcagaatggcaaagaaaacagcactattcctgatcagagaactccagttgcttcaacacacagtatcagtagtgcagccaccccagatcgaatccgcttcccaagaggcactgccagtcgtagcactttccacggccagccccgggaacggcgaaccgcaacatataatggccctcctgcctctcccagcctgtcccatgaagccacaccattgtcccagactcgaagccgaggctccactaatctctttagtaaattaacttcaaaactcacaaggagaaacatgtcattcaggtttatcaaaaggcttccaactgaatatgagaggaacgggagatatgagggctcaagtcgcaatgtatctgctgagcaaaaagatgaaaacaaagaagcaaagcctcgatccctacgcttcacctggagcatgaaaaccactagttcaatggatcccggggacatgatgcgggaaatccgcaaagtgttggacgccaataactgcgactatgagcagagggagcgcttcttgctcttctgcgtccacggagatgggcacgcggagaacctcgtgcagtgggaaatggaagtgtgcaagctgccaagactgtctctgaacggggtccggtttaagcggatatcggggacatccatagccttcaaaaatattgcttccaaaattgccaatgagctaaagctgtaa

SEQ ID NO: 151659 - DNA, 2643 bp, Homo sapiens
  Payload ID: 9850
  Gene Symbol: MARK3
  Gene Name: MAP/microtubule affinity-regulating kinase 3
  ENST ID: ENST00000440884
  CDS Start-End: 639-2618
ggaagccgaggggcggccatcttggctccgtgaggctctgaggtgccggggtgcggcggcggcagcggcggccagcagggcggaggctgaggcagcaagctcgctagagagggagaagcagtcgggcgcaggcgcctcctccgcagcccgctccatggtcggcgcccacagcccgcggcggcctgtcttgcgctccacttccttcacatcctcctccgcctcctcgttttcaggcgccgccggcggcgctgtgtggaggcccgcgagctgaaattcgcggtgcgacgggagggagtggagaaggaggtgagggggcccaggatcgcggggcgccctgaggcaaggggacgccggcgggccgaagcgcagcccgccgcccgcaggctcggctccgccactgccgccctcccggtctcctcgcctcggccgccgaggcagggagagaatgagccccgggacccgccgggggacggcccgggccaggcccgggatctagacggccgtagggggaagggagccgccctccccacggcgccttttcggaactgccgtggactcgaggacgctggtcgccggcctcctagggctgtgctgttttgttttgaccctcgcattgtgcagaattaaagtgcagtaaaatgtccactaggaccccattgccaacggtgaatgaacgagacactgaaaaccacacgtcacatggagatgggcgtcaagaagttacctctcgtaccagccgctcaggagctcggtgtagaaactctatagcctcctgtgcagatgaacaacctcacatcggaaactacagactgttgaaaacaatcggcaaggggaattttgcaaaagtaaaattggcaagacatatccttacaggcagagaggttgcaataaaaataattgacaaaactcagttgaatccaacaagtctacaaaagctcttcagagaagtaagaataatgaagattttaaatcatcccaatatagtgaagttattcgaagtcattgaaactgaaaaaacactctacctaatcatggaatatgcaagtggaggtgaagtatttgactatttggttgcacatggcaggatgaaggaaaaagaagcaagatctaaatttagacagattgtgtctgcagttcaatactgccatcagaaacggatcgtacatcgagacctcaaggaactgagagagagagtattaagagggaaatacagaattcccttctacatgtctacagactgtgaaaaccttctcaaacgtttcctggtgctaaatccaattaaacgcggcactctagagcaaatcatgaaggacaggtggatcaatgcagggcatgaagaagatgaactcaaaccatttgttgaaccagagctagacatctcagaccaaaaaagaatagatattatggtgggaatgggatattcacaagaagaaattcaagaatctcttagtaagatgaaatacgatgaaatcacagctacatatttgttattggggagaaaatcttcagagctggatgctagtgattccagttctagcagcaatctttcacttgctaaggttaggccgagcagtgatctcaacaacagtactggccagtctcctcaccacaaagtgcagagaagtgtttcttcaagccaaaagcaaagacgctacagtgaccatgctggaccagctattccttctgttgtggcgtatccgaaaaggagtcagaccagcactgcagatagtgacctcaaagaagatggaatttcctcccggaaatcaagtggcagtgctgttggaggaaagggaattgctccagccagtcccatgcttgggaatgcaagtaatcctaataaggcggatattcctgaacgcaagaaaagctccactgtccctagtagtaacacagcatctggtggaatgacacgacgaaatacttatgtttgcagtgagagaactacagctgatagacactcagtgattcagaatggcaaagaaaacagcactattcctgatcagagaactccagttgcttcaacacacagtatcagtagtgcagccaccccagatcgaatccgcttcccaagaggcactgccagtcgtagcactttccacggccagccccgggaacggcgaaccgcaacatataatggccctcctgcctctcccagcctgtcccatgaagccacaccattgtcccagactcgaagccgaggctccactaatctctttagtaaattaacttcaaaactcacaaggagaaacatgtcattcaggtttatcaaaagtcgcaatgtatctgctgagcaaaaagatgaaaacaaagaagcaaagcctcgatccctacgcttcacctggagcatgaaaaccactagttcaatggatcccggggacatgatgcgggaaatccgcaaagtgttggacgccaataactgcgactatgagcagagggagcgcttcttgctcttctgcgtccacggagatgggcacgcggagaacctcgtgcagtgggaaatggaagtgtgcaagctgccaagactgtctctgaacggggtccggtttaagcggatatcggggacatccatagccttcaaaaatattgcttccaaaattgccaatgagctaaagctgtaacccagtgattatgatgtaaattaag

SEQ ID NO: 151660 - DNA, 2969 bp, Homo sapiens
  Payload ID: 9850
  Gene Symbol: MARK3
  Gene Name: MAP/microtubule affinity-regulating kinase 3
  ENST ID: ENST00000416682
  CDS Start-End: 578-2836
gcagcggcggccagcagggcggaggctgaggcagcaagctcgctagagagggagaagcagtcgggcgcaggcgcctcctccgcagcccgctccatggtcggcgcccacagcccgcggcggcctgtcttgcgctccacttccttcacatcctcctccgcctcctcgttttcaggcgccgccggcggcgctgtgtggaggcccgcgagctgaaattcgcggtgcgacgggagggagtggagaaggaggtgagggggcccaggatcgcggggcgccctgaggcaaggggacgccggcgggccgaagcgcagcccgccgcccgcaggctcggctccgccactgccgccctcccggtctcctcgcctcggccgccgaggcagggagagaatgagccccgggacccgccgggggacggcccgggccaggcccgggatctagacggccgtagggggaagggagccgccctccccacggcgccttttcggaactgccgtggactcgaggacgctggtcgccggcctcctagggctgtgctgttttgttttgaccctcgcattgtgcagaattaaagtgcagtaaaatgtccactaggaccccattgccaacggtgaatgaacgagacactgaaaaccacacgtcacatggagatgggcgtcaagaagttacctctcgtaccagccgctcaggagctcggtgtagaaactctatagcctcctgtgcagatgaacaacctcacatcggaaactacagactgttgaaaacaatcggcaaggggaattttgcaaaagtaaaattggcaagacatatccttacaggcagagaggttgcaataaaaataattgacaaaactcagttgaatccaacaagtctacaaaagctcttcagagaagtaagaataatgaagattttaaatcatcccaatatagtgaagttattcgaagtcattgaaactgaaaaaacactctacctaatcatggaatatgcaagtggaggtgaagtatttgactatttggttgcacatggcaggatgaaggaaaaagaagcaagatctaaatttagacagggttgtcaagctggacagactattaaagttcaagtctcctttgatttgcttagtctgatgtttacatttattgtgtctgcagttcaatactgccatcagaaacggatcgtacatcgagacctcaaggctgaaaatctattgttagatgccgatatgaacattaaaatagcagatttcggttttagcaatgaatttactgttggcggtaaactcgacacgttttgtggcagtcctccatacgcagcacctgagctcttccagggcaagaaatatgacgggccagaagtggatgtgtggagtctgggggtcattttatacacactagtcagtggctcacttccctttgatgggcaaaacctaaaggaactgagagagagagtattaagagggaaatacagaattcccttctacatgtctacagactgtgaaaaccttctcaaacgtttcctggtgctaaatccaattaaacgcggcactctagagcaaatcatgaaggacaggtggatcaatgcagggcatgaagaagatgaactcaaaccatttgttgaaccagagctagacatctcagaccaaaaaagaatagatattatggtgggaatgggatattcacaagaagaaattcaagaatctcttagtaagatgaaatacgatgaaatcacagctacatatttgttattggggagaaaatcttcagagctggatgctagtgattccagttctagcagcaatctttcacttgctaaggttaggccgagcagtgatctcaacaacagtactggccagtctcctcaccacaaagtgcagagaagtgtttcttcaagccaaaagcaaagacgctacagtgaccatgctggaccagctattccttctgttgtggcgtatccgaaaaggagtcagaccagcactgcagatagtgacctcaaagaagatggaatttcctcccggaaatcaagtggcagtgctgttggaggaaagggaattgctccagccagtcccatgcttgggaatgcaagtaatcctaataaggcggatattcctgaacgcaagaaaagctccactgtccctagtagtaacacagcatctggtggaatgacacgacgaaatacttatgtttgcagtgagagaactacagctgatagacactcagtgattcagaatggcaaagaaaacagcactattcctgatcagagaactccagttgcttcaacacacagtatcagtagtgcagccaccccagatcgaatccgcttcccaagaggcactgccagtcgtagcactttccacggccagccccgggaacggcgaaccgcaacatataatggccctcctgcctctcccagcctgtcccatgaagccacaccattgtcccagactcgaagccgaggctccactaatctctttagtaaattaacttcaaaactcacaaggagtcgcaatgtatctgctgagcaaaaagatgaaaacaaagaagcaaagcctcgatccctacgcttcacctggagcatgaaaaccactagttcaatggatcccggggacatgatgcgggaaatccgcaaagtgttggacgccaataactgcgactatgagcagagggagcgcttcttgctcttctgcgtccacggagatgggcacgcggagaacctcgtgcagtgggaaatggaagtgtgcaagctgccaagactgtctctgaacggggtccggtttaagcggatatcggggacatccatagccttcaaaaatattgcttccaaaattgccaatgagctaaagctgtaacccagtgattatgatgtaaattaagtagcaattaaagtgttttcctgaacactgatggaaatgtatagaataatatttaggcaataacgtctgcatcttctaaatcatgaaattaaagtctgaggacgagagc

SEQ ID NO: 151661 - DNA, 3371 bp, Homo sapiens
  Payload ID: 9850
  Gene Symbol: MARK3
  Gene Name: MAP/microtubule affinity-regulating kinase 3
  ENST ID: ENST00000429436
  CDS Start-End: 511-2772
caggcgcctcctccgcagcccgctccatggtcggcgcccacagcccgcggcggcctgtcttgcgctccacttccttcacatcctcctccgcctcctcgttttcaggcgccgccggcggcgctgtgtggaggcccgcgagctgaaattcgcggtgcgacgggagggagtggagaaggaggtgagggggcccaggatcgcggggcgccctgaggcaaggggacgccggcgggccgaagcgcagcccgccgcccgcaggctcggctccgccactgccgccctcccggtctcctcgcctcggccgccgaggcagggagagaatgagccccgggacccgccgggggacggcccgggccaggcccgggatctagacggccgtagggggaagggagccgccctccccacggcgccttttcggaactgccgtggactcgaggacgctggtcgccggcctcctagggctgtgctgttttgttttgaccctcgcattgtgcagaattaaagtgcagtaaaatgtccactaggaccccattgccaacggtgaatgaacgagacactgaaaaccacacgtcacatggagatgggcgtcaagaagttacctctcgtaccagccgctcaggagctcggtgtagaaactctatagcctcctgtgcagatgaacaacctcacatcggaaactacagactgttgaaaacaatcggcaaggggaattttgcaaaagtaaaattggcaagacatatccttacaggcagagaggttgcaataaaaataattgacaaaactcagttgaatccaacaagtctacaaaagctcttcagagaagtaagaataatgaagattttaaatcatcccaatatagtgaagttattcgaagtcattgaaactgaaaaaacactctacctaatcatggaatatgcaagtggaggtgaagtatttgactatttggttgcacatggcaggatgaaggaaaaagaagcaagatctaaatttagacagattgtgtctgcagttcaatactgccatcagaaacggatcgtacatcgagacctcaaggctgaaaatctattgttagatgccgatatgaacattaaaatagcagatttcggttttagcaatgaatttactgttggcggtaaactcgacacgttttgtggcagtcctccatacgcagcacctgagctcttccagggcaagaaatatgacgggccagaagtggatgtgtggagtctgggggtcattttatacacactagtcagtggctcacttccctttgatgggcaaaacctaaaggaactgagagagagagtattaagagggaaatacagaattcccttctacatgtctacagactgtgaaaaccttctcaaacgtttcctggtgctaaatccaattaaacgcggcactctagagcaaatcatgaaggacaggtggatcaatgcagggcatgaagaagatgaactcaaaccatttgttgaaccagagctagacatctcagaccaaaaaagaatagatattatggtgggaatgggatattcacaagaagaaattcaagaatctcttagtaagatgaaatacgatgaaatcacagctacatatttgttattggggagaaaatcttcagagctggatgctagtgattccagttctagcagcaatctttcacttgctaaggttaggccgagcagtgatctcaacaacagtactggccagtctcctcaccacaaagtgcagagaagtgtttcttcaagccaaaagcaaagacgctacagtgaccatgctggaccagctattccttctgttgtggcgtatccgaaaaggagtcagaccagcactgcagatagtgacctcaaagaagatggaatttcctcccggaaatcaagtggcagtgctgttggaggaaagggaattgctccagccagtcccatgcttgggaatgcaagtaatcctaataaggcggatattcctgaacgcaagaaaagctccactgtccctagtagtaacacagcatctggtggaatgacacgacgaaatacttatgtttgcagtgagagaactacagctgatagacactcagtgattcagaatggcaaagaaaacagcactattcctgatcagagaactccagttgcttcaacacacagtatcagtagtgcagccaccccagatcgaatccgcttcccaagaggcactgccagtcgtagcactttccacggccagccccgggaacggcgaaccgcaacatataatggccctcctgcctctcccagcctgtcccatgaagccacaccattgtcccagactcgaagccgaggctccactaatctctttagtaaattaacttcaaaactcacaaggagaaacatgtcattcaggtttatcaaaaggcttccaactgaatatgagaggaacgggagatatgagggctcaagtcgcaatgtatctgctgagcaaaaagatgaaaacaaagaagcaaagcctcgatccctacgcttcacctggagcatgaaaaccactagttcaatggatcccggggacatgatgcgggaaatccgcaaagtgttggacgccaataactgcgactatgagcagagggagcgcttcttgctcttctgcgtccacggagatgggcacgcggagaacctcgtgcagtgggaaatggaagtgtgcaagctgccaagactgtctctgaacggggtccggtttaagcggatatcggggacatccatagccttcaaaaatattgcttccaaaattgccaatgagctaaagctgtaacccagtgattatgatgtaaattaagtagcaattaaagtgttttcctgaacactgatggaaatgtatagaataatatttaggcaataacgtctgcatcttctaaatcatgaaattaaagtctgaggacgagagcacgcctgggagcgaaagctggccttttttctacgaatgcactacattaaagatgtgcaacctatgcgccccctgccctacttccgttaccctgagagtcggtgtgtggccccatctccatgtgcctcccgtctgggtgggtgtgagagtggacggtatgtgtgtgaagtggtgtatatggaagcatctccctacactggcagccagtcattactagtacctctgcgggagatcatccggtgctaaaacattacagttgccaaggaggaaaatactgaatgactgctaagaattaaccttaagaccagttcatagttaatacaggtttacagttcatgcctgtggttttgtgtttgttgttttgtgtttttttagtgcaaaaggtttaaatttatagttgtgaacattgcttgtgtgtgtttttctaagtagattcacaagataattaaaaattcactttttctcag

SEQ ID NO: 151662 - DNA, 1571 bp, Homo sapiens
  Payload ID: 9850
  Gene Symbol: MARK3
  Gene Name: MAP/microtubule affinity-regulating kinase 3
  ENST ID: ENST00000554627
  CDS Start-End: 1-1517
aagtggatgtgtggagtctgggggtcattttatacacactagtcagtggctcacttccctttgatgggcaaaacctaaaggaactgagagagagagtattaagagggaaatacagaattcccttctacatgtctacagactgtgaaaaccttctcaaacgtttcctggtgctaaatccaattaaacgcggcactctagagcaaatcatgaaggacaggtggatcaatgcagggcatgaagaagatgaactcaaaccatttgttgaaccagagctagacatctcagaccaaaaaagaatagatattatggtgggaatgggatattcacaagaagaaattcaagaatctcttagtaagatgaaatacgatgaaatcacagctacatatttgttattggggagaaaatcttcagaggttaggccgagcagtgatctcaacaacagtactggccagtctcctcaccacaaagtgcagagaagtgtttcttcaagccaaaagcaaagacgctacagtgaccatgctggaccagctattccttctgttgtggcgtatccgaaaaggagtcagaccagcactgcagatagtgacctcaaagaagatggaatttcctcccggaaatcaagtggcagtgctgttggaggaaagggaattgctccagccagtcccatgcttgggaatgcaagtaatcctaataaggcggatattcctgaacgcaagaaaagctccactgtccctagtagtaacacagcatctggtggaatgacacgacgaaatacttatgtttgcagtgagagaactacagctgatagacactcagtgattcagaatggcaaagaaaacagcactattcctgatcagagaactccagttgcttcaacacacagtatcagtagtgcagccaccccagatcgaatccgcttcccaagaggcactgccagtcgtagcactttccacggccagccccgggaacggcgaaccgcaacatataatggccctcctgcctctcccagcctgtcccatgaagccacaccattgtcccagactcgaagccgaggctccactaatctctttagtaaattaacttcaaaactcacaaggagaaacatgtcattcaggtttatcaaaaggcttccaactgaatatgagaggaacgggagatatgagggctcaagtcgcaatgtatctgctgagcaaaaagatgaaaacaaagaagcaaagcctcgatccctacgcttcacctggagcatgaaaaccactagttcaatggatcccggggacatgatgcgggaaatccgcaaagtgttggacgccaataactgcgactatgagcagagggagcgcttcttgctcttctgcgtccacggagatgggcacgcggagaacctcgtgcagtgggaaatggaagtgtgcaagctgccaagactgtctctgaacggggtccggtttaagcggatatcggggacatccatagccttcaaaaatattgcttccaaaattgccaatgagctaaagctgtaacccagtgattatgatgtaaattaagtagcaattaaagtgttttcctgaacactg

SEQ ID NO: 151663 - DNA, 2298 bp, Homo sapiens
  Payload ID: 9850
  Gene Symbol: MARK3
  Gene Name: MAP/microtubule affinity-regulating kinase 3
  Uniprot ID: P27448
  ENST ID: ENST00000553942
  CDS Start-End: 46-2280
gttttgttttgaccctcgcattgtgcagaattaaagtgcagtaaaatgtccactaggaccccattgccaacggtgaatgaacgagacactgaaaaccacacgtcacatggagatgggcgtcaagaagttacctctcgtaccagccgctcaggagctcggtgtagaaactctatagcctcctgtgcagatgaacaacctcacatcggaaactacagactgttgaaaacaatcggcaaggggaattttgcaaaagtaaaattggcaagacatatccttacaggcagagaggttgcaataaaaataattgacaaaactcagttgaatccaacaagtctacaaaagctcttcagagaagtaagaataatgaagattttaaatcatcccaatatagtgaagttattcgaagtcattgaaactgaaaaaacactctacctaatcatggaatatgcaagtggaggtgaagtatttgactatttggttgcacatggcaggatgaaggaaaaagaagcaagatctaaatttagacagattgtgtctgcagttcaatactgccatcagaaacggatcgtacatcgagacctcaaggctgaaaatctattgttagatgccgatatgaacattaaaatagcagatttcggttttagcaatgaatttactgttggcggtaaactcgacacgttttgtggcagtcctccatacgcagcacctgagctcttccagggcaagaaatatgacgggccagaagtggatgtgtggagtctgggggtcattttatacacactagtcagtggctcacttccctttgatgggcaaaacctaaaggaactgagagagagagtattaagagggaaatacagaattcccttctacatgtctacagactgtgaaaaccttctcaaacgtttcctggtgctaaatccaattaaacgcggcactctagagcaaatcatgaaggacaggtggatcaatgcagggcatgaagaagatgaactcaaaccatttgttgaaccagagctagacatctcagaccaaaaaagaatagatattatggtgggaatgggatattcacaagaagaaattcaagaatctcttagtaagatgaaatacgatgaaatcacagctacatatttgttattggggagaaaatcttcagagctggatgctagtgattccagttctagcagcaatctttcacttgctaaggttaggccgagcagtgatctcaacaacagtactggccagtctcctcaccacaaagtgcagagaagtgtttcttcaagccaaaagcaaagacgctacagtgaccatgctggaccagctattccttctgttgtggcgtatccgaaaaggagtcagaccagcactgcagatagtgacctcaaagaagatggaatttcctcccggaaatcaagtggcagtgctgttggaggaaagggaattgctccagccagtcccatgcttgggaatgcaagtaatcctaataaggcggatattcctgaacgcaagaaaagctccactgtccctagtagtaacacagcatctggtggaatgacacgacgaaatacttatgtttgcagtgagagaactacagctgatagacactcagtgattcagaatggcaaagaaaacagcactattcctgatcagagaactccagttgcttcaacacacagtatcagtagtgcagccaccccagatcgaatccgcttcccaagaggcactgccagtcgtagcactttccacggccagccccgggaacggcgaaccgcaacatataatggccctcctgcctctcccagcctgtcccatgaagccacaccattgtcccagactcgaagccgaggctccactaatctctttagtaaattaacttcaaaactcacaaggaggcttccaactgaatatgagaggaacgggagatatgagggctcaagtcgcaatgtatctgctgagcaaaaagatgaaaacaaagaagcaaagcctcgatccctacgcttcacctggagcatgaaaaccactagttcaatggatcccggggacatgatgcgggaaatccgcaaagtgttggacgccaataactgcgactatgagcagagggagcgcttcttgctcttctgcgtccacggagatgggcacgcggagaacctcgtgcagtgggaaatggaagtgtgcaagctgccaagactgtctctgaacggggtccggtttaagcggatatcggggacatccatagccttcaaaaatattgcttccaaaattgccaatgagctaaagctgtaacccagtgattatgatgta

SEQ ID NO: 151664 - DNA, 1051 bp, Homo sapiens
  Payload ID: 9850
  Gene Symbol: MARK3
  Gene Name: MAP/microtubule affinity-regulating kinase 3
  ENST ID: ENST00000556744
  CDS Start-End: 1-996
gctccagccagtcccatgcttgggaatgcaagtaatcctaataaggcggatattcctgaacgcaagaaaagctccactgtccctagtagtaacacagcatctggtggaatgacacgacgaaatacttatgtttgcagtgagagaactacagctgatagacactcagtgattcagaatggcaaagaaaacagcctgacagaaatgttcgcttacgcagctagccctgcctcagtttgtacatctacctgtcggctgagacatcagaagtcgatgtccatgtcagcctctgggcaccccaagatgatgttacctccaatagacagtgaaggagataacttcaaggctatcactattcctgatcagagaactccagttgcttcaacacacagtatcagtagtgcagccaccccagatcgaatccgcttcccaagaggcactgccagtcgtagcactttccacggccagccccgggaacggcgaaccgcaacatataatggccctcctgcctctcccagcctgtcccatgaagccacaccattgtcccagactcgaagccgaggctccactaatctctttagtaaattaacttcaaaactcacaaggaggcttccaactgaatatgagaggaacgggagatatgagggctcaagtcgcaatgtatctgctgagcaaaaagatgaaaacaaagaagcaaagcctcgatccctacgcttcacctggagcatgaaaaccactagttcaatggatcccggggacatgatgcgggaaatccgcaaagtgttggacgccaataactgcgactatgagcagagggagcgcttcttgctcttctgcgtccacggagatgggcacgcggagaacctcgtgcagtgggaaatggaagtgtgcaagctgccaagactgtctctgaacggggtccggtttaagcggatatcggggacatccatagccttcaaaaatattgcttccaaaattgccaatgagctaaagctgtaacccagtgattatgatgtaaattaagtagcaattaaagtgttttcctgaacactga

SEQ ID NO: 151665 - DNA, 523 bp, Homo sapiens
  Payload ID: 9850
  Gene Symbol: MARK3
  Gene Name: MAP/microtubule affinity-regulating kinase 3
  ENST ID: ENST00000561225
  CDS Start-End: 136-523
agaagtctgccgtgtcccgctgttcgcgggcgggtctgcgaagtacatcgattatgccggcagtctagtcggttaataaagcccaggagttgcagcgttacggatcggtgctttgagaggccaggttgccgcgcaatggattgtgcaaaccacacgtcacatggagatgggcgtcaagaagttacctctcgtaccagccgctcaggagctcggtgtagaaactctatagcctcctgtgcagatgaacaacctcacatcggaaactacagactgttgaaaacaatcggcaaggggaattttgcaaaagtaaaattggcaagacatatccttacaggcagagaggttgcaataaaaataattgacaaaactcagttgaatccaacaagtctacaaaagctcttcagagaagtaagaataatgaagattttaaatcatcccaatatagtgaagttattcgaagtcattgaaactgaaaaaacactctacctaatcatggaatatgcaagtggaggtaagaacattt

SEQ ID NO: 151666 - DNA, 724 bp, Homo sapiens
  Payload ID: 9850
  Gene Symbol: MARK3
  Gene Name: MAP/microtubule affinity-regulating kinase 3
  ENST ID: ENST00000561314
  CDS Start-End: 1-669
gctggaccagctattccttctgttgtggcgtatccgaaaaggagtcagaccagcactgcagatagtgacctcaaagaagatggaatttcctcccggaaatcaagtggcagtgctgttggaggaaagggaattgctccagccagtcccatgcttgggaatgcaagtaatcctaataaggcggatattcctgaacgcaagaaaagctccactgtccctagtagtaacacagcatctggtggaatgacacgacgaaatacttatgtttgcagtgagagaactacagctgatagacactcagtgattcagaatggcaaagaaaacagtcgcaatgtatctgctgagcaaaaagatgaaaacaaagaagcaaagcctcgatccctacgcttcacctggagcatgaaaaccactagttcaatggatcccggggacatgatgcgggaaatccgcaaagtgttggacgccaataactgcgactatgagcagagggagcgcttcttgctcttctgcgtccacggagatgggcacgcggagaacctcgtgcagtgggaaatggaagtgtgcaagctgccaagactgtctctgaacggggtccggtttaagcggatatcggggacatccatagccttcaaaaatattgcttccaaaattgccaatgagctaaagctgtaacccagtgattatgatgtaaattaagtagcaattaaagtgttttcctgaacactga

SEQ ID NO: 151667 - DNA, 579 bp, Homo sapiens
  Payload ID: 9850
  Gene Symbol: MARK3
  Gene Name: MAP/microtubule affinity-regulating kinase 3
  ENST ID: ENST00000560417
  CDS Start-End: 44-579
tttgttttgaccctcgcattgtgcagaattaaagtgcagtaaaatgtccactaggaccccattgccaacggtgaatgaacgagacactgaaaaccacacgtcacatggagatgggcgtcaagaagttacctctcgtaccagccgctcaggagctcggtgtagaaactctatagcctcctgtgcagatgaacaacctcacatcggaaactacagactgttgaaaacaatcggcaaggggaattttgcaaaagtaaaattggcaagacatatccttacaggcagagagctcttcagagaagtaagaataatgaagattttaaatcatcccaatatagtgaagttattcgaagtcattgaaactgaaaaaacactctacctaatcatggaatatgcaagtggaggtgaagtatttgactatttggttgcacatggcaggatgaaggaaaaagaagcaagatctaaatttagacagattgtgtctgcagttcaatactgccatcagaaacggatcgtacatcgagacctcaaggctgaaaatctattgttagatgccgatatgaacattaaaatagcagattt

SEQ ID NO: 151668 - DNA, 3573 bp, Homo sapiens
  Payload ID: 9851
  Gene Symbol: MARK4
  Gene Name: MAP/microtubule affinity-regulating kinase 4
  Uniprot ID: Q96L34
  ENST ID: ENST00000262891
  CDS Start-End: 332-2590
ctgacgtcccttcctccctccccagcccctccaccgcctccctccgccgccgcttgggccggctccgcgccccctccgcggcccccgcccgcccgcctgcccgccgcccccatggcgcccggggtccccgctgcacggggccactaggaccctcggcgtcccttcccctcccccgccctgccccctctcccgccgcgcggacccgggcgttctcggcgcccagcttttgagctcgcgtccccaggccggcggggggggaggggaagagaggggaccctgggacccccgccccccccacccggccgcccctgccccccgggacccggagaagatgtcttcgcggacggtgctggccccgggcaacgatcggaactcggacacgcatggcaccttgggcagtggccgctcctcggacaaaggcccgtcctggtccagccgctcactgggtgcccgttgccggaactccatcgcctcctgtcccgaggagcagccccacgtgggcaactaccgcctgctgaggaccattgggaagggcaactttgccaaagtcaagctggctcggcacatcctcactggtcgggaggttgccatcaagattatcgacaaaacccagctgaatcccagcagcctgcagaagctgttccgagaagtccgcatcatgaagggcctaaaccaccccaacatcgtgaagctctttgaggtgattgagactgagaagacgctgtacctggtgatggagtacgcaagtgctggagaagtgtttgactacctcgtgtcgcatggccgcatgaaggagaaggaagctcgagccaagttccgacagattgtttcggctgtgcactattgtcaccagaaaaatattgtacacagggacctgaaggctgagaacctcttgctggatgccgaggccaacatcaagattgctgactttggcttcagcaacgagttcacgctgggatcgaagctggacacgttctgcgggagccccccatatgccgccccggagctgtttcagggcaagaagtacgacgggccggaggtggacatctggagcctgggagtcatcctgtacaccctcgtcagcggctccctgcccttcgacgggcacaacctcaaggagctgcgggagcgagtactcagagggaagtaccgggtccctttctacatgtcaacagactgtgagagcatcctgcggagatttttggtgctgaacccagctaaacgctgtactctcgagcaaatcatgaaagacaaatggatcaacatcggctatgagggtgaggagttgaagccatacacagagcccgaggaggacttcggggacaccaagagaattgaggtgatggtgggtatgggctacacacgggaagaaatcaaagagtccttgaccagccagaagtacaacgaagtgaccgccacctacctcctgctgggcaggaagactgaggagggtggggaccggggcgccccagggctggccctggcacgggtgcgggcgcccagcgacaccaccaacggaacaagttccagcaaaggcaccagccacagcaaagggcagcggagttcctcttccacctaccaccgccagcgcaggcatagcgatttctgtggcccatcccctgcacccctgcaccccaaacgcagcccgacgagcacgggggaggcggagctgaaggaggagcggctgccaggccggaaggcgagctgcagcaccgcggggagtgggagtcgagggctgcccccctccagccccatggtcagcagcgcccacaaccccaacaaggcagagatcccagagcggcggaaggacagcacgagcacccccaacaacctccctcctagcatgatgacccgcagaaacacctacgtttgcacagaacgcccgggggctgagcgcccgtcactgttgccaaatgggaaagaaaacagctcaggcaccccacgggtgccccctgcctccccctccagtcacagcctggcacccccatcaggggagcggagccgcctggcacgtggttccaccatccgcagcaccttccatggtggccaggtccgggaccggcgggcagggggtgggggtggtgggggtgtgcagaatgggccccctgcctctcccacactggcccatgaggctgcacccctgcccgccgggcggccccgccccaccaccaacctcttcaccaagctgacctccaaactgacccgaagggtcgcagacgaacctgagagaatcgggggacctgaggtcacaagttgccatctaccttgggatcaaacggaaaccgccccccggctgctccgattcccctggagtgtgaagctgaccagctcgcgccctcctgaggccctgatggcagctctgcgccaggccacagcagccgcccgctgccgctgccgccagccacagccgttcctgctggcctgcctgcacgggggtgcgggcgggcccgagcccctgtcccacttcgaagtggaggtctgccagctgccccggccaggcttgcggggagttctcttccgccgtgtggcgggcaccgccctggccttccgcaccctcgtcacccgcatctccaacgacctcgagctctgagccaccacggtcccagggcccttactcttcctctcccttgtcgccttcacttctacaggaggggaaggggccagggaggggattctccctttatcatcacctcagtttccctgaattatatttgggggcaaagattgtcccctctgctgttctctggggccgctcagcacagaagaaggatgagggggctcagcggggggagctggcaccttcctggagcctccagccagtcctgtcctccctcgccctaccaagagggcacctgaggagactttggggacagggcaggggcagggagggaaactgaggaaatcttccattcctcccaacagctcaaaattaggccttgggcaggggcagggagagctgctgagcctaaagactggagaatctgggggactgggagtgggggtcagagaggcagattccttcccctcccgtcccctcacgctcaaacccccacttcctgccccaggctggcgcggggcactttgtacaaatccttgtaaataccccacaccctcccctctgcaaaggtctcttgaggagctgccgctgtcacctacggtttttaagttattacaccccgaccctcctcctgtcagccccctcacctgcagcctgttgcccaataaatttaagagagtccccccctccccaatgctgaccctaggattttccttccctgccctcacctgcaaatgagttaaagaagaggcgtgggaatccaggcagtggtttttcctttcggagcctcggttttctcatctgcagaatgggagcggtgggggtgggaaggtaaggatggtcgtggaagaaggcaggatggaactcggcctcatccccgaggccccagttcctatatcgggccccccattcatccactcacactcccagccaccatgttacactggactctaagccacttcttactccagtagtaaatttattcaataaacaatcattgacccatgcctactcca

SEQ ID NO: 151669 - DNA, 5209 bp, Homo sapiens
  Payload ID: 9851
  Gene Symbol: MARK4
  Gene Name: MAP/microtubule affinity-regulating kinase 4
  Uniprot ID: Q96L34
  ENST ID: ENST00000300843
  CDS Start-End: 298-2364
cgcctccctccgccgccgcttgggccggctccgcgccccctccgcggcccccgcccgcccgcctgcccgccgcccccatggcgcccggggtccccgctgcacggggccactaggaccctcggcgtcccttcccctcccccgccctgccccctctcccgccgcgcggacccgggcgttctcggcgcccagcttttgagctcgcgtccccaggccggcggggggggaggggaagagaggggaccctgggacccccgccccccccacccggccgcccctgccccccgggacccggagaagatgtcttcgcggacggtgctggccccgggcaacgatcggaactcggacacgcatggcaccttgggcagtggccgctcctcggacaaaggcccgtcctggtccagccgctcactgggtgcccgttgccggaactccatcgcctcctgtcccgaggagcagccccacgtgggcaactaccgcctgctgaggaccattgggaagggcaactttgccaaagtcaagctggctcggcacatcctcactggtcgggaggttgccatcaagattatcgacaaaacccagctgaatcccagcagcctgcagaagctgttccgagaagtccgcatcatgaagggcctaaaccaccccaacatcgtgaagctctttgaggtgattgagactgagaagacgctgtacctggtgatggagtacgcaagtgctggagaagtgtttgactacctcgtgtcgcatggccgcatgaaggagaaggaagctcgagccaagttccgacagattgtttcggctgtgcactattgtcaccagaaaaatattgtacacagggacctgaaggctgagaacctcttgctggatgccgaggccaacatcaagattgctgactttggcttcagcaacgagttcacgctgggatcgaagctggacacgttctgcgggagccccccatatgccgccccggagctgtttcagggcaagaagtacgacgggccggaggtggacatctggagcctgggagtcatcctgtacaccctcgtcagcggctccctgcccttcgacgggcacaacctcaaggagctgcgggagcgagtactcagagggaagtaccgggtccctttctacatgtcaacagactgtgagagcatcctgcggagatttttggtgctgaacccagctaaacgctgtactctcgagcaaatcatgaaagacaaatggatcaacatcggctatgagggtgaggagttgaagccatacacagagcccgaggaggacttcggggacaccaagagaattgaggtgatggtgggtatgggctacacacgggaagaaatcaaagagtccttgaccagccagaagtacaacgaagtgaccgccacctacctcctgctgggcaggaagactgaggagggtggggaccggggcgccccagggctggccctggcacgggtgcgggcgcccagcgacaccaccaacggaacaagttccagcaaaggcaccagccacagcaaagggcagcggagttcctcttccacctaccaccgccagcgcaggcatagcgatttctgtggcccatcccctgcacccctgcaccccaaacgcagcccgacgagcacgggggaggcggagctgaaggaggagcggctgccaggccggaaggcgagctgcagcaccgcggggagtgggagtcgagggctgcccccctccagccccatggtcagcagcgcccacaaccccaacaaggcagagatcccagagcggcggaaggacagcacgagcacccccaacaacctccctcctagcatgatgacccgcagaaacacctacgtttgcacagaacgcccgggggctgagcgcccgtcactgttgccaaatgggaaagaaaacagctcaggcaccccacgggtgccccctgcctccccctccagtcacagcctggcacccccatcaggggagcggagccgcctggcacgtggttccaccatccgcagcaccttccatggtggccaggtccgggaccggcgggcagggggtgggggtggtgggggtgtgcagaatgggccccctgcctctcccacactggcccatgaggctgcacccctgcccgccgggcggccccgccccaccaccaacctcttcaccaagctgacctccaaactgacccgaagggttaccctcgatccctctaaacggcagaactctaaccgctgtgtttcgggcgcctctctgccccagggatccaagatcaggtcgcagacgaacctgagagaatcgggggacctgaggtcacaagttgccatctaccttgggatcaaacggaaaccgccccccggctgctccgattcccctggagtgtgaagctgaccagctcgcgccctcctgaggccctgatggcagctctgcgccaggccacagcagccgcccgctgccgctgccgccagccacagccgttcctgctggcctgcctgcacgggggtgcgggcgggcccgagcccctgtcccacttcgaagtggaggtctgccagctgccccggccaggcttgcggggagttctcttccgccgtgtggcgggcaccgccctggccttccgcaccctcgtcacccgcatctccaacgacctcgagctctgagccaccacggtcccagggcccttactcttcctctcccttgtcgccttcacttctacaggaggggaaggggccagggaggggattctccctttatcatcacctcagtttccctgaattatatttgggggcaaagattgtcccctctgctgttctctggggccgctcagcacagaagaaggatgagggggctcagcggggggagctggcaccttcctggagcctccagccagtcctgtcctccctcgccctaccaagagggcacctgaggagactttggggacagggcaggggcagggagggaaactgaggaaatcttccattcctcccaacagctcaaaattaggccttgggcaggggcagggagagctgctgagcctaaagactggagaatctgggggactgggagtgggggtcagagaggcagattccttcccctcccgtcccctcacgctcaaacccccacttcctgccccaggctggcgcggggcactttgtacaaatccttgtaaataccccacaccctcccctctgcaaaggtctcttgaggagctgccgctgtcacctacggtttttaagttattacaccccgaccctcctcctgtcagccccctcacctgcagcctgttgcccaataaatttaagagagtccccccctccccaatgctgaccctaggattttccttccctgccctcacctgcaaatgagttaaagaagaggcgtgggaatccaggcagtggtttttcctttcggagcctcggttttctcatctgcagaatgggagcggtgggggtgggaaggtaaggatggtcgtggaagaaggcaggatggaactcggcctcatccccgaggccccagttcctatatcgggccccccattcatccactcacactcccagccaccatgttacactggactctaagccacttcttactccagtagtaaatttattcaataaacaatcattgacccatgcctactccatgccaggcccagtgctggacacagagacatgaagctctgtctgtgggagacagggattctgacacagacaccggacaaaccattgtcttggggagcccagaagagaaagtgggcagggtggggtcattggggaagatgctctagaggaattaatgctggaatggggtgttgaaggatgagtaggagttagttaggcattgagtttgccctgggcaaaagcccagaagtgggagtatgtggtatatcttcagagaactgggtaatttcagtgtggctgctgtgttgggcatggatggagaatcagcaagagaaatgctgtattaggactaataatccatctacgctgcttaagcaaaaaggtatttgttggtttatgttacttaatagtccaggggcacctggcttcaggtaggtttgatccaggcatcaggccattgcatctattttttcagtgtaagttgaattctagtaatttttatcaagtaagggctcctttcctggtggcacagatgacttcagcagttagaagtttctatccctccagctttctgcagcagaaagaccctcattgtcagtttcccagcaaaagtcccagggcagactctcattggcccaaatgggccatgtgattttctctaaaccaatcactgtgactctagagtggccagactcagagctgcacttagtaggggttcctcaaaggaaggtcaagtgtcatgagcaggagaaaaggcatgggagctggacagattatagtggttgaagtctgtgcagtacagaagggcggagcttattcacacagcacctttggggccaaaatgaataagctggactttctccccatggcactggggaaccatggaagttcagggaacttcagggaagaggcttggtcaattcctgagagcatcctctgtgctggggacacagtggtaatcaagacagccccaacactgccctcatagagctcacagtccaatggaggaggcagatgtgtcctcaggcagcgactgggcagggctggtataggggagtccagaggtgatgcctgcctcagccagggagggcttcctggaggagaaggagccagctagacatggataggagtgcgttttaggcacagcaaatggcacatacaagggccagggagcaagagagaggacaggtcctcaacaaatggcatgtgactttgtaagtgtagaattgctgtgaggtatggggctaggggcgtcagtagggccttgaaggttatggacaggggcctgggctttcttccaagggcactgggggagccatggcaaggttgtaggtagggtagagatgggcgggtttgtgctatgtgcagggtggaagggagggaagttgacaggtcagaagatcaggaaagaggtcggggctggacagatggggagagcgcagatagatttaagagagtcctgtgaggcaaagtgggcaggacctggtaacaggtgtctggactgtggctttggctggctcagaaggtccccactggcgtgtgtggtctatgtagcctctgggtgtggagctgggatcttcaactggggacagtacagtaaagaacatcacagc

SEQ ID NO: 151670 - DNA, 553 bp, Homo sapiens
  Payload ID: 9851
  Gene Symbol: MARK4
  Gene Name: MAP/microtubule affinity-regulating kinase 4
  ENST ID: ENST00000587566
  CDS Start-End: 367-553
aaggtggtggggggtcgccagcaggttccctctccccggccccagctctggacgctcaccccagtgcaacgccctgagtgacggaaagagcatggcaccttgggcagtggccgctcctcggacaaaggcccgtcctggtccagccgctcactgggtgcccgttgccggaactccatcgcctcctgtcccgaggagcagccccacgtgggcaactaccgcctgctgaggaccattgggaagggcaactttgccaaagtcaagctggctcggcacatcctcactggtcgggaggttgccatcaagattatcgacaaaacccagctgaatcccagcagcctgcagaagctgttccgagaagtccgcatcatgaagggcctaaaccaccccaacatcgtgaagctctttgaggtgattgagactgagaagacgctgtacctggtgatggagtacgcaagtgctggagaagtgtttgactacctcgtgtcgcatggccgcatgaaggagaaggaagctcgagccaagttccgacagattgtttcggctgtgcactatt

SEQ ID NO: 151671 - DNA, 594 bp, Homo sapiens
  Payload ID: 9851
  Gene Symbol: MARK4
  Gene Name: MAP/microtubule affinity-regulating kinase 4
  ENST ID: ENST00000590909
  CDS Start-End: 373-594
gaggggccggtagccaggcctcaagttaagtgcactagcccacgggttccacggaaggtgggattggatagctcatgctccatctcccccgcccagcatggcaccttgggcagtggccgctcctcggacaaaggcccgtcctggtccagccgctcactgggtgcccgttgccggaactccatcgcctcctgtcccgaggagcagccccacgtgggcaactaccgcctgctgaggaccattgggaagggcaactttgccaaagtcaagctggctcggcacatcctcactggtcgggaggttgccatcaagattatcgacaaaacccagctgaatcccagcagcctgcagaagctgttccgagaagtccgcatcatgaagggcctaaaccaccccaacatcgtgaagctctttgaggtgattgagactgagaagacgctgtacctggtgatggagtacgcaagtgctggagaagtgtttgactacctcgtgtcgcatggccgcatgaaggagaaggaagctcgagccaagttccgacagattgtttcggctgtgcactattgtcaccagaaaaatattgtacacagggacctgaag

SEQ ID NO: 151672 - DNA, 683 bp, Homo sapiens
  Payload ID: 9851
  Gene Symbol: MARK4
  Gene Name: MAP/microtubule affinity-regulating kinase 4
  ENST ID: ENST00000592762
  CDS Start-End: 203-496
gctgcacggggccactaggaccctcggcgtcccttcccctcccccgccctgccccctctcccgccgcgcggacccgggcgttctcggcgcccagcttttgagctcgcgtccccaggccggcggggggggaggggaagagaggggaccctgggacccccgccccccccacccggccgcccctgccccccgggacccggagaagatgtcttcgcggacggtgctggccccgggcaacgatcggaactcggacacggctgagaacctcttgctggatgccgaggccaacatcaagattgctgactttggcttcagcaacgagttcacgctgggatcgaagctggacacgttctgcgggagccccccatatgccgccccggagctgtttcagggcaagaagtacgacgggccggaggtggacatctggagcctgggagtcatcctgtacaccctcgtcagcggctccctgcccttcgacgggcacaacctcaagaggtgatggtgggtatgggctacacacgggaagaaatcaaagagtccttgaccagccagaagtacaacgaagtgaccgccacctacctcctgctgggcaggaagactgaggagggtggggaccggggcgccccagggctggccctggcacgggtgcgggcgcccagcgacaccaccaacggaacaagttccag

SEQ ID NO: 151673 - DNA, 789 bp, Homo sapiens
  Payload ID: 9851
  Gene Symbol: MARK4
  Gene Name: MAP/microtubule affinity-regulating kinase 4
  ENST ID: ENST00000592207
  CDS Start-End: 1-146
agaacctcttgctggatgccgaggccaacatcaagattgctgactttggcttcagcaacgagttcacgctgggatcgaagctggacacgttctgcgggagccccccatatgccgccccggagctgtttcagggcaagaaactgtgagagcatcctgcggagatttttggtgctgaacccagctaaacgctgtactctcgagcaaatcatgaaagacaaatggatcaacatcggctatgagggtgaggagttgaagccatacacagagcccgaggaggacttcggggacaccaagagaattgaggtgatggtgggtatgggctacacacgggaagaaatcaaagagtccttgaccagccagaagtacaacgaagtgaccgccacctacctcctgctgggcaggaagactgaggagggtggggaccggggcgccccagggctggccctggcacgggtgcgggcgcccagcgacaccaccaacggaacaagttccagcaaaggcaccagccacagcaaagggcagcggagttcctcttccacctaccaccgccagcgcaggcatagcgatttctgtggcccatcccctgcacccctgcaccccaaacgcagcccgacgagcacgggggaggcggagctgaaggaggagcggctgccaggccggaaggcgagctgcagcaccgcggggagtgggagtcgagggctgcccccctccagccccatggtcagcagcgcccacaaccccaacaaggcagagatcccagagcggcggaaggacagcacgagcaccccc

SEQ ID NO: 151674 - DNA, 2105 bp, Homo sapiens
  Payload ID: 9851
  Gene Symbol: MARK4
  Gene Name: MAP/microtubule affinity-regulating kinase 4
  ENST ID: ENST00000620044
  CDS Start-End: 203-496
gctgcacggggccactaggaccctcggcgtcccttcccctcccccgccctgccccctctcccgccgcgcggacccgggcgttctcggcgcccagcttttgagctcgcgtccccaggccggcggggggggaggggaagagaggggaccctgggacccccgccccccccacccggccgcccctgccccccgggacccggagaagatgtcttcgcggacggtgctggccccgggcaacgatcggaactcggacacggctgagaacctcttgctggatgccgaggccaacatcaagattgctgactttggcttcagcaacgagttcacgctgggatcgaagctggacacgttctgcgggagccccccatatgccgccccggagctgtttcagggcaagaagtacgacgggccggaggtggacatctggagcctgggagtcatcctgtacaccctcgtcagcggctccctgcccttcgacgggcacaacctcaagaggtgatggtgggtatgggctacacacgggaagaaatcaaagagtccttgaccagccagaagtacaacgaagtgaccgccacctacctcctgctgggcaggaagactgaggagggtggggaccggggcgccccagggctggccctggcacgggtgcgggcgcccagcgacaccaccaacggaacaagttccaccctgcccgccgggcggccccgccccaccaccaacctcttcaccaagctgacctccaaactgacccgaagggtcgcagacgaacctgagagaatcgggggacctgaggtcacaagttgccatctaccttgggatcaaacggaaaccgccccccggctgctccgattcccctggagtgtgaagctgaccagctcgcgccctcctgaggccctgatggcagctctgcgccaggccacagcagccgcccgctgccgctgccgccagccacagccgttcctgctggcctgcctgcacgggggtgcgggcgggcccgagcccctgtcccacttcgaagtggaggtctgccagctgccccggccaggcttgcggggagttctcttccgccgtgtggcgggcaccgccctggccttccgcaccctcgtcacccgcatctccaacgacctcgagctctgagccaccacggtcccagggcccttactcttcctctcccttgtcgccttcacttctacaggaggggaaggggccagggaggggattctccctttatcatcacctcagtttccctgaattatatttgggggcaaagattgtcccctctgctgttctctggggccgctcagcacagaagaaggatgagggggctcagcggggggagctggcaccttcctggagcctccagccagtcctgtcctccctcgccctaccaagagggcacctgaggagactttggggacagggcaggggcagggagggaaactgaggaaatcttccattcctcccaacagctcaaaattaggccttgggcaggggcagggagagctgctgagcctaaagactggagaatctgggggactgggagtgggggtcagagaggcagattccttcccctcccgtcccctcacgctcaaacccccacttcctgccccaggctggcgcggggcactttgtacaaatccttgtaaataccccacaccctcccctctgcaaaggtctcttgaggagctgccgctgtcacctacggtttttaagttattacaccccgaccctcctcctgtcagccccctcacctgcagcctgttgcccaataaatttaagagagtccccccctccccaatgctgaccctaggattttccttccctgccctcacctgcaaatgagttaaagaagaggcgtgggaatccaggcagtggtttttcctttcggagcctcggttttctcatctgcagaatgggagcggtgggggtgggaaggtaaggatggtcgtggaagaaggcaggatggaactcggcctcatccccgaggccccagttcctatatcgggccccccattcatccactcacactcccagccaccatgttacactggactctaagccacttcttactccagtagtaaatttattcaataaacaatcattgaccc

SEQ ID NO: 151675 - DNA, 1147 bp, Homo sapiens
  Payload ID: 9851
  Gene Symbol: MARK4
  Gene Name: MAP/microtubule affinity-regulating kinase 4
  ENST ID: ENST00000622871
  CDS Start-End: 249-488
ctccctcctagcatgatgacccgcagggttaccctcgatccctctaaacggcagaactctaaccgctgtgtttcgggcgcctctctgccccagggatccaagatcaggtcgcagacgaacctgagagaatcgggggacctgaggtcacaagttgccatctaccttgggatcaaacggaaaccgccccccggctgctccgattcccctggagtgtgaagctgaccagctcgcgccctcctgaggccctgatggcagctctgcgccaggccacagcagccgcccgctgccgctgccgccagccacagccgttcctgctggcctgcctgcacgggggtgcgggcgggcccgagcccctgtcccacttcgaagtggaggtctgccagctgccccggccaggcttgcggggagttctcttccgccgtgtggcgggcaccgccctggccttccgcaccctcgtcacccgcatctccaacgacctcgagctctgagccaccacggtcccagggcccttactcttcctctcccttgtcgccttcacttctacaggaggggaaggggccagggaggggattctccctttatcatcacctcagtttccctgaattatatttgggggcaaagattgtcccctctgctgttctctggggccgctcagcacagaagaaggatgagggggctcagcggggggagctggcaccttcctggagcctccagccagtcctgtcctccctcgccctaccaagagggcacctgaggagactttggggacagggcaggggcagggagggaaactgaggaaatcttccattcctcccaacagctcaaaattaggccttgggcaggggcagggagagctgctgagcctaaagactggagaatctgggggactgggagtgggggtcagagaggcagattccttcccctcccgtcccctcacgctcaaacccccacttcctgccccaggctggcgcggggcactttgtacaaatccttgtaaataccccacaccctcccctctgcaaaggtctcttgaggagctgccgctgtcacctacggtttttaagttattacaccccgaccctcctcctgtcagccccctcacctgcagcctgttgcccaataaatttaagagagtccccccctcccc

SEQ ID NO: 151676 - DNA, 1586 bp, Homo sapiens
  Payload ID: 9852
  Gene Symbol: MBIP
  Gene Name: MAP3K12 binding inhibitory protein 1
  Uniprot ID: Q9NS73
  ENST ID: ENST00000318473
  CDS Start-End: 40-1071
cttggtggtggtggtggtggggcggcctgagaagatatcatggctgctgccacggagcttaatcgcccgagcagcggtgacaggaacctggagcgaagatgcagacccaacctctcccgagaggtgctctacgaaatctttcgctccctacacaccctggttggacagcttgacctcagagatgatgtggtgaaaattacaatcgattggaacaagctccagagcctctcggcattccagcctgcattgctctttagtgcacttgaacaacacattttatatttacagccttttttagcaaaacttcagtctccgattaaagaggagaatacaactgctgttgaagagataggaagaacagaaatggggaacaaaaatgaagtaaatgacaaattttccattggcgacctacaagaggaagaaaagcacaaagaaagtgatttaagagatgtgaaaaagacacagatccattttgatccagaagtagttcagataaaggctggaaaagcagaaattgacagacgaatatctgcatttattgaaagaaagcaagctgaaatcaatgaaaacaacgtcagggaattttgcaatgttattgattgtaatcaagaaaatagttgtgcaagaactgatgcgatttttaccccttaccccggatttaaaagtcacgtaaaagtttctagagttgtgaatacatacggaccacagactagacctgaaggaattccagggtcaggtcataaacctaacagcatgcttcgagactgtggtaatcaggctgtagaagaacgactacaaaatattgaggcccacttgcggttacagacaggtggtccagtgccaagagacatttatcagagaattaaaaaacttgaggataaaatccttgaattggaaggcatctctcctgaatattttcagtctgtaagcttttctggaaaaagaagaaaagttcaaccacctcaaaactattcactggctgaacttgatgagaaaattagtgccctcaaacaagccctcctcagaaaatcaagagaagcagaatccatggcaacccaccaccttccatgaaaaactcctctcatccttgtcattttacttttttgtatacatatgtgtaacttacactgttattaattcaacggatatatatttatcaatgtagacttctctgtgaagtcaaggtttattttcacatgagtccagcttgcagcaagtaatcttcaaatattccagtaagttttgaaataatgaatgcattgaaaatagcattgttggaatttattcccttctgttttaaaggaggtattttggaaattgaaaaacttaatttacaagtgctggtacatcttttttcttttgtggaccacaggaaggaagatttattttgatattgatactttaaaaggactttatatttgtaacattgatgttaaccagtttattagtttaaatcagtactttgcatataataagcattcaacaaaaatttattgactgaaatgaattttaaatgcatgtgtatgaacttgtttttcttaatctttaagatgtcagtattcatgtaaataaacaatagatccagc

SEQ ID NO: 151677 - DNA, 1449 bp, Homo sapiens
  Payload ID: 9852
  Gene Symbol: MBIP
  Gene Name: MAP3K12 binding inhibitory protein 1
  Uniprot ID: Q9NS73
  ENST ID: ENST00000359527
  CDS Start-End: 20-868
ggcggcctgagaagatatcatggctgctgccacggagcttaatcgcccgagcagcggtgacaggaacctggagcgaagatgcagacccaacctctcccgagaggtgctctacgaaatctttcgctccctacacaccctggttggacagcttgacctcagagatgatgtggtgaaaattacaatcgattggaacaagctccagagcctctcggcattccagcctgcattgctctttagtgcacttgaacaacacattttatatttacagccttttttagcaaaacttcagtctccgattaaagaggagaatacaactgctgttgaagagataggaagaacagaaatggggaacaaaaatgaagtaaatgacaaattttccattggcgacctacaagaggaagaaaagcacaaagaaagtgatttaagagatgtgaaaaagacacagatccattttgatccagaagtagttcagataaaggctggaaaagcagaaattgacagacgaatatctgcatttattgaaagaaagcaagctgaaatcaatgaaaacaacgtcagggaattttgcaatgttattgattgtaatcaagaaaatagttgtgcaagaactgatgcgatttttaccccttaccccggatttaaaagtcacgtaaaagtttctagagttgtgaatacatacggaccacagactagacctgaaggaattccagggtcaggtcataaacctaacagcatgcttcgagactgtggtaatcaggctgtagaagaacgactacaaaatattgaggcccacttgcggttacagacagagcttttctggaaaaagaagaaaagttcaaccacctcaacagaactattcactggctgaacttgatgagaaaattagtgccctcaaacaagccctcctcagaaaatcaagagaagcagaatccatggcaacccaccaccttccatgaaaaactcctctcatccttgtcattttacttttttgtatacatatgtgtaacttacactgttattaattcaacggatatatatttatcaatgtagacttctctgtgaagtcaaggtttattttcacatgagtccagcttgcagcaagtaatcttcaaatattccagtaagttttgaaataatgaatgcattgaaaatagcattgttggaatttattcccttctgttttaaaggaggtattttggaaattgaaaaacttaatttacaagtgctggtacatcttttttcttttgtggaccacaggaaggaagatttattttgatattgatactttaaaaggactttatatttgtaacattgatgttaaccagtttattagtttaaatcagtactttgcatataataagcattcaacaaaaatttattgactgaaatgaattttaaatgcatgtgtatgaacttgtttttcttaatctttaagatgtcagtattcat

SEQ ID NO: 151678 - DNA, 1648 bp, Homo sapiens
  Payload ID: 9852
  Gene Symbol: MBIP
  Gene Name: MAP3K12 binding inhibitory protein 1
  Uniprot ID: Q9NS73
  ENST ID: ENST00000416007
  CDS Start-End: 89-1123
tcgccaagcgactaaagctggaagggagggggcggggttgtgagcaaatcttggtggtggtggtggtggggcggcctgagaagatatcatggctgctgccacggagcttaatcgcccgagcagcggtgacaggaacctggagcgaagatgcagacccaacctctcccgagaggtgctctacgaaatctttcgctccctacacaccctggttggacagcttgacctcagagatgatgtggtgaaaattacaatcgattggaacaagctccagagcctctcggcattccagcctgcattgctctttagtgcacttgaacaacacattttatatttacagccttttttagcaaaacttcagtctccgattaaagaggagaatacaactgctgttgaagagataggaagaacagaaatggggaacaaaaatgaagtaaatgacaaattttccattggcgacctacaagaggaagaaaagcacaaagaaagtgatttaagagatgtgaaaaagacacagatccattttgatccagaagtagttcagataaaggctggaaaagcagaaattgacagacgaatatctgcatttattgaaagaaagcaagctgaaatcaatgaaaacaacgtcagggaattttgcaatgttattgattgtaatcaagaaaatagttgtgcaagaactgatgcgatttttaccccttaccccggatttaaaagtcacgtaaaagtttctagagttgtgaatacatacggaccacagactagacctgaaggaattccagggtcaggtcataaacctaacagcatgcttcgagactgtggtaatcaggctgtagaagaacgactacaaaatattgaggcccacttgcggttacagacaggtggtccagtgccaagagacatttatcagagaattaaaaaacttgaggataaaatccttgaattggaaggcatctctcctgaatattttcagtctgtaagcttttctggaaaaagaagaaaagttcaaccacctcaacagaactattcactggctgaacttgatgagaaaattagtgccctcaaacaagccctcctcagaaaatcaagagaagcagaatccatggcaacccaccaccttccatgaaaaactcctctcatccttgtcattttacttttttgtatacatatgtgtaacttacactgttattaattcaacggatatatatttatcaatgtagacttctctgtgaagtcaaggtttattttcacatgagtccagcttgcagcaagtaatcttcaaatattccagtaagttttgaaataatgaatgcattgaaaatagcattgttggaatttattcccttctgttttaaaggaggtattttggaaattgaaaaacttaatttacaagtgctggtacatcttttttcttttgtggaccacaggaaggaagatttattttgatattgatactttaaaaggactttatatttgtaacattgatgttaaccagtttattagtttaaatcagtactttgcatataataagcattcaacaaaaatttattgactgaaatgaattttaaatgcatgtgtatgaacttgtttttcttaatctttaagatgtcagtattcatgtaaataaacaatagatccagctttatccctt

SEQ ID NO: 151679 - DNA, 952 bp, Homo sapiens
  Payload ID: 9852
  Gene Symbol: MBIP
  Gene Name: MAP3K12 binding inhibitory protein 1
  ENST ID: ENST00000605579
  CDS Start-End: 1-898
cacggagcttaatcgcccgagcagcggtgacaggaacctggagcgaagatgcagacccaacctctcccgagaggtgctctacgaaatctttcgctccctacacaccctggttggacagcttgacctcagagatgatgtggtgaaaattacaatcgattggaacaagctccagagcctctcggcattccagcctgcattgctctttagtgcacttgaacaacacattttatatttacagccttttttagcaaaacttcagtctccgattaaagaggagaatacaactgctgttgaagagataggaagaacagaaatggggaacaaaaatgaagtaaatgacaaattttccattggcgacctacaagaggaagaaaagcacaaagaaagtgatttaagagatgtgaaaaagacacagatccattttgatccagaagtagttcagataaaggctggaaaagcagaaattgacagacgaatatctgcatttattgaaagaaagcaagctgaaatcaatgaaaacaacgtcagggaattttgcaatgttattgattgtaatcaagaaaatagttgtgcaagaactgatgcgatttttaccccttaccccggatttaaaagtcacgtaaaagtttctagagttgtgaatacatacggaccacagactagacctgaaggaattccagggtcaggtcataaacctaacagcatgcttcgagactgtggtaatcaggctgtagaagaacgactacaaaatattgaggcccacttgcggttacagacaggtggtccagtgccaagagacatttatcagagaattaaaaaacttgaggataaaatccttgaattggaaggcatctctcctgaatattttcagtctgtagtgagtataagtgtcttttaaaaataaatgaaaatgttattgtattctggattctttgtggtttaacagtcactc

SEQ ID NO: 151680 - DNA, 853 bp, Homo sapiens
  Payload ID: 9852
  Gene Symbol: MBIP
  Gene Name: MAP3K12 binding inhibitory protein 1
  ENST ID: ENST00000604336
  CDS Start-End: 10-853
gaagatatcatggctgctgccacggagcttaatcgcccgagcagcggtgacaggaacctggagcgaagatgcagacccaacctctcccgagaggtgctctacgaaatctttcgctccctacacaccctggttggacagcttgacctcagagatgatgtggtgaaaattacaatcgattggaacaagctccagagcctctcggcattccagcctgcattgctctttagtgcacttgaacaacacattttatatttacagatggaattgtgttgttctcagccttttttagcaaaacttcagtctccgattaaagaggagaatacaactgctgttgaagagataggaagaacagaaatggggaacaaaaatgaagtaaatgacaaattttccattggcgacctacaagaggaagaaaagcacaaagaaagtgatttaagagatgtgaaaaagacacagatccattttgatccagaagtagttcagataaaggctggaaaagcagaaattgacagacgaatatctgcatttattgaaagaaagcaagctgaaatcaatgaaaacaacgtcagggaattttgcaatgttattgattgtaatcaagaaaatagttgtgcaagaactgatgcgatttttaccccttaccccggatttaaaagtcacgtaaaagtttctagagttgtgaatacatacggaccacagactagacctgaaggaattccagggtcaggtcataaacctaacagcatgcttcgagactgtggtaatcaggctgtagaagaacgactacaaaatattgaggcccacttgcggttacagacaggtggtccagtgccaagagacatttatcagagaa

SEQ ID NO: 151681 - DNA, 702 bp, Homo sapiens
  Payload ID: 9852
  Gene Symbol: MBIP
  Gene Name: MAP3K12 binding inhibitory protein 1
  ENST ID: ENST00000603139
  CDS Start-End: 37-702
ggtggtggtggtggtggggcggcctgagaagatatcatggctgctgccacggagcttaatcgcccgagcagcggtgacaggaacctggagcgaagatgcagacccaacctctcccgagaggtgctctacgaaatctttcgctccctacacaccctggttggacagccttttttagcaaaacttcagtctccgattaaagaggagaatacaactgctgttgaagagataggaagaacagaaatggggaacaaaaatgaagtaaatgacaaattttccattggcgacctacaagaggaagaaaagcacaaagaaagtgatttaagagatgtgaaaaagacacagatccattttgatccagaagtagttcagataaaggctggaaaagcagaaattgacagacgaatatctgcatttattgaaagaaagcaagctgaaatcaatgaaaacaacgtcagggaattttgcaatgttattgattgtaatcaagaaaatagttgtgcaagaactgatgcgatttttaccccttaccccggatttaaaagtcacgtaaaagtttctagagttgtgaatacatacggaccacagactagacctgaaggaattccagggtcaggtcataaacctaacagcatgcttcgagactgtggtaatcaggctgtagaagaacgactacaaaatattgaggcccacttgcggttacag

SEQ ID NO: 151682 - DNA, 621 bp, Homo sapiens
  Payload ID: 9852
  Gene Symbol: MBIP
  Gene Name: MAP3K12 binding inhibitory protein 1
  ENST ID: ENST00000604160
  CDS Start-End: 284-621
atttaactattaactagtttaactggctgataaatcgcttttgcagaaatgtcatagtaaaattggttttaaattgaaatgggcttcttcgatcaagtcactgtttcgtttcatggtgtaaaattcaagttttaaatgagaaacaatttaaaagtatgcttgtttacctgccttttaaaaggaaatattttctatcttacatagaccattttctagccgtaaaagtttgttttggggctggtactagcgcaagtggacaaagcaggcatttgtgtcaaagataatgcttgacctcagagatgatgtggtgaaaattacaatcgattggaacaagctccagagcctctcggcattccagcctgcattgctctttagtgcacttgaacaacacattttatatttacagccttttttagcaaaacttcagtctccgattaaagaggagaatacaactgctgttgaagagataggaagaacagaaatggggaacaaaaatgaagtaaatgacaaattttccattggcgacctacaagaggaagaaaagcacaaagaaagtgatttaagagatgtgaaaaagacacagatccattttgatccagaagtagttcagataaaggctgg

SEQ ID NO: 151683 - DNA, 1809 bp, Homo sapiens
  Payload ID: 9852
  Gene Symbol: MBIP
  Gene Name: MAP3K12 binding inhibitory protein 1
  ENST ID: ENST00000621657
  CDS Start-End: 37-933
ggtggtggtggtggtggggcggcctgagaagatatcatggctgctgccacggagcttaatcgcccgagcagcggtgacaggaacctggagcgaagatgcagacccaacctctcccgagaggtgctctacgaaatctttcgctccctacacaccctggttggacagcttgacctcagagatgatgtggtgaaaattacaatcgattggaacaagctccagagcctctcggcattccagcctgcattgctctttagtgcacttgaacaacacattttatatttacagccttttttagcaaaacttcagtctccgattaaagaggagaatacaactgctgttgaagagataggaagaacagaaatggggaacaaaaatgaagtaaatgacaaattttccattggcgacctacaagaggaagaaaagcacaaagaaagtgatttaagagatgtgaaaaagacacagatccattttgatccagaagtagttcagataaaggctggaaaagcagaaattgacagacgaatatctgcatttattgaaagaaagcaagctgaaatcaatgaaaacaacgtcagggaattttgcaatgttattgattgtaatcaagaaaatagttgtgcaagaactgatgcgatttttaccccttaccccggatttaaaagtcacgtaaaagtttctagagttgtgaatacatacggaccacagactagacctgaaggaattccagggtcaggtcataaacctaacagcatgcttcgagactgtggtaatcaggctgtagaagaacgactacaaaatattgaggcccacttgcggttacagacaggtggtccagtgccaagagacatttatcagagaattaaaaaacttgaggataaaatccttgaattggaaggcatctctcctgaatattttcagtctgtaggcctgtgaacatacatgacacaagccctatgggaaagaagatttcatactcatcacccttctataataggatgaatgagccatctttaggaacctcacttggaatacagtcagctctaagagtgtccttgcaaacaggagaagttgagcacataccttacagaggacatagtacattattcatcaccctcaccatcatgctgggagtacatgcatgtagagcttttctggaaaaagaagaaaagttcaaccacctcaacagaactattcactggctgaacttgatgagaaaattagtgccctcaaacaagccctcctcagaaaatcaagagaagcagaatccatggcaacccaccaccttccatgaaaaactcctctcatccttgtcattttacttttttgtatacatatgtgtaacttacactgttattaattcaacggatatatatttatcaatgtagacttctctgtgaagtcaaggtttattttcacatgagtccagcttgcagcaagtaatcttcaaatattccagtaagttttgaaataatgaatgcattgaaaatagcattgttggaatttattcccttctgttttaaaggaggtattttggaaattgaaaaacttaatttacaagtgctggtacatcttttttcttttgtggaccacaggaaggaagatttattttgatattgatactttaaaaggactttatatttgtaacattgatgttaaccagtttattagtttaaatcagtactttgcatataataagcattcaacaaaaatttattgactgaaatgaattttaaatgcatgtgtatgaacttgtttttcttaatctttaagatgtcagtattcatgtaaataaacaatagatccagcttt

SEQ ID NO: 151684 - DNA, 1725 bp, Homo sapiens
  Payload ID: 9853
  Gene Symbol: MAP3K7CL
  Gene Name: MAP3K7 C-terminal like
  Uniprot ID: P57077
  ENST ID: ENST00000286791
  CDS Start-End: 1-729
atggttcagctgattgcacctttagaagttatgtggaacgaggcagcagatcttaagccccttgctctgtcacgcaggctggaatgcagtggtggaatcatggctcactacagccctgacctcctgggcccagagatggagtctcgctattttgcccaggttggtcttgaacacctggcttcaagcagtcctcctgcttttggcttcttgaagtgcttggattacagtatttcagttttatgctctgcaacaagtttggccatgttggaggacaatccaaaggtcagcaagttggctactggcgattggatgctcactctgaagccaaagtctattactgtgcccgtggaaatccccagctcccctctggatgatacaccccctgaagactccattcctttggtctttccagaattagaccagcagctacagcccctgccgccttgtcatgactccgaggaatccatggaggtgttcaaacagcactgccaaatagcagaagaataccatgaggtcaaaaaggaaatcaccctgcttgagcaaaggaagaaggagctcattgccaagttagatcaggcagaaaaggagaaggtggatgctgctgagctggttcgggaattcgaggctctgacggaggagaatcggacgttgaggttggcccagtctcaatgtgtggaacaactggagaaacttcgaatacagtatcagaagaggcagggctcgtcctaactttaaatttttcagtgtgagcatacgaggctgatgactgccctgtgctggccaaaagatttttattttaaatgaatagtgagtcagatctattgcttctctgtattacccacatgacaactgtctataatgagtttactgcttgccagcttctagcttgagagaagggatattttaaatgagatcattaacgtgaaactattactagtatatgtttttggagatcagaattcttttccaaagatatatgtttttttcttttttaggaagatatgatcatgctgtacaacagggtagaaaatgataaaaatagactattgactgacccagctaagaatcgtgggctgagcagagttaaaccatgggacaaacccataacatgttcaccatagtttcacgtatgtgtatttttaaatttcatgcctttaatatttcaaatatgctcaaatttaaactgtcagaaacttctgtgcatgtatttatatttgccagagtataaacttttatactctgatttttatccttcaatgattgattatactaagaataaatggtcacatatcctaaaagcttcttcatgaaattattagcagaaaccatgtttgtaaccaaagcacatttgccaatgctaactggctgttgtaataataaacagataaggctgcatttgcttcatgccatgtgacctcacagtaaacatctctgcctttgcctgtgtgtgttctgggggaggggggacatggaaaaatattgtttggacattacttgggtgagtgcccatgaaaacatcagtgaacttgtaactattgttttgttttggatttaaggagatgttttagatcagtaacagctaataggaatatgcgagtaaattcagaattgaaacaatttctccttgttctacctatcaccacattttctcaaattgaactctttgttatatgtccatttctattcatgtaacttctttttcattaaacatggatcaaaactgac

SEQ ID NO: 151685 - DNA, 1855 bp, Homo sapiens
  Payload ID: 9853
  Gene Symbol: MAP3K7CL
  Gene Name: MAP3K7 C-terminal like
  Uniprot ID: P57077
  ENST ID: ENST00000341618
  CDS Start-End: 130-858
ccgagagcgagggagggctgtgaggactgccagcacgctgtcacctctcaatagcagcccaaacagattaagacatgggaggtgaaagacaacttgagtggttaaattactgtcatgcaaagcgactagatggttcagctgattgcacctttagaagttatgtggaacgaggcagcagatcttaagccccttgctctgtcacgcaggctggaatgcagtggtggaatcatggctcactacagccctgacctcctgggcccagagatggagtctcgctattttgcccaggttggtcttgaacacctggcttcaagcagtcctcctgcttttggcttcttgaagtgcttggattacagtatttcagttttatgctctgcaacaagtttggccatgttggaggacaatccaaaggtcagcaagttggctactggcgattggatgctcactctgaagccaaagtctattactgtgcccgtggaaatccccagctcccctctggatgatacaccccctgaagactccattcctttggtctttccagaattagaccagcagctacagcccctgccgccttgtcatgactccgaggaatccatggaggtgttcaaacagcactgccaaatagcagaagaataccatgaggtcaaaaaggaaatcaccctgcttgagcaaaggaagaaggagctcattgccaagttagatcaggcagaaaaggagaaggtggatgctgctgagctggttcgggaattcgaggctctgacggaggagaatcggacgttgaggttggcccagtctcaatgtgtggaacaactggagaaacttcgaatacagtatcagaagaggcagggctcgtcctaactttaaatttttcagtgtgagcatacgaggctgatgactgccctgtgctggccaaaagatttttattttaaatgaatagtgagtcagatctattgcttctctgtattacccacatgacaactgtctataatgagtttactgcttgccagcttctagcttgagagaagggatattttaaatgagatcattaacgtgaaactattactagtatatgtttttggagatcagaattcttttccaaagatatatgtttttttcttttttaggaagatatgatcatgctgtacaacagggtagaaaatgataaaaatagactattgactgacccagctaagaatcgtgggctgagcagagttaaaccatgggacaaacccataacatgttcaccatagtttcacgtatgtgtatttttaaatttcatgcctttaatatttcaaatatgctcaaatttaaactgtcagaaacttctgtgcatgtatttatatttgccagagtataaacttttatactctgatttttatccttcaatgattgattatactaagaataaatggtcacatatcctaaaagcttcttcatgaaattattagcagaaaccatgtttgtaaccaaagcacatttgccaatgctaactggctgttgtaataataaacagataaggctgcatttgcttcatgccatgtgacctcacagtaaacatctctgcctttgcctgtgtgtgttctgggggaggggggacatggaaaaatattgtttggacattacttgggtgagtgcccatgaaaacatcagtgaacttgtaactattgttttgttttggatttaaggagatgttttagatcagtaacagctaataggaatatgcgagtaaattcagaattgaaacaatttctccttgttctacctatcaccacattttctcaaattgaactctttgttatatgtccatttctattcatgtaacttctttttcattaaacatggatcaaaactgaca

SEQ ID NO: 151686 - DNA, 2066 bp, Homo sapiens
  Payload ID: 9853
  Gene Symbol: MAP3K7CL
  Gene Name: MAP3K7 C-terminal like
  Uniprot ID: P57077
  ENST ID: ENST00000339024
  CDS Start-End: 641-1069
gtccaagcccagtgctctttcccctgatgagaaacctttccagatttaaaccattaacaaccctctctaaagaggaggcaagaggtttcaatttcttctcagggaaaaaaagaactgacatcaaaaggtctgtgcggggtcatttgtctcatcatgactttgatttggccttgatctttatttagtatttcagttttatgctctgcaacaagtttggccatgttggaggacaatccaaaggtcagcaagttggctactggcgattggatgctcactctgaagccaaagtctattactgtgcccgtggaaatccccagctcccctctgggttgacattcgtaaccttcctggatcctatcagagaaaccttgttcatcatttcatttccaaattatgaagaccacctgggcctgactgaagatgcttgtttcttcctcttccctaacgccctttccaccagtgcggactgcagattgtcagtggctgctatgcagcaggtgcagcctggtctctcactgagtctctactccacaaaggcaacgactggccaaggcagtggctggctctgggttacacaagtgcagacactcaactaagtgagctggaagacccaggagaaggcggaggctcaggtgcccacatgatcagcacagccagggtacctgctgacaagcctgtacgcatcgcctttagcctcaatgacgcctcagatgatacaccccctgaagactccattcctttggtctttccagaattagaccagcagctacagcccctgccgccttgtcatgactccgaggaatccatggaggtgttcaaacagcactgccaaatagcagaagaataccatgaggtcaaaaaggaaatcaccctgcttgagcaaaggaagaaggagctcattgccaagttagatcaggcagaaaaggagaaggtggatgctgctgagctggttcgggaattcgaggctctgacggaggagaatcggacgttgaggttggcccagtctcaatgtgtggaacaactggagaaacttcgaatacagtatcagaagaggcagggctcgtcctaactttaaatttttcagtgtgagcatacgaggctgatgactgccctgtgctggccaaaagatttttattttaaatgaatagtgagtcagatctattgcttctctgtattacccacatgacaactgtctataatgagtttactgcttgccagcttctagcttgagagaagggatattttaaatgagatcattaacgtgaaactattactagtatatgtttttggagatcagaattcttttccaaagatatatgtttttttcttttttaggaagatatgatcatgctgtacaacagggtagaaaatgataaaaatagactattgactgacccagctaagaatcgtgggctgagcagagttaaaccatgggacaaacccataacatgttcaccatagtttcacgtatgtgtatttttaaatttcatgcctttaatatttcaaatatgctcaaatttaaactgtcagaaacttctgtgcatgtatttatatttgccagagtataaacttttatactctgatttttatccttcaatgattgattatactaagaataaatggtcacatatcctaaaagcttcttcatgaaattattagcagaaaccatgtttgtaaccaaagcacatttgccaatgctaactggctgttgtaataataaacagataaggctgcatttgcttcatgccatgtgacctcacagtaaacatctctgcctttgcctgtgtgtgttctgggggaggggggacatggaaaaatattgtttggacattacttgggtgagtgcccatgaaaacatcagtgaacttgtaactattgttttgttttggatttaaggagatgttttagatcagtaacagctaataggaatatgcgagtaaattcagaattgaaacaatttctccttgttctacctatcaccacattttctcaaattgaactctttgttatatgtccatttctattcatgtaacttctttttcattaaacatggatcaaaactgaca

SEQ ID NO: 151687 - DNA, 692 bp, Homo sapiens
  Payload ID: 9853
  Gene Symbol: MAP3K7CL
  Gene Name: MAP3K7 C-terminal like
  Uniprot ID: P57077
  ENST ID: ENST00000399925
  CDS Start-End: 130-558
gatcagcagcaacttaaccaaagctctgttacagcctgtagccaagagaaggaacctgtggttcgtttccccagacggtgtgatgaaaagctggaagacccaggagaaggcggaggctcaggtgcccacatgatcagcacagccagggtacctgctgacaagcctgtacgcatcgcctttagcctcaatgacgcctcagatgatacaccccctgaagactccattcctttggtctttccagaattagaccagcagctacagcccctgccgccttgtcatgactccgaggaatccatggaggtgttcaaacagcactgccaaatagcagaagaataccatgaggtcaaaaaggaaatcaccctgcttgagcaaaggaagaaggagctcattgccaagttagatcaggcagaaaaggagaaggtggatgctgctgagctggttcgggaattcgaggctctgacggaggagaatcggacgttgaggttggcccagtctcaatgtgtggaacaactggagaaacttcgaatacagtatcagaagaggcagggctcgtcctaactttaaatttttcagtgtgagcatacgaggctgatgactgccctgtgctggccaaaagatttttattttaaatgaatagtgagtcagatctattgcttctctgtattacccacatgacaactgtctataatgag

SEQ ID NO: 151688 - DNA, 749 bp, Homo sapiens
  Payload ID: 9853
  Gene Symbol: MAP3K7CL
  Gene Name: MAP3K7 C-terminal like
  Uniprot ID: P57077
  ENST ID: ENST00000399926
  CDS Start-End: 199-627
aaagatgacaacatcctggctgttagagagattgtcagtggctgctatgcagcaggtgcagcctggtctctcactgagtctctactccacaaaggcaacgactggccaaggcagtggctggctctgggttacacaagtgcagacactcaactaagtgagctggaagacccaggagaaggcggaggctcaggtgcccacatgatcagcacagccagggtacctgctgacaagcctgtacgcatcgcctttagcctcaatgacgcctcagatgatacaccccctgaagactccattcctttggtctttccagaattagaccagcagctacagcccctgccgccttgtcatgactccgaggaatccatggaggtgttcaaacagcactgccaaatagcagaagaataccatgaggtcaaaaaggaaatcaccctgcttgagcaaaggaagaaggagctcattgccaagttagatcaggcagaaaaggagaaggtggatgctgctgagctggttcgggaattcgaggctctgacggaggagaatcggacgttgaggttggcccagtctcaatgtgtggaacaactggagaaacttcgaatacagtatcagaagaggcagggctcgtcctaactttaaatttttcagtgtgagcatacgaggctgatgactgccctgtgctggccaaaagatttttattttaaatgaatagtgagtcagatctattgcttctctgtattacccacatgacaact

SEQ ID NO: 151689 - DNA, 1904 bp, Homo sapiens
  Payload ID: 9853
  Gene Symbol: MAP3K7CL
  Gene Name: MAP3K7 C-terminal like
  Uniprot ID: P57077
  ENST ID: ENST00000399928
  CDS Start-End: 479-907
cacgctgaagacattcctgtcttgtgaagcaagtctgtttgtattttaagtttgccaggactaatgaattaaaacatttggactccccacaacttgctgtttatcaatgcctctgacaggaggagggttttcttttgctcttgctttttctagaaagatgacaacatcctggctgttagagaggcaaggaaaggagagaggggttgtgaagggaagcggaagggaagggaagggaggtcccgtgggacgctggggtctggggcagagcaggtagcagcgtgctgccctgacagctgtctccgctcctcagattgtcagtggctgctatgcagcaggtgcagcctggtctctcactgagtctctactccacaaaggcaacgactggccaaggcagtggctggctctgggttacacaagtgcagacactcaactaagtgagctggaagacccaggagaaggcggaggctcaggtgcccacatgatcagcacagccagggtacctgctgacaagcctgtacgcatcgcctttagcctcaatgacgcctcagatgatacaccccctgaagactccattcctttggtctttccagaattagaccagcagctacagcccctgccgccttgtcatgactccgaggaatccatggaggtgttcaaacagcactgccaaatagcagaagaataccatgaggtcaaaaaggaaatcaccctgcttgagcaaaggaagaaggagctcattgccaagttagatcaggcagaaaaggagaaggtggatgctgctgagctggttcgggaattcgaggctctgacggaggagaatcggacgttgaggttggcccagtctcaatgtgtggaacaactggagaaacttcgaatacagtatcagaagaggcagggctcgtcctaactttaaatttttcagtgtgagcatacgaggctgatgactgccctgtgctggccaaaagatttttattttaaatgaatagtgagtcagatctattgcttctctgtattacccacatgacaactgtctataatgagtttactgcttgccagcttctagcttgagagaagggatattttaaatgagatcattaacgtgaaactattactagtatatgtttttggagatcagaattcttttccaaagatatatgtttttttcttttttaggaagatatgatcatgctgtacaacagggtagaaaatgataaaaatagactattgactgacccagctaagaatcgtgggctgagcagagttaaaccatgggacaaacccataacatgttcaccatagtttcacgtatgtgtatttttaaatttcatgcctttaatatttcaaatatgctcaaatttaaactgtcagaaacttctgtgcatgtatttatatttgccagagtataaacttttatactctgatttttatccttcaatgattgattatactaagaataaatggtcacatatcctaaaagcttcttcatgaaattattagcagaaaccatgtttgtaaccaaagcacatttgccaatgctaactggctgttgtaataataaacagataaggctgcatttgcttcatgccatgtgacctcacagtaaacatctctgcctttgcctgtgtgtgttctgggggaggggggacatggaaaaatattgtttggacattacttgggtgagtgcccatgaaaacatcagtgaacttgtaactattgttttgttttggatttaaggagatgttttagatcagtaacagctaataggaatatgcgagtaaattcagaattgaaacaatttctccttgttctacctatcaccacattttctcaaattgaactctttgttatatgtccatttctattcatgtaacttctttttcattaaacatggatcaaaactgaca

SEQ ID NO: 151690 - DNA, 1964 bp, Homo sapiens
  Payload ID: 9853
  Gene Symbol: MAP3K7CL
  Gene Name: MAP3K7 C-terminal like
  Uniprot ID: P57077
  ENST ID: ENST00000399934
  CDS Start-End: 539-967
ccgagagcgagggagggctgtgaggactgccagcacgctgtcacctctcaatagcagcccaaacagattaagacatgggaggtgaaagacaacttgagtggttaaattactgtcatgcaaagcgactagatggttcagctgattgcacctttagaagttatgtggaacgaggcagcagatcttaagccccttgctctgtcacgcaggctggaatgcagtggtggaatcatggctcactacagccctgacctcctgggcccagagatggagtctcgctattttgcccaggttggtcttgaacacctggcttcaagcagtcctcctgcttttggcttcttgaagtgcttggattacagtatttcagttttatgctctgcaacaagtttggccatgttggaggacaatccaaaggtcagcaagttggctactggcgattggatgctcactctgaagccaaagtctattactgtgcccgtggaaatccccagctcccctctggctggaagacccaggagaaggcggaggctcaggtgcccacatgatcagcacagccagggtacctgctgacaagcctgtacgcatcgcctttagcctcaatgacgcctcagatgatacaccccctgaagactccattcctttggtctttccagaattagaccagcagctacagcccctgccgccttgtcatgactccgaggaatccatggaggtgttcaaacagcactgccaaatagcagaagaataccatgaggtcaaaaaggaaatcaccctgcttgagcaaaggaagaaggagctcattgccaagttagatcaggcagaaaaggagaaggtggatgctgctgagctggttcgggaattcgaggctctgacggaggagaatcggacgttgaggttggcccagtctcaatgtgtggaacaactggagaaacttcgaatacagtatcagaagaggcagggctcgtcctaactttaaatttttcagtgtgagcatacgaggctgatgactgccctgtgctggccaaaagatttttattttaaatgaatagtgagtcagatctattgcttctctgtattacccacatgacaactgtctataatgagtttactgcttgccagcttctagcttgagagaagggatattttaaatgagatcattaacgtgaaactattactagtatatgtttttggagatcagaattcttttccaaagatatatgtttttttcttttttaggaagatatgatcatgctgtacaacagggtagaaaatgataaaaatagactattgactgacccagctaagaatcgtgggctgagcagagttaaaccatgggacaaacccataacatgttcaccatagtttcacgtatgtgtatttttaaatttcatgcctttaatatttcaaatatgctcaaatttaaactgtcagaaacttctgtgcatgtatttatatttgccagagtataaacttttatactctgatttttatccttcaatgattgattatactaagaataaatggtcacatatcctaaaagcttcttcatgaaattattagcagaaaccatgtttgtaaccaaagcacatttgccaatgctaactggctgttgtaataataaacagataaggctgcatttgcttcatgccatgtgacctcacagtaaacatctctgcctttgcctgtgtgtgttctgggggaggggggacatggaaaaatattgtttggacattacttgggtgagtgcccatgaaaacatcagtgaacttgtaactattgttttgttttggatttaaggagatgttttagatcagtaacagctaataggaatatgcgagtaaattcagaattgaaacaatttctccttgttctacctatcaccacattttctcaaattgaactctttgttatatgtccatttctattcatgtaacttctttttcattaaacatggatcaaaactgaca

SEQ ID NO: 151691 - DNA, 2093 bp, Homo sapiens
  Payload ID: 9853
  Gene Symbol: MAP3K7CL
  Gene Name: MAP3K7 C-terminal like
  Uniprot ID: P57077
  ENST ID: ENST00000399935
  CDS Start-End: 668-1096
ccgagagcgagggagggctgtgaggactgccagcacgctgtcacctctcaatagcagcccaaacagattaagacatgggaggtgaaagacaacttgagtggttaaattactgtcatgcaaagcgactagatggttcagctgattgcacctttagaagttatgtggaacgaggcagcagatcttaagccccttgctctgtcacgcaggctggaatgcagtggtggaatcatggctcactacagccctgacctcctgggcccagagatggagtctcgctattttgcccaggttggtcttgaacacctggcttcaagcagtcctcctgcttttggcttcttgaagtgcttggattacagtatttcagttttatgctctgcaacaagtttggccatgttggaggacaatccaaaggtcagcaagttggctactggcgattggatgctcactctgaagccaaagtctattactgtgcccgtggaaatccccagctcccctctggattgtcagtggctgctatgcagcaggtgcagcctggtctctcactgagtctctactccacaaaggcaacgactggccaaggcagtggctggctctgggttacacaagtgcagacactcaactaagtgagctggaagacccaggagaaggcggaggctcaggtgcccacatgatcagcacagccagggtacctgctgacaagcctgtacgcatcgcctttagcctcaatgacgcctcagatgatacaccccctgaagactccattcctttggtctttccagaattagaccagcagctacagcccctgccgccttgtcatgactccgaggaatccatggaggtgttcaaacagcactgccaaatagcagaagaataccatgaggtcaaaaaggaaatcaccctgcttgagcaaaggaagaaggagctcattgccaagttagatcaggcagaaaaggagaaggtggatgctgctgagctggttcgggaattcgaggctctgacggaggagaatcggacgttgaggttggcccagtctcaatgtgtggaacaactggagaaacttcgaatacagtatcagaagaggcagggctcgtcctaactttaaatttttcagtgtgagcatacgaggctgatgactgccctgtgctggccaaaagatttttattttaaatgaatagtgagtcagatctattgcttctctgtattacccacatgacaactgtctataatgagtttactgcttgccagcttctagcttgagagaagggatattttaaatgagatcattaacgtgaaactattactagtatatgtttttggagatcagaattcttttccaaagatatatgtttttttcttttttaggaagatatgatcatgctgtacaacagggtagaaaatgataaaaatagactattgactgacccagctaagaatcgtgggctgagcagagttaaaccatgggacaaacccataacatgttcaccatagtttcacgtatgtgtatttttaaatttcatgcctttaatatttcaaatatgctcaaatttaaactgtcagaaacttctgtgcatgtatttatatttgccagagtataaacttttatactctgatttttatccttcaatgattgattatactaagaataaatggtcacatatcctaaaagcttcttcatgaaattattagcagaaaccatgtttgtaaccaaagcacatttgccaatgctaactggctgttgtaataataaacagataaggctgcatttgcttcatgccatgtgacctcacagtaaacatctctgcctttgcctgtgtgtgttctgggggaggggggacatggaaaaatattgtttggacattacttgggtgagtgcccatgaaaacatcagtgaacttgtaactattgttttgttttggatttaaggagatgttttagatcagtaacagctaataggaatatgcgagtaaattcagaattgaaacaatttctccttgttctacctatcaccacattttctcaaattgaactctttgttatatgtccatttctattcatgtaacttctttttcattaaacatggatcaaaactgaca

SEQ ID NO: 151692 - DNA, 2003 bp, Homo sapiens
  Payload ID: 9853
  Gene Symbol: MAP3K7CL
  Gene Name: MAP3K7 C-terminal like
  Uniprot ID: P57077
  ENST ID: ENST00000399947
  CDS Start-End: 278-1006
atgtacaagggcagccgtggggctggcaacagcttcgtaatcctggcttcctgctttctgggtcaaagccctggtggtgtgttcttgatatcggtccatctagtggcgttgtttgattcctcccaccttgctgatcattcgtagtgtagcccccaaggtgtggaataacccttaagcccttaccggggtccttctggactgagaattgttgtaaagtaatactgctcaggtgaaagacaacttgagtggttaaattactgtcatgcaaagcgactagatggttcagctgattgcacctttagaagttatgtggaacgaggcagcagatcttaagccccttgctctgtcacgcaggctggaatgcagtggtggaatcatggctcactacagccctgacctcctgggcccagagatggagtctcgctattttgcccaggttggtcttgaacacctggcttcaagcagtcctcctgcttttggcttcttgaagtgcttggattacagtatttcagttttatgctctgcaacaagtttggccatgttggaggacaatccaaaggtcagcaagttggctactggcgattggatgctcactctgaagccaaagtctattactgtgcccgtggaaatccccagctcccctctggatgatacaccccctgaagactccattcctttggtctttccagaattagaccagcagctacagcccctgccgccttgtcatgactccgaggaatccatggaggtgttcaaacagcactgccaaatagcagaagaataccatgaggtcaaaaaggaaatcaccctgcttgagcaaaggaagaaggagctcattgccaagttagatcaggcagaaaaggagaaggtggatgctgctgagctggttcgggaattcgaggctctgacggaggagaatcggacgttgaggttggcccagtctcaatgtgtggaacaactggagaaacttcgaatacagtatcagaagaggcagggctcgtcctaactttaaatttttcagtgtgagcatacgaggctgatgactgccctgtgctggccaaaagatttttattttaaatgaatagtgagtcagatctattgcttctctgtattacccacatgacaactgtctataatgagtttactgcttgccagcttctagcttgagagaagggatattttaaatgagatcattaacgtgaaactattactagtatatgtttttggagatcagaattcttttccaaagatatatgtttttttcttttttaggaagatatgatcatgctgtacaacagggtagaaaatgataaaaatagactattgactgacccagctaagaatcgtgggctgagcagagttaaaccatgggacaaacccataacatgttcaccatagtttcacgtatgtgtatttttaaatttcatgcctttaatatttcaaatatgctcaaatttaaactgtcagaaacttctgtgcatgtatttatatttgccagagtataaacttttatactctgatttttatccttcaatgattgattatactaagaataaatggtcacatatcctaaaagcttcttcatgaaattattagcagaaaccatgtttgtaaccaaagcacatttgccaatgctaactggctgttgtaataataaacagataaggctgcatttgcttcatgccatgtgacctcacagtaaacatctctgcctttgcctgtgtgtgttctgggggaggggggacatggaaaaatattgtttggacattacttgggtgagtgcccatgaaaacatcagtgaacttgtaactattgttttgttttggatttaaggagatgttttagatcagtaacagctaataggaatatgcgagtaaattcagaattgaaacaatttctccttgttctacctatcaccacattttctcaaattgaactctttgttatatgtccatttctattcatgtaacttctttttcattaaacatggatcaaaactgaca

SEQ ID NO: 151693 - DNA, 577 bp, Homo sapiens
  Payload ID: 9853
  Gene Symbol: MAP3K7CL
  Gene Name: MAP3K7 C-terminal like
  ENST ID: ENST00000419845
  CDS Start-End: 445-577
gccccggttcctgcccgcacctctccctccacacctccccgcaagctgagggagccggctccggcctcggccagcccaggaaggcgctcccacagcgcagtggtgggctgaagggctcctcaagtgccgccaaagtgggagcccaggcagaggaggcgccgagagcgagggagggctgtgaggactgccagcacgctgtcacctctcaatagcagcccaaacagattaagacatgggagatgtacaagggcagccgtggggctggcaacagcttcgtaatcctggcttcctgctttctgggtcaaagccctggtggtgtgttcttgatatcggtccatctagtggcgttgtttgattcctcccaccttgctgatcattcgtagtgtagcccccaaggtgaaagacaacttgagtggttaaattactgtcatgcaaagcgactagatggttcagctgattgcacctttagaagttatgtggaacgaggcagcagatcttaagccccttgctctgtcacgcaggctggaatgcagtggtggaatcatggctcactacagccctgacctcctgggcccag

SEQ ID NO: 151694 - DNA, 556 bp, Homo sapiens
  Payload ID: 9853
  Gene Symbol: MAP3K7CL
  Gene Name: MAP3K7 C-terminal like
  ENST ID: ENST00000451489
  CDS Start-End: 275-556
ctcttgtacttgatttcttggtgcgggaaagtgttgggggatttagccaaaagaggagtgcaactttccatccttagatgttatgctaaagtgattcggtgattgtacaatgcataacagtaaaacttttctttttagctaaaatgttaagggaattttaatggtttcttctgttgaatttgagacaatccatgccattccctaggtggctaacaaaatgcttgattctgagcagctggaagacccaggagaaggcggaggctcaggtgcccacatgatcagcacagccagggtacctgctgacaagcctgtacgcatcgcctttagcctcaatgacgcctcagatgatacaccccctgaagactccattcctttggtctttccagaattagaccagcagctacagcccctgccgccttgtcatgactccgaggaatccatggaggtgttcaaacagcactgccaaatagcagaagaataccatgaggtcaaaaaggaaatcaccctgcttgagcaaaggaagaaggagctcattgccaagttagatcaggcagaa

SEQ ID NO: 151695 - DNA, 1407 bp, Homo sapiens
  Payload ID: 9853
  Gene Symbol: MAP3K7CL
  Gene Name: MAP3K7 C-terminal like
  ENST ID: ENST00000545939
  CDS Start-End: 1-411
atgcttgtttcttcctcttccctaacgccctttccaccagtgcggactgcagatgatacaccccctgaagactccattcctttggtctttccagaattagaccagcagctacagcccctgccgccttgtcatgactccgaggaatccatggaggtgttcaaacagcactgccaaatagcagaagaataccatgaggtcaaaaaggaaatcaccctgcttgagcaaaggaagaaggagctcattgccaagttagatcaggcagaaaaggagaaggtggatgctgctgagctggttcgggaattcgaggctctgacggaggagaatcggacgttgaggttggcccagtctcaatgtgtggaacaactggagaaacttcgaatacagtatcagaagaggcagggctcgtcctaactttaaatttttcagtgtgagcatacgaggctgatgactgccctgtgctggccaaaagatttttattttaaatgaatagtgagtcagatctattgcttctctgtattacccacatgacaactgtctataatgagtttactgcttgccagcttctagcttgagagaagggatattttaaatgagatcattaacgtgaaactattactagtatatgtttttggagatcagaattcttttccaaagatatatgtttttttcttttttaggaagatatgatcatgctgtacaacagggtagaaaatgataaaaatagactattgactgacccagctaagaatcgtgggctgagcagagttaaaccatgggacaaacccataacatgttcaccatagtttcacgtatgtgtatttttaaatttcatgcctttaatatttcaaatatgctcaaatttaaactgtcagaaacttctgtgcatgtatttatatttgccagagtataaacttttatactctgatttttatccttcaatgattgattatactaagaataaatggtcacatatcctaaaagcttcttcatgaaattattagcagaaaccatgtttgtaaccaaagcacatttgccaatgctaactggctgttgtaataataaacagataaggctgcatttgcttcatgccatgtgacctcacagtaaacatctctgcctttgcctgtgtgtgttctgggggaggggggacatggaaaaatattgtttggacattacttgggtgagtgcccatgaaaacatcagtgaacttgtaactattgttttgttttggatttaaggagatgttttagatcagtaacagctaataggaatatgcgagtaaattcagaattgaaacaatttctccttgttctacctatcaccacattttctcaaattgaactctttgttatatgtccatttctattcatgtaacttctttttcattaaacatggatcaaaactgac

SEQ ID NO: 151696 - DNA, 2111 bp, Homo sapiens
  Payload ID: 9854
  Gene Symbol: MAP6D1
  Gene Name: MAP6 domain containing 1
  Uniprot ID: Q9H9H5
  ENST ID: ENST00000318631
  CDS Start-End: 32-631
cgggagcggggcggcgggcgccggggctggcatggcgtggccctgtatcagccgcctgtgctgcctggcgcggcgctggaaccagctggaccgctccgacgtggcggtgccgctcactctgcacggctactcggacctcgacagcgaggagccgggcacgggcggcgccgcctcgcgcaggggccagcctcccgcgggcgcccgggattccggccgggacgtgccgctcactcagtaccagcgggacttcggcttgtggaccacgcccgccgggcccaaggatccgccgccggggcgcggaccgggggcgggcggccgcaggggcaaatcctccgcgcagtcctccgcgccacctgcgcccggcgcccgcggggtctacgtgctgcccatcggcgacgcggacgcggctgcagcagtgaccacgtcgtacagacaggaattccaggcttggactggagtgaagccctcaagatccacaaagacaaaaccagcccgagtcatcacaacccacacttcgggatgggacagcagccctggggccggcttccaggtcccagaggtgaggaagaagttcactcctaacccctccgccatctttcaggcctcagctccccggattctcaacgtgtgactgcctgcaccgtgacaccatggctgccgacaggacagggctggggagcggcctcaggacccactgccgcggggctgggcgagagcatggcatgggcccctgcgggagggcacagcccctctcaaagctgtcaccagggccaaagtgctggtgtggagcagatgcaccgatggacttggcacacccagctcagcctcaagcatcctcttgagaagcctgtggaaggctcctgcgttcgttaactgccatctggccgtctctcagttttgaaatctctgaggagcctgaggatcaagtcagttgggaaccgaattggtccatggaagctgaggaatgtggacacatccggcccttgaaagaaccagttatgtccacttttggtggatttcccaggatgcgtgagcacttgattaatttcataacctacagtgagacccttggctcttcctacaaatggcccctgcagttgaagctgttggaatcttgggccgtcacctgcatgactcatggtgatgctgagtatccaggaggaaatttccagaagaaacagaccgtcagtcacgggcttccacttcacagacctccttatggccaagatgagcctcatgttttaacaaaacagttcttgggattgaatgactcacatttaccttgtgctaggttctaaagattgaatccacattttgttactaatgattttcccgctaacataaggatgatgagcagggcactatcatacacactggctgagaactggaactgtttttgggaaggtggcatttgtctcattccctgaaataccttaaaatgtcctctacaccaacccttccgtctaccctgctcacatgtacagtgacggggaactcaccaccttttgaagaggcagttcattttctttgcaaagctctctcctaacttcctccgtaaattccagccagcatggccacatgggtcacgcctggtgccttcacacgtttgaggggtcttcgtctctttttaaagcttagaggtacaagctcaggacagtcttcagtaaggaaatttgtggatttccctttggatctttcttcctctccagcccacaagtggctctagtgagacgagcatttaagctgcaggtggtggcactcgggtctcagagccaccagacgtgcaggtgggacagtggttccagctccgactgcctgtcagcgtccctcccaggtgctagccctggcaggcacagccctcccctcatgccagcaaaggaaatgctcttgatgagaggctcgctttaaagaagcccaaagcgtgtgcttatccaaggggttcagctattcctgacttcacggcttgcatgtttgatttttctaagagaaaagaggctgcctgctgggtgtctgtggaaatgagattaaaaactgtacaatctcagattttactaaaatgcaaaaatgtagtttcagtttcttaaattataagcacgagtcttctcacgctt

SEQ ID NO: 151697 - DNA, 890 bp, Homo sapiens
  Payload ID: 9854
  Gene Symbol: MAP6D1
  Gene Name: MAP6 domain containing 1
  ENST ID: ENST00000431348
  CDS Start-End: 48-596
cgggagcgccgcgcgccgggagcggggcggcgggcgccggggctggcatggcgtggccctgtatcagccgcctgtgctgcctggcgcggcgctggaaccagctggaccgctccgacgtggcggtgccgctcactctgcacggctactcggacctcgacagcgaggagccgggcacgggcggcgccgcctcgcgcaggggccagcctcccgcgggcgcccgggattccggccgggacgtgccgctcactcagtaccagcgggacttcggcttgtggaccacgcccgccgggcccaaggatccgccgccggggcgcggaccgggggcgggcggccgcaggggcaaatcctccgcgcagtcctccgcgccacctgcgcccggcgcccgcggggtctacgtgctgcccatcggcgacgcggacgcggctgcagcagtgaccacgtcgtacagacaggaattccaggcttggactggagtgaagccctcaagatccacaaagacaaaaccagcccgagtcatcacaacccacacttcgggatgggacagcagccctggggccggcttccaggcctcagctccccggattctcaacgtgtgactgcctgcaccgtgacaccatggctgccgacaggacagggctggggagcggcctcaggacccactgccgcggggctgggcgagagcatggcatgggcccctgcgggagggcacagcccctctcaaagctgtcaccagggccaaagtgctggtgtggagcagatgcaccgatggacttggcacacccagctcagcctcaagcatcctcttgagaagcctgtggaaggctcctgcgttcgttaactgccatctggccgtctctcagttttgaaatctctgaggagcctgaggatca

SEQ ID NO: 151698 - DNA, 549 bp, Homo sapiens
  Payload ID: 9854
  Gene Symbol: MAP6D1
  Gene Name: MAP6 domain containing 1
  ENST ID: ENST00000445426
  CDS Start-End: 1-400
gtgctgcctggcgcggcgctggaaccagctggaccgctccgacgtggcggtgccgctcactctgcacggctactcggacctcgacagcgaggagccgggcacgggcggcgccgcctcgcgcaggggccagcctcccgcgggcgcccgggattccggccgggacgtgccgctcactcagtaccagcgggacttcggcttgtggaccacgcccgccgggcccaaggatccgccgccggggcgcggaccgggggcgggcggccgcaggggcaaatcctccgcgcagtcctccgcgccacctgcgcccggcgcccgcggggtctacgtgctgcccatcggcgacgcggacgcggctgcagcagtgaccacgtcgtacaggaattccaggcttggactggagtgaagccctcaagatccacaaagacaaaaccagcccgagtcatcacaacccacacttcgggatgggacagcagccctggggccggcttccaggtcccagaggtgaggaagaagttcactcctaacccctccgccatctttcaggcctcagct

SEQ ID NO: 151699 - DNA, 3456 bp, Homo sapiens
  Payload ID: 9855
  Gene Symbol: MAP7D1
  Gene Name: MAP7 domain containing 1
  Uniprot ID: Q3KQU3
  ENST ID: ENST00000316156
  CDS Start-End: 454-2865
gcccgctcggccgtggccgtgggagaggcgccgggaggctgcgggcgcggggctccggggcgggggcggcgcgaacggcgcggacggcgcgggcgcggggggctgggtcccggggcgctgctggggtggacccccccgcctcgaacttggtacgcgccagcgagaggccaggcccagcccgggcggtacaatagggttgggccgaggccgggactgggccggcgccgggcggggaacgggttcgcgaccgcagccgagagaccccgggcgaccggcacctccgagactcgcgggccacctgcctcgaccttccccggagcgcccccgcctccgagtcgctacttgccgggccgggccgggccgggcgtgatgcgccgcgggacccctgtcctggccactggccgccgccgccgccgccgctgagaccccgagacccccagtgacgccgcagccatggagagcggcccgcgtgcggagctgggggcgggcgcacccccagctgtggtcgccaggacccccccagagccaagaccttctccagaaggtgacccttcccccccaccaccaccaatgtcagccctggtccccgacactcccccggacacccctcctgccatgaagaatgccactagctctaagcagctcccactggaaccagagagcccctcagggcaggtcgggcctaggccagcccccccgcaggaagagtccccttcctctgaagcaaagagcagaggacccaccccaccagccatgggcccacgggatgccagacctcctcgaaggagcagccagccatctccaacagcagtgccagcctccgacagccctcccaccaagcaagaggtgaagaaggcaggagagagacacaagctggcaaaggagcggcgagaagagcgggccaagtacctggcggccaagaaggcagtgtggctggagaaggaggagaaggccaaggcgctgcgggagaagcagctccaggagcgccggcgccggctggaggagcaacgtcttaaagccgagcaacgccgtgcagccctggaggaacggcagcggcagaagctcgagaaaaacaaggagcgctatgaagcagccatccaacggtcagtgaagaagacgtgggccgaaatccggcagcagcgctggtcctgggcaggggccctgcaccacagctctccaggacataagaccaatcgcagcctgcagctgagcgcatgggagagcagcatcgtggatcgtctgatgacgcccactctctccttccttgctcggagtcgcagcgcggtcacactgccccgcaacggccgggaccagggtaggggctgcgaccctgggagaggccccacgtggggccgggcaggggccagcctggcgcgcgggccgcaacccgaccgcactcatccctctgcagccgtgccggtgtgcccgcgctcggcctccgccagccccctgacgccgtgcagcgtcacccgaagcgtgcaccgctgcgcccccgccggtgagcgcggggagcgccgcaagcccaacgccgggggcagccccgctccggtgcgccgccggccggaggcctcgccggtgcagaaaaaggagaagaaggacaaggagcgggaaaacgagaaggagaagagtgccctagcccgggagcgcagcctcaagaagcgccagtcgctgcccgcctccccacgtgcccgcctctctgccagcaccgcctctgagctcagccccaaatccaaggccaggccatcctctccctccacatcctggcacaggcctgcctccccctgccccagcccagggccaggccacactctgcctccaaagccaccgtccccccgaggcaccactgcatcccccaaggggcgggttcggaggaaggaggaggcaaaggagagccccagcgccgcagggcccgaggacaagagccagagcaagcgcagggccagtaacgagaaggagtcagcagccccagcctcaccggcaccttcgccggcgccctcgcccaccccagccccgccccagaaggagcagccccccgcggagacccctacagacgctgctgtcttgacctcacccccagcccctgctcccccggtgacccctagcaaaccaatggccggcaccacagaccgagaagaagccactcggctcttggctgagaagcggcgccaggcccgggagcagcgggagcgcgaggagcaggagcggaggctgcaggcagaaagggacaagcgaatgcgagaggagcagctggcacgggaggccgaggcccgggcggagcgggaggcggaggcccggaggcgggaggagcaggaggcacgagagaaggcgcaggccgagcaggaggagcaggagcggctgcagaagcagaaagaggaggccgaagctcggtcgcgggaagaggcggagcggcagcgtctggagcgggaaaagcacttccagcagcaggagcaagagcggcaagagcgcagaaagcgtctggaggagatcatgaagaggactcggaagtcagaagtttctgaaaccaagaagcaggacagcaaggaggccaacgccaacggttccagcccagagcctgtgaaagctgtggaggctcggtccccagggctgcagaaggaggctgtgcagaaagaggagcccatcccacaggagcctcagtggagtctcccaagcaaggagttgccagcgtccctggtgaatggcctgcagcctctcccagcacaccaggagaatggcttctccaccaacggaccctctggggacaagagtctgagccgaacaccagagacactcctgccctttgcagaggcagaagccttcctcaagaaagctgtggtgcagtccccgcaggtcacagaagtcctttaagagggtttgccttggatccgggcacagttgtgagggctcctctgcatcacctaccaggatgtctggaggagaaaaagacagaacaaagatggaagtggcctgggcccctgggggtgggtcctctctgttgtttttaatctgcaccttatagactgatgtctctttggccggagccagatctgcccctcagtgcattcgtgtgctcgcacgcgcagacatcccttctcccccatacacacatatacactcacagcctctctggcctcttcccttggggaggggccacctgtagtatttgccttgatttggtggggtacagtggatgtgaatactgtaaatagcttgtgctcagactcctctgcgtggagagggtgggtgcaggaggcagaccctccccccaaagccccctggggagatcttcctctctctatttaactgtaactgagggggatcccaggtctggggatgggggacaccttgggccacaggatactggttgcttcaggggtacccatgccccctgccctcgcctggaatcagtgttactgcatctgattaaatgtctccagaaataaagaataattctgccaa

SEQ ID NO: 151700 - DNA, 3238 bp, Homo sapiens
  Payload ID: 9855
  Gene Symbol: MAP7D1
  Gene Name: MAP7 domain containing 1
  Uniprot ID: Q3KQU3
  ENST ID: ENST00000373150
  CDS Start-End: 221-2647
gaacgggttcgcgaccgcagccgagagaccccgggcgaccggcacctccgagactcgcgggccacctgcctcgaccttccccggagcgcccccgcctccgagtcgctacttgccgggccgggccgggccgggcgtgatgcgccgcgggacccctgtcctggccactggccgccgccgccgccgccgctgagaccccgagacccccagtgacgccgcagccatggagagcggcccgcgtgcggagctgggggcgggcgcacccccagctgtggtcgccaggacccccccagagccaagaccttctccagaaggtgacccttcccccccaccaccaccaatgtcagccctggtccccgacactcccccggacacccctcctgccatgaagaatgccactagctctaagcagctcccactggaaccagagagcccctcagggcaggtcgggcctaggccagcccccccgcaggaagagtccccttcctctgaagcaaagagcagaggacccaccccaccagccatgggcccacgggatgccagacctcctcgaaggagcagccagccatctccaacagcagtgccagcctccgacagccctcccaccaagcaagaggtgaagaaggcaggagagagacacaagctggcaaaggagcggcgagaagagcgggccaagtacctggcggccaagaaggcagtgtggctggagaaggaggagaaggccaaggcgctgcgggagaagcagctccaggagcgccggcgccggctggaggagcaacgtcttaaagccgagcaacgccgtgcagccctggaggaacggcagcggcagaagctcgagaaaaacaaggagcgctatgaagcagccatccaacggtcagtgaagaagacgtgggccgaaatccggcagcagcgctggtcctgggcaggggccctgcaccacagctctccaggacataagaccagtgggagcaggtgctccgtgtcggcagttaacctgcccaaacacgtggactctataatcaacaagcggctctcaaagtcctctgccacgctctggaactcccccagtagaaatcgcagcctgcagctgagcgcatgggagagcagcatcgtggatcgtctgatgacgcccactctctccttccttgctcggagtcgcagcgcggtcacactgccccgcaacggccgggaccaggccgtgccggtgtgcccgcgctcggcctccgccagccccctgacgccgtgcagcgtcacccgaagcgtgcaccgctgcgcccccgccggtgagcgcggggagcgccgcaagcccaacgccgggggcagccccgctccggtgcgccgccggccggaggcctcgccggtgcagaaaaaggagaagaaggacaaggagcgggaaaacgagaaggagaagagtgccctagcccgggagcgcagcctcaagaagcgccagtcgctgcccgcctccccacgtgcccgcctctctgccagcaccgcctctgagctcagccccaaatccaaggccaggccatcctctccctccacatcctggcacaggcctgcctccccctgccccagcccagggccaggccacactctgcctccaaagccaccgtccccccgaggcaccactgcatcccccaaggggcgggttcggaggaaggaggaggcaaaggagagccccagcgccgcagggcccgaggacaagagccagagcaagcgcagggccagtaacgagaaggagtcagcagccccagcctcaccggcaccttcgccggcgccctcgcccaccccagccccgccccagaaggagcagccccccgcggagacccctacagacgctgctgtcttgacctcacccccagcccctgctcccccggtgacccctagcaaaccaatggccggcaccacagaccgagaagaagccactcggctcttggctgagaagcggcgccaggcccgggagcagcgggagcgcgaggagcaggagcggaggctgcaggcagaaagggacaagcgaatgcgagaggagcagctggcacgggaggccgaggcccgggcggagcgggaggcggaggcccggaggcgggaggagcaggaggcacgagagaaggcgcaggccgagcaggaggagcaggagcggctgcagaagcagaaagaggaggccgaagctcggtcgcgggaagaggcggagcggcagcgtctggagcgggaaaagcacttccagcagcaggagcaagagcggcaagagcgcagaaagcgtctggaggagatcatgaagaggactcggaagtcagaagtttctgaaaccaagaagcaggacagcaaggaggccaacgccaacggttccagcccagagcctgtgaaagctgtggaggctcggtccccagggctgcagaaggaggctgtgcagaaagaggagcccatcccacaggagcctcagtggagtctcccaagcaaggagttgccagcgtccctggtgaatggcctgcagcctctcccagcacaccaggagaatggcttctccaccaacggaccctctggggacaagagtctgagccgaacaccagagacactcctgccctttgcagaggcagaagccttcctcaagaaagctgtggtgcagtccccgcaggtcacagaagtcctttaagagggtttgccttggatccgggcacagttgtgagggctcctctgcatcacctaccaggatgtctggaggagaaaaagacagaacaaagatggaagtggcctgggcccctgggggtgggtcctctctgttgtttttaatctgcaccttatagactgatgtctctttggccggagccagatctgcccctcagtgcattcgtgtgctcgcacgcgcagacatcccttctcccccatacacacatatacactcacagcctctctggcctcttcccttggggaggggccacctgtagtatttgccttgatttggtggggtacagtggatgtgaatactgtaaatagcttgtgctcagactcctctgcgtggagagggtgggtgcaggaggcagaccctccccccaaagccccctggggagatcttcctctctctatttaactgtaactgagggggatcccaggtctggggatgggggacaccttgggccacaggatactggttgcttcaggggtacccatgccccctgccctcgcctggaatcagtgttactgcatctgattaaatgtctccagaaataaagaataattctgccaa

SEQ ID NO: 151701 - DNA, 3324 bp, Homo sapiens
  Payload ID: 9855
  Gene Symbol: MAP7D1
  Gene Name: MAP7 domain containing 1
  Uniprot ID: Q3KQU3
  ENST ID: ENST00000373151
  CDS Start-End: 217-2742
gggttcgcgaccgcagccgagagaccccgggcgaccggcacctccgagactcgcgggccacctgcctcgaccttccccggagcgcccccgcctccgagtcgctacttgccgggccgggccgggccgggcgtgatgcgccgcgggacccctgtcctggccactggccgccgccgccgccgccgctgagaccccgagacccccagtgacgccgcagccatggagagcggcccgcgtgcggagctgggggcgggcgcacccccagctgtggtcgccaggacccccccagagccaagaccttctccagaaggtgacccttcccccccaccaccaccaatgtcagccctggtccccgacactcccccggacacccctcctgccatgaagaatgccactagctctaagcagctcccactggaaccagagagcccctcagggcaggtcgggcctaggccagcccccccgcaggaagagtccccttcctctgaagcaaagagcagaggacccaccccaccagccatgggcccacgggatgccagacctcctcgaaggagcagccagccatctccaacagcagtgccagcctccgacagccctcccaccaagcaagaggtgaagaaggcaggagagagacacaagctggcaaaggagcggcgagaagagcgggccaagtacctggcggccaagaaggcagtgtggctggagaaggaggagaaggccaaggcgctgcgggagaagcagctccaggagcgccggcgccggctggaggagcaacgtcttaaagccgagcaacgccgtgcagccctggaggaacggcagcggcagaagctcgagaaaaacaaggagcgctatgaagcagccatccaacggtcagtgaagaagacgtgggccgaaatccggcagcagcgctggtcctgggcaggggccctgcaccacagctctccaggacataagaccagtgggagcaggtgctccgtgtcggcagttaacctgcccaaacacgtggactctataatcaacaagcggctctcaaagtcctctgccacgctctggaactcccccagtagaaatcgcagcctgcagctgagcgcatgggagagcagcatcgtggatcgtctgatgacgcccactctctccttccttgctcggagtcgcagcgcggtcacactgccccgcaacggccgggaccagggtaggggctgcgaccctgggagaggccccacgtggggccgggcaggggccagcctggcgcgcgggccgcaacccgaccgcactcatccctctgcagccgtgccggtgtgcccgcgctcggcctccgccagccccctgacgccgtgcagcgtcacccgaagcgtgcaccgctgcgcccccgccggtgagcgcggggagcgccgcaagcccaacgccgggggcagccccgctccggtgcgccgccggccggaggcctcgccggtgcagaaaaaggagaagaaggacaaggagcgggaaaacgagaaggagaagagtgccctagcccgggagcgcagcctcaagaagcgccagtcgctgcccgcctccccacgtgcccgcctctctgccagcaccgcctctgagctcagccccaaatccaaggccaggccatcctctccctccacatcctggcacaggcctgcctccccctgccccagcccagggccaggccacactctgcctccaaagccaccgtccccccgaggcaccactgcatcccccaaggggcgggttcggaggaaggaggaggcaaaggagagccccagcgccgcagggcccgaggacaagagccagagcaagcgcagggccagtaacgagaaggagtcagcagccccagcctcaccggcaccttcgccggcgccctcgcccaccccagccccgccccagaaggagcagccccccgcggagacccctacagacgctgctgtcttgacctcacccccagcccctgctcccccggtgacccctagcaaaccaatggccggcaccacagaccgagaagaagccactcggctcttggctgagaagcggcgccaggcccgggagcagcgggagcgcgaggagcaggagcggaggctgcaggcagaaagggacaagcgaatgcgagaggagcagctggcacgggaggccgaggcccgggcggagcgggaggcggaggcccggaggcgggaggagcaggaggcacgagagaaggcgcaggccgagcaggaggagcaggagcggctgcagaagcagaaagaggaggccgaagctcggtcgcgggaagaggcggagcggcagcgtctggagcgggaaaagcacttccagcagcaggagcaagagcggcaagagcgcagaaagcgtctggaggagatcatgaagaggactcggaagtcagaagtttctgaaaccaagcagaagcaggacagcaaggaggccaacgccaacggttccagcccagagcctgtgaaagctgtggaggctcggtccccagggctgcagaaggaggctgtgcagaaagaggagcccatcccacaggagcctcagtggagtctcccaagcaaggagttgccagcgtccctggtgaatggcctgcagcctctcccagcacaccaggagaatggcttctccaccaacggaccctctggggacaagagtctgagccgaacaccagagacactcctgccctttgcagaggcagaagccttcctcaagaaagctgtggtgcagtccccgcaggtcacagaagtcctttaagagggtttgccttggatccgggcacagttgtgagggctcctctgcatcacctaccaggatgtctggaggagaaaaagacagaacaaagatggaagtggcctgggcccctgggggtgggtcctctctgttgtttttaatctgcaccttatagactgatgtctctttggccggagccagatctgcccctcagtgcattcgtgtgctcgcacgcgcagacatcccttctcccccatacacacatatacactcacagcctctctggcctcttcccttggggaggggccacctgtagtatttgccttgatttggtggggtacagtggatgtgaatactgtaaatagcttgtgctcagactcctctgcgtggagagggtgggtgcaggaggcagaccctccccccaaagccccctggggagatcttcctctctctatttaactgtaactgagggggatcccaggtctggggatgggggacaccttgggccacaggatactggttgcttcaggggtacccatgccccctgccctcgcctggaatcagtgttactgcatctgattaaatgtctccagaaataaagaataa

SEQ ID NO: 151702 - DNA, 959 bp, Homo sapiens
  Payload ID: 9855
  Gene Symbol: MAP7D1
  Gene Name: MAP7 domain containing 1
  ENST ID: ENST00000429533
  CDS Start-End: 227-959
acaagcgcagaatgccggagcaagggcggcagcaaggctcccagacctgtccccagcccagccatcagcaggggagagaaagcgaaaccctttcaggggtctccttgtgactctccttcatgcctcccgacgtcccccgggccgctttggtttagctgtggtcgccaggacccccccagagccaagaccttctccagaaggtgacccttcccccccaccaccaccaatgtcagccctggtccccgacactcccccggacacccctcctgccatgaagaatgccactagctctaagcagctcccactggaaccagagagcccctcagggcaggtcgggcctaggccagcccccccgcaggaagagtccccttcctctgaagcaaagagcagaggacccaccccaccagccatgggcccacgggatgccagacctcctcgaaggagcagccagccatctccaacagcagtgccagcctccgacagccctcccaccaagcaagaggtgaagaaggcaggagagagacacaagctggcaaaggagcggcgagaagagcgggccaagtacctggcggccaagaaggcagtgtggctggagaaggaggagaaggccaaggcgctgcgggagaagcagctccaggagcgccggcgccggctggaggagcaacgtcttaaagccgagcaacgccgtgcagccctggaggaacggcagcggcagaagctcgagaaaaacaaggagcgctatgaagcagccatccaacggtcagtgaagaagacgtgggccgaaatccggcagcagcgctggtcctgggcaggggccctgcaccacagctctccaggacataagaccagtgggagcaggtgctccgtgtcggcagttaacctgcccaaacacgtggactctataatcaacaagcggctctcaaagtcctctgccacgctctggaactcccccagtagaa

SEQ ID NO: 151703 - DNA, 567 bp, Homo sapiens
  Payload ID: 9855
  Gene Symbol: MAP7D1
  Gene Name: MAP7 domain containing 1
  ENST ID: ENST00000530729
  CDS Start-End: 148-567
acagaagtaaatctgcttctcctgcctgccctccttcccagcctctctgggccccaatctcccactagagaatgagctgtggtcgccaggacccccccagagccaagaccttctccagaaggtgacccttcccccccaccaccaccaatgtcagccctggtccccgacactcccccggacacccctcctgccatgaagaatgccactagctctaagcagctcccactggaaccagagagcccctcagggcaggtcgggcctaggccagcccccccgcaggaagagtccccttcctctgaagcaaagagcagaggacccaccccaccagccatgggcccacgggatgccagacctcctcgaaggagcagccagccatctccaacagcagtgccagcctccgacagccctcccaccaagcaagaggtgaagaaggcaggagagagacacaagctggcaaaggagcggcgagaagagcgggccaagtacctggcggccaagaaggcagtgtggctggagaaggaggagaaggccaaggcgctgcgggagaagcagctccaggagcgccgg

SEQ ID NO: 151704 - DNA, 744 bp, Homo sapiens
  Payload ID: 9855
  Gene Symbol: MAP7D1
  Gene Name: MAP7 domain containing 1
  ENST ID: ENST00000530975
  CDS Start-End: 1-744
ggacaaggagcgggaaaacgagaaggagaagagtgccctagcccgggagcgcagcctcaagaagcgccagtcgctgcccgcctccccacgtgcccgcctctctgccagcaccgcctctgagctcagccccaaatccaaggccaggccatcctctccctccacatcctggcacaggcctgcctccccctgccccagcccagggccaggccacactctgcctccaaagccaccgtccccccgaggcaccactgcatcccccaaggggcgggttcggaggaaggaggaggcaaaggagagccccagcgccgcagggcccgaggacaagagccagagcaagcgcagggccagtaacgagaaggagtcagcagccccagcctcaccggcaccttcgccggcgccctcgcccaccccagccccgccccagaaggagcagccccccgcggagacccctacagcccctgctcccccggtgacccctagcaaaccaatggccggcaccacagaccgagaagaagccactcggctcttggctgagaagcggcgccaggcccgggagcagcgggagcgcgaggagcaggagcggaggctgcaggcagaaagggacaagcgaatgcgagaggagcagctggcacgggaggccgaggcccgggcggagcgggaggcggaggcccggaggcgggaggagcaggaggcacgagagaaggcgcaggccgagcaggaggagcaggagcggctgcagaagca

SEQ ID NO: 151705 - DNA, 3918 bp, Homo sapiens
  Payload ID: 9856
  Gene Symbol: MAP7D2
  Gene Name: MAP7 domain containing 2
  Uniprot ID: Q96T17
  ENST ID: ENST00000379643
  CDS Start-End: 39-2360
cgggcttggcagtgcgcctgtgcggccggcgcatcccgatggagcgcggcggcggcggctccgggacgggatcccggcctgaggggactgcgcggggaacctctctcccagggaagatcgcagaaccgggcgcggtgcggacctctcagcccaactaccggcctcaaggcatggagggatttttgaaatcagatgagaggcagagattggccaaagaaagacgagaagaaagagaaaaatgtctggctgctcgggagcaacagatcctggagaaacagaaaagagccaggctgcagtacgaaaagcaaatggaggagcgatggcgaaaactggaagagcagcggcagcgggaggaccaaaagagagctgctgtggaagagaaaaggaaacagaagctccgggaggaggaggaacggctggaggcgatgatgcgccggtccctggagcgcacacagcagctggagctgaaaaagaagtattcgtggggagcaccactggccattggacccggaggacatgatgcatgtgacaaactttcaacatcaactatgagtttgccaaagccaacggagcctcccatgaataaacgcctgtcttcatccaccgtggcaatatcctattccccagaccgagctcatcacatgcaccttagtccaatggaagccattcttgtttcgcgactgttgacacccacacagtcttctttagccagaagcagagcttcagtcatgctctctgggcaggccaatgattcagtattccatgtctgtcctcgtttagctcctcttggccctcttaacccttcttacaagtcttcacccactcgaaacattgagaagaagaaagctacatctacgtctacatctggtgcaggagatgttgggaaagaagccctttcaggaggagaggcctctctggtggagaaggtgaagcgggggcaacgaacagcaacttctcttcctgttgtgaacttcgggtcccctctgagaagatgtgagttttctggaggcattcctaagagaccatcttctcctgtgatatccaagacagctactaaagcttatccacagtctccaaagacaacgaaacctccctacccagggtctcctgtgaagtaccgcttacctgccctttctggccaagacatgcccaagaggaaagcggagaaagagaagagcaacaaggaaagggaaggtaccttggctcagcaggctgctggcccgcaaggagaggaagccctagagaagcatgtagtggacaagcatgccagcgagaagcatgctgctgccgcaggagggaaagccgaaaacagcgcagccttggggaagcccacagcaggcaccactgatgcaggagaggctgcgaagatcttggctgaaaagagaagacaggcccggctgcagaaggaacaggaggagcaagaacgactggagaaggaagaacaagataggctggagagagaggaattgaaaagaaaggcagaggaggaaaggcttcgcctagaagaggaagcccgaaagcaggaagaagaaaggaagcggcaggaagaggaaaagaaaaaacaggaaggggaagagaaaagaaaggcaggcgaggaggccaagcggaaggctgaggaggagctgttgttgaaagaaaagcaagaacaagaaaaacaagagaaagccatgattgaaaagcagaaagaagcagcagaaacaaaggcccgggaggtagctgaacagatgcgtctcgagagagaacagattatgctgcagattgagcaggagagactggagagaaagaagagaatagatgaaatcatgaagagaacaaggaaaagtgatgtgtctccacaagtgaagaaagaagaccccaaagtgggggtccagcctgctgtgtgtgtggaaaagaagacaaaactggttgtccccaacaaaatggaaatcaatggattgaacacctgccaggaagttaatggtgtggatcacgctgccccagaaacttatccccaagacattttctctaatgggcttaagccagctgggggactcattcatctggatgcccttgatgggaaatcaaatagcctggatgattcaactgaagaagttcagtctatggatgtgagtcctgtttcaaaagaagagcttatctctatcccggaattttcaccagtgagtgaaatgattcctggggtgtctctggaccaaaatggaactggtaatgcccgagcacttcaagatctcttagatttcactggtcccccgacattccccaagagatccagtgaaaatctcagcctggacgactgtaacaaaaaccttatcgaaggatttaacagtcctggccaagaaactcctctcaacaccttctgttgacaaatacagcatccctttaataaaaggtgtttggagaacccgtaaagctgctgatagtcaaatccgagctactagctgcttgaagaagcttctgtcacccttaccgctggatcccaaattattagctcggaatgtaactgtattcctaggtagtatgtcaaacactggccactcttggtagaaaccttgaaactttcaccttgctgggctttagcaaagtttccttttacagttctgtttatgagcttcagctactgataaagcacttcctgaacttctctattatcatagtgaccctctgaataacctgagtgactggctcggcaattcgctttataaccattcttattcccaaagttggagcacataaacatttagatgtcttttcctgtaaaatattctagacatttacccaaactctagttcaacatatactcaacttgcactgtatatctccctgtcttttttgagacagagaagaaattcaggaggttccccatctccagagtttctctgttggaaagcagtatcaagaagcctttaaaaaattgttgttaagctttgccacctgcagaaatgcattgccccacattattcttctggggttaaagtagtaagtttggttgaggaaggaagtcaaaacagtcagtaatgatttctgttctcttatgcatattcgtgtatacatgggcaactgaatctagcaaggactctttcgtgtcacaccttaaaatcttcatgctgtagtcactccagaccatggagtggctttccagctgaatgaatcctatgtctcgcgtgcaggtggttggttttcaatgttcttgctaattttttttctattggatcttgggagttttctttgtttgctcctgtgtttgcccagctttaataaaaccaggcgcaaacaaaaaccatagcattctgaaacaatagggggcccacattggacccagtatgtcactttaatggacttcaagaaaaaatctgaatgggaaaaatgacactagaatgtatactccacacattttatgccatataatggtgtgttttcttaattttgtttcttgtggcgaaatgtggctttcaaattaaaatgaccttttcttctttgaaactttttgttttgacttgtataattaagggtttggaaagattcataattctgagagaggtttgcaaccaggagatacaaagaagtctcagtagtaatcttgttcatgtgcttttacagccagctacatttaagaatgtattagttacagaaattatatgtctgtgtatgtgtctctactcaataaagtacatgcctccacataatgcggtgctgtccatctcggcaaatactggccaagtccctttatgacaggcacacagaaaccatagcatggtctggctttcagaaaatgcctctcatctttcctggaaccttattttgctaaatgtctgttttcttgtgatttgttgtacctcacagcaccattgtgaccatggtgatgcctcatttgcatgatatgtaccttgtgtttaatgtgaaatacattttcattgaagagtc

SEQ ID NO: 151706 - DNA, 3930 bp, Homo sapiens
  Payload ID: 9856
  Gene Symbol: MAP7D2
  Gene Name: MAP7 domain containing 2
  Uniprot ID: Q96T17
  ENST ID: ENST00000379651
  CDS Start-End: 20-2218
gtgcggccggcgcatcccgatggagcgcggcggcggcggctccgggacgggatcccggcctgaggggactgcgcggggaacctctctcccagggaagatcgcagaaccgggcgcggtgcggacctctcagcccaactaccggcctcaaggcatggagggatttttgaaatcagatgagaggcagagattggccaaagaaagacgagaagaaagagaaaaatgtctggctgctcgggagcaacagatcctggagaaacagaaaagagccaggctgcagtacgaaaagcaaatggaggagcgatggcgaaaactggaagagcagcggcagcgggaggaccaaaagagagctgctgtggaagagaaaaggaaacagaagctccgggaggaggaggaacggctggaggcgatgatgcgccggtccctggagcgcacacagcagctggagctgaaaaagaagtattcgtggggagcaccactggccattggacccggaggacatgatgcatgtgacaaactttcaacatcaactatgagtttgccaaagccaacggagcctcccatgaataaacgcctgtcttcatccaccgtggcaatatcctattccccagaccgagtattccatgtctgtcctcgtttagctcctcttggccctcttaacccttcttacaagtcttcacccactcgaaacattgagaagaagaaagctacatctacgtctacatctggtgcaggagatgttgggaaagaagccctttcaggaggagaggcctctctggtggagaaggtgaagcgggggcaacgaacagcaacttctcttcctgttgtgaacttcgggtcccctctgagaagatgtgagttttctggaggcattcctaagagaccatcttctcctgtgatatccaagacagctactaaagcttatccacagtctccaaagacaacgaaacctccctacccagggtctcctgtgaagtaccgcttacctgccctttctggccaagacatgcccaagaggaaagcggagaaagagaagagcaacaaggaaagggaaggtaccttggctcagcaggctgctggcccgcaaggagaggaagccctagagaagcatgtagtggacaagcatgccagcgagaagcatgctgctgccgcaggagggaaagccgaaaacagcgcagccttggggaagcccacagcaggcaccactgatgcaggagaggctgcgaagatcttggctgaaaagagaagacaggcccggctgcagaaggaacaggaggagcaagaacgactggagaaggaagaacaagataggctggagagagaggaattgaaaagaaaggcagaggaggaaaggcttcgcctagaagaggaagcccgaaagcaggaagaagaaaggaagcggcaggaagaggaaaagaaaaaacaggaaggggaagagaaaagaaaggcaggcgaggaggccaagcggaaggctgaggaggagctgttgttgaaagaaaagcaagaacaagaaaaacaagagaaagccatgattgaaaagcagaaagaagcagcagaaacaaaggcccgggaggtagctgaacagatgcgtctcgagagagaacagattatgctgcagattgagcaggagagactggagagaaagaagagaatagatgaaatcatgaagagaacaaggaaaagtgatgtgtctccacaagtgaagaaagaagaccccaaagtgggggtccagcctgctgtgtgtgtggaaaagaagacaaaactggttgtccccaacaaaatggaaatcaatggattgaacacctgccaggaagttaatggtgtggatcacgctgccccagaaacttatccccaagacattttctctaatgggcttaagccagctgggggactcattcatctggatgcccttgatgggaaatcaaatagcctggatgattcaactgaagaagttcagtctatggatgtgagtcctgtttcaaaagaagagcttatctctatcccggaattttcaccagtgagtgaaatgattcctggggtgtctctggaccaaaatggaactggtaatgcccgagcacttcaagatctcttagatttcactggtcccccgacattccccaagagatccagtgaaaatctcagcctggacgactgtaacaaaaaccttatcgaaggatttaacagtcctggccaagaaactcctctcaacaccttctgttgacaaatacagcatccctttaataaaaggtgtttggagaacccgtaaagctgctgatagtcaaatccgagctactagctgcttgaagaagcttctgtcacccttaccgctggatcccaaattattagctcggaatgtaactgtattcctaggtagtatgtcaaacactggccactcttggtagaaaccttgaaactttcaccttgctgggctttagcaaagtttccttttacagttctgtttatgagcttcagctactgataaagcacttcctgaacttctctattatcatagtgaccctctgaataacctgagtgactggctcggcaattcgctttataaccattcttattcccaaagttggagcacataaacatttagatgtcttttcctgtaaaatattctagacatttacccaaactctagttcaacatatactcaacttgcactgtatatctccctgtcttttttgagacagagaagaaattcaggaggttccccatctccagagtttctctgttggaaagcagtatcaagaagcctttaaaaaattgttgttaagctttgccacctgcagaaatgcattgccccacattattcttctggggttaaagtagtaagtttggttgaggaaggaagtcaaaacagtcagtaatgatttctgttctcttatgcatattcgtgtatacatgggcaactgaatctagcaaggactctttcgtgtcacaccttaaaatcttcatgctgtagtcactccagaccatggagtggctttccagctgaatgaatcctatgtctcgcgtgcaggtggttggttttcaatgttcttgctaattttttttctattggatcttgggagttttctttgtttgctcctgtgtttgcccagctttaataaaaccaggcgcaaacaaaaaccatagcattctgaaacaatagggggcccacattggacccagtatgtcactttaatggacttcaagaaaaaatctgaatgggaaaaatgacactagaatgtatactccacacattttatgccatataatggtgtgttttcttaattttgtttcttgtggcgaaatgtggctttcaaattaaaatgaccttttcttctttgaaactttttgttttgacttgtataattaagggtttggaaagattcataattctgagagaggtttgcaaccaggagatacaaagaagtctcagtagtaatcttgttcatgtgcttttacagccagctacatttaagaatgtattagttacagaaattatatgtctgtgtatgtgtctctactcaataaagtacatgcctccacataatgcggtgctgtccatctcggcaaatactggccaagtccctttatgacaggcacacagaaaccatagcatggtctggctttcagaaaatgcctctcatctttcctggaaccttattttgctaaatgtctgttttcttgtgatttgttgtacctcacagcaccattgtgaccatggtgatgcctcatttgcatgatatgtaccttgtgtttaatgtgaaatacattttcattgaagagtctgatgacttgctagcgttttattttttctgtaagctcaatgtgctgaaaccaaaccaggcttttaaaaacctgtgtagaagaaaaccaaaaaatcctgtgtgggtgtcctttccctgtcaaactcattaaaaattcctttgttgccagtgccaa

SEQ ID NO: 151707 - DNA, 2476 bp, Homo sapiens
  Payload ID: 9856
  Gene Symbol: MAP7D2
  Gene Name: MAP7 domain containing 2
  Uniprot ID: Q96T17
  ENST ID: ENST00000443379
  CDS Start-End: 26-2089
gcgcctgtgcggccggcgcatcccgatggagcgcggcggcggcggctccgggacgggatcccggcctgaggggactgcgcggggaacctctctcccagggaagatcgcagaaccgggcgcggtgcggacctctcagcccaactaccggcctcaaggcatggagggatttttgaaatcagatgagaggcagagattggccaaagaaagacgagaagaaagagaaaaatgtctggctgctcgggagcaacagatcctggagaaacagaaaagagccaggctgcagtacgaaaagcaaatggaggagcgatggcgaaaactggaagagcagcggcagcgggaggaccaaaagagagctgctgtggaagagaaaaggaaacagaagctccgggaggaggaggaacggctggaggcgatgatgcgccggtccctggagcgcacacagcagctggagctgaaaaagaagtattcgtggggagcaccactggccattggacccggaggacatgatgctcctcttggccctcttaacccttcttacaagtcttcacccactcgaaacattgagaagaagaaagctacatctacgtctacatctggtgcaggagatgttgggaaagaagccctttcaggaggagaggcctctctggtggagaaggtgaagcgggggcaacgaacagcaacttctcttcctgttgtgaacttcgggtcccctctgagaagatgtgagttttctggaggcattcctaagagaccatcttctcctgtgatatccaagacagctactaaagcttatccacagtctccaaagacaacgaaacctccctacccagggtctcctgtgaagtaccgcttacctgccctttctggccaagacatgcccaagaggaaagcggagaaagagaagagcaacaaggaaagggaaggtaccttggctcagcaggctgctggcccgcaaggagaggaagccctagagaagcatgtagtggacaagcatgccagcgagaagcatgctgctgccgcaggagggaaagccgaaaacagcgcagccttggggaagcccacagcaggcaccactgatgcaggagaggctgcgaagatcttggctgaaaagagaagacaggcccggctgcagaaggaacaggaggagcaagaacgactggagaaggaagaacaagataggctggagagagaggaattgaaaagaaaggcagaggaggaaaggcttcgcctagaagaggaagcccgaaagcaggaagaagaaaggaagcggcaggaagaggaaaagaaaaaacaggaaggggaagagaaaagaaaggcaggcgaggaggccaagcggaaggctgaggaggagctgttgttgaaagaaaagcaagaacaagaaaaacaagagaaagccatgattgaaaagcagaaagaagcagcagaaacaaaggcccgggaggtagctgaacagatgcgtctcgagagagaacagattatgctgcagattgagcaggagagactggagagaaagaagagaatagatgaaatcatgaagagaacaaggaaaagtgatgtgtctccacaagtgaagaaagaagaccccaaagtgggggtccagcctgctgtgtgtgtggaaaagaagacaaaactggttgtccccaacaaaatggaaatcaatggattgaacacctgccaggaagttaatggtgtggatcacgctgccccagaaacttatccccaagacattttctctaatgggcttaagccagctgggggactcattcatctggatgcccttgatgggaaatcaaatagcctggatgattcaactgaagaagttcagtctatggatgtgagtcctgtttcaaaagaagagcttatctctatcccggaattttcaccagtgagtgaaatgattcctggggtgtctctggaccaaaatggaactggtaatgcccgagcacttcaagatctcttagatttcactggtcccccgacattccccaagagatccagtgaaaatctcagcctggacgactgtaacaaaaaccttatcgaaggatttaacagtcctggccaagaaactcctctcaacaccttctgttgacaaatacagcatccctttaataaaaggtgtttggagaacccgtaaagctgctgatagtcaaatccgagctactagctgcttgaagaagcttctgtcacccttaccgctggatcccaaattattagctcggaatgtaactgtattcctaggtagtatgtcaaacactggccactcttggtagaaaccttgaaactttcaccttgctgggctttagcaaagtttccttttacagttctgtttatgagcttcagctactgataaagcacttcctgaacttctctattatcatagtgaccctctgaataacctgagtgactggctcggcaattcgctttataaccattcttattcccaaagttggagcacataaacatttagatgtctttt

SEQ ID NO: 151708 - DNA, 2233 bp, Homo sapiens
  Payload ID: 9856
  Gene Symbol: MAP7D2
  Gene Name: MAP7 domain containing 2
  Uniprot ID: Q96T17
  ENST ID: ENST00000452324
  CDS Start-End: 105-2147
gagataaacgccctttccctggcccaggatcgtccggacgtgcatccaagggccgcacccctctctgtgcgagtggcggggttctttcttggggcgacctgggcatggagggatttttgaaatcagatgagaggcagagattggccaaagaaagacgagaagaaagagaaaaatgtctggctgctcgggagcaacagatcctggagaaacagaaaagagccaggctgcagtacgaaaagcaaatggaggagcgatggcgaaaactggaagagcagcggcagcgggaggaccaaaagagagctgctgtggaagagaaaaggaaacagaagctccgggaggaggaggaacggctggaggcgatgatgcgccggtccctggagcgcacacagcagctggagctgaaaaagaagtattcgtggggagcaccactggccattggacccggaggacatgatgcatgtgacaaactttcaacatcaactatgagtttgccaaagccaacggagcctcccatgaataaacgcctgtcttcatccaccgtggcaatatcctattccccagaccgagctcctcttggccctcttaacccttcttacaagtcttcacccactcgaaacattgagaagaagaaagctacatctacgtctacatctggtgcaggagatgttgggaaagaagccctttcaggaggagaggcctctctggtggagaaggtgaagcgggggcaacgaacagcaacttctcttcctgttgtgaacttcgggtcccctctgagaagatgtgagttttctggaggcattcctaagagaccatcttctcctgtgatatccaagacagctactaaagcttatccacagtctccaaagacaacgaaacctccctacccagggtctcctgtgaagtaccgcttacctgccctttctggccaagacatgcccaagaggaaagcggagaaagagaagagcaacaaggaaagggaaggtaccttggctcagcaggctgctggcccgcaaggagaggaagccctagagaagcatgtagtggacaagcatgccagcgagaagcatgctgctgccgcaggagggaaagccgaaaacagcgcagccttggggaagcccacagcaggcaccactgatgcaggagaggctgcgaagatcttggctgaaaagagaagacaggcccggctgcagaaggaacaggaggagcaagaacgactggagaaggaagaacaagataggctggagagagaggaattgaaaagaaaggcagaggaggaaaggcttcgcctagaagaggaagcccgaaagcaggaagaagaaaggaagcggcaggaagaggaaaagaaaaaacaggaaggggaagagaaaagaaaggcaggcgaggaggccaagcggaaggctgaggaggagctgttgttgaaagaaaagcaagaacaagaaaaacaagagaaagccatgattgaaaagcagaaagaagcagcagaaacaaaggcccgggaggtagctgaacagatgcgtctcgagagagaacagattatgctgcagattgagcaggagagactggagagaaagaagagaatagatgaaatcatgaagagaacaaggaaaagtgatgtgtctccacaagtgaagaaagaagaccccaaagtgggggtccagcctgctgtgtgtgtggaaaagaagacaaaactggttgtccccaacaaaatggaaatcaatggattgaacacctgccaggaagttaatggtgtggatcacgctgccccagaaacttatccccaagacattttctctaatgggcttaagccagctgggggactcattcatctggatgcccttgatgggaaatcaaatagcctggatgattcaactgaagaagttcagtctatggatgtgagtcctgtttcaaaagaagagcttatctctatcccggaattttcaccagtgagtgaaatgattcctggggtgtctctggaccaaaatggaactggtaatgcccgagcacttcaagatctcttagatttcactggtcccccgacattccccaagagatccagtgaaaatctcagcctggacgactgtaacaaaaaccttatcgaaggatttaacagtcctggccaagaaactcctctcaacaccttctgttgacaaatacagcatccctttaataaaaggtgtttggagaacccgtaaagctgctgatagtcaaatccgagctactagctgcttgaaga

SEQ ID NO: 151709 - DNA, 4567 bp, Homo sapiens
  Payload ID: 9857
  Gene Symbol: MAP7D3
  Gene Name: MAP7 domain containing 3
  Uniprot ID: Q8IWC1
  ENST ID: ENST00000316077
  CDS Start-End: 222-2852
agaccaggtagtcgctgcccagccggtcaggacgtgggacgcaaggggcaatcctgcccggttcgcaggtccgaggcgggcgcggtggcccttcgggccccgccccgccccgccccgccccgccccgcccaccggcagcccggccacgacccaagcggaggccgcgccgacgcctgcgcaatgtatgcggagagccaccaccgcctccggtcccgactccgatgatggcggacggcgccgcagctggcgctggcggcagcccatccttgagagagctgcgggcacggatggttgctgcagcaaacgagattgctaaggaaaggaggaagcaagatgtggttaatcgtgttgcaacccattcctcaaatataagatcgacatttaaaccagtaatcgatggatccatgcttaaaaatgacataaaacaaagattagcaagagagcgcagagaggagaaaaggagacagcaagacgccaataaagaaacacaactacttgaaaaagaaagaaagaccaagctccaatatgaaaaacagatggaggaaagacagagaaagctgaaggagcgaaaagagaaagaagaacaacggagaatagctgcagaagaaaaaagacaccagaaggatgaagcacaaaaggaaaaatttacagccattctttatcgtactttggaacggaggagacttgctgatgattatcagcaaaaaagatggtcatggggaggctctgcaatggcgaattctgagagcaaaactgccaataaacgatctgcatctactgaaaaacttgaacagggtacttctgctttaatcagacaaatgcctttgtcatctgcaggccttcaaaattccgttgccaaaaggaaaacagacaaggagagaagctcatctttaaatagaagagatagtaacctacattcgtctactgataaagaacaagccgaaaggaagccacgtgttacaggcgtcaccaattatgtaatgcagtatgtcactgtacccttgcgtaaatgtactagcgacgaattgagggctgttatgtttcccatgtcgacaatgaaaatacctcctcaaacaaaagtagaagagtctcccttggagaaagtagagacacctcccaaggcaagtgtggatgcacccccccaggtgaatgtggaagtattctgcaacacaagcatggaagcgtcccccaaggcaggtgtgggcatggcccctgaggtgagcacggactcattccctgtggtgagcgtggacgtgtcgcctgtggtgagcacatatgattctgagatgagcatggacgcatcccccgagttgagcatagaagcactcccgaaggtggacctggaaacagttcccaaggtgagcatagtagcatccccggaggcgagcctggaagcacccccggaagtgagtctggaagcactgccagaggtgagcgtggaagcagccccagaggggagcctggaagcacctcccaaggggagcgcagaagtagcccccaaggagagtgtgaaagggtcacccaaggagagcatggaggcatctcctgaggcgatggtgaaagcatcccccaagacatcccttgaagcaagcatggaagcatctcccaaggcaaaagcgagagacgctccaaagaaatcagaaatggacaaacaggccttaatccctattgccaagaagcgtctatcatcatacactgagtgttataaatggtcatcatctcctgaaaatgcttgtggtctgccgtctcccatcagcactaacaggcaaatccaaaagaactgccctccatcaccattaccacttatttcaaaacagtcaccacagacttcttttccttataaaataatgcctattcaacacaccctgtctgtgcaaagtgcatcaagtactgtcaaaaagaaaaaagaaacagtttctaaaaccactaacagatgtgaggctttgagccaaaggcatatgatctatgaagagtctggtaataagagtactgcaggtattatgaatgccgaggcggcaacaaaaattttgacagaattgcgccgccttgctcgtgaacaaagagaaaaagaggaagaagaaagacaacgggaagaaatgcagcaaagggtcattaagaaatcaaaagacatggcaaaggaagcagttggaggccaagcagaagaccacttgaaactcaaagatgggcagcaacaaaatgagactaaaaagaagaaaggatggctggatcaggaagaccaggaagcaccactgcagaaaggggacgccaaaataaaagctcaagaggaagctgacaaacgcaagaaagaacacgagagaattatgttacaaaatttacaagaacggttagaaaggaaaaagagaatagaagaaattatgaagcggacaagaaagacagatgtgaatgcctcaaaggtcacagaaacatccagccatgacatatatgaagaggctgaggctgacaacgaagaaagcgacaaggactcattgaatgaaatgtttccatcagccattctaaatggcacaggctcacctaccaaatttaaaatgccgttcaacaatgccaagaaaatgacacacaagctggtatttctagaagatggtaccagccaggtccgtaaagagccaaaaacatattttaatggcgatttgaaaaacttcagacaaaaaagcatgaaagacacttcaatacaggaagtagtttcaagaccatcttccaaaagaatgaccagtcacacaacgaaaaccagaaaggcggatgaaaccaacaccaccagcagatcctctgcacaaacaaaatctgaaggattccatgacatcttgccaaagtcctcagacacctttagacaataagagaagaagcaaacctgtttctcctcatttggatatgtaaaccttactcagcctgggagatgaatacatcttccactctggataactcaactcctgggcccatcagtcctcaaatttttctgcttctgacttgaacctggtaaaggaagtgacaccgaaaaattgaaagaaactgtcaaaaggccactttgatgtatatctcagatgttaaagtcatcttattctcttgtgtctaagcaagagttctaagtaaagagtggtttttgttttctttggaaaatcatcattgtctctcattcttgtgttgtcccaccaatgtgtttgctggagtgagtgcatcaaggatgctttcctgaaactgtaactgtggagtttctagaagaatctgattgcagaactaattctctttcagtatatatttgaaatcttaaagtaatgctttttctttttctttttcttttttttttttttgagacggagtcttgccctgtcgcccaggctgcagtgcagtggcacaatctcggctcactgcaacctccgcctcctcatctcaagcaattctcctgtctcagcctccccagtagctgggattacaggcatgtgccaccacacctggctaatttttttgtattttagtagagatagggttttaccatgttcaccaggctagtctcgaaatcctggcctcaagagatccacccgtcttggcctcccaaagtgttgggattacaggtgtgagccactgcacccagccaagtaatgctttttctgtgtaccagtgacaattttgacagctaaaaactcacagttgatcttgtagagaacagaatagattatgcaagggccgcaggatcgctcacaagagctgtcagattgtttctaatataaaaataccaaaggttgcaaaatccagcaaattgtattttactgtgatatatgtatatttttaactctacccatctgtgccagtgagtacacaggcactaataacctgaaatgctgggagtcctgtaaagccccatcttggaacagtcagcacctttcatgctcttgtcagtgtttccttttgaaggacatattggtgtttatctacagaaacatatattatttttattgtgtacataaaggagtatatggctgttgtcccgtggggtatgtttaattcctctaaatgtttaaagtacttttctgcctgtactctccagttctgtcgttgagtatacactcaggcttgagatacaaccaaaatttgcttgcctttctctagccactggctgccagtgagttcgtgtgatgggcacacagaaatgcacacagatgtacatacacgtatgtatgcacacacagtatatgattccataaaattcaaatgcagattaattctcctaatgagttttcagtgttgaatcgtaaatagtctgaagcaggccagtgttccttttggctgccagtcttggattagtaaaaggaggtaattctttcagattccctggttctttgccactcagagtattgtacttttgatatagaatagagaaggttacctttggtttaaaaactatttttatatactagctctttcatgtataaaacagagacaatcatcctaacaaaagagttcctgttatttttctgcacaaatgtcttgtgttgaaacactgttacagttccatataaatgtgtgctatataaaataaactttggagataaaacaa

SEQ ID NO: 151710 - DNA, 2432 bp, Homo sapiens
  Payload ID: 9857
  Gene Symbol: MAP7D3
  Gene Name: MAP7 domain containing 3
  ENST ID: ENST00000370660
  CDS Start-End: 25-2432
ccaccgcctccggtcccgactccgatgatggcggacggcgccgcagctggcgctggcggcagcccatccttgagagagctgcgggcacggatggttgctgcagcaaacgagattgctaaggaaaggaggaagcaagatgtggttaatcgtgttgcaacccattcctcaaatataagatcgacatttaaaccagtaatcgatggatccatgcttaaaaatgacataaaacaaagattagcaagagagcgcagagaggagaaaaggagacagcaagacgccaataaagaaacacaactacttgaaaaagaaagaaagaccaagctccaatatgaaaaacagatggaggaaagacagagaaagctgaaggagcgaaaagagaaagaagaacaacggagaatagctgcagaagaaaaaagacaccagaaggatgaagcacaaaaggaaaaatttacagccattctttatcgtactttggaacggaggagacttgctgatgattatcagcaaaaaagatggtcatggggaggctctgcaatggcgaattctgagagcaaaactgccaataaacgatctgcatctactgaaaaacttgaacagggtacttctgctttaatcagacaaatgcctttgtcatctgcaggccttcaaaattccgttgccaaaaggaaaacagacaaggagagaagctcatctttaaatagaagagatagtaacctacattcgtctactgataaagaacaagccgaaaggaagccacgtgtagaagagtctcccttggagaaagtagagacacctcccaaggcaagtgtggatgcacccccccaggtgaatgtggaagtattctgcaacacaagcatggaagcgtcccccaaggcaggtgtgggcatggcccctgaggtgagcacggactcattccctgtggtgagcgtggacgtgtcgcctgtggtgagcacatatgattctgagatgagcatggacgcatcccccgagttgagcatagaagcactcccgaaggtggacctggaaacagttcccaaggtgagcatagtagcatccccggaggcgagcctggaagcacccccggaagtgagtctggaagcactgccagaggtgagcgtggaagcagccccagaggggagcctggaagcacctcccaaggggagcgcagaagtagcccccaaggagagtgtgaaagggtcacccaaggagagcatggaggcatctcctgaggcgatggtgaaagcatcccccaagacatcccttgaagcaagcatggaagcatctcccaaggcaaaagcgagagacgctccaaagaaatcagaaatggacaaacaggccttaatccctattgccaagaagcgtctatcatcatacactgagtgttataaatggtcatcatctcctgaaaatgcttgtggtctgccgtctcccatcagcactaacaggcaaatccaaaagaactgccctccatcaccattaccacttatttcaaaacagtcaccacagacttcttttccttataaaataatgcctattcaacacaccctgtctgtgcaaagtgcatcaagtactgtcaaaaagaaaaaagaaacagtttctaaaaccactaacagatgtgaggctttgagccaaaggcatatgatctatgaagagtctggtaataagagtactgcaggtattatgaatgccgaggcggcaacaaaaattttgacagaattgcgccgccttgctcgtgaacaaagagaaaaagaggaagaagaaagacaacgggaagaaatgcagcaaagggtcattaagaaatcaaaagacatggcaaaggaagcagttggaggccaagcagaagaccacttgaaactcaaagatgggcagcaacaaaatgagactaaaaagaagaaaggatggctggatcaggaagaccaggaagcaccactgcagaaaggggacgccaaaataaaagctcaagaggaagctgacaaacgcaagaaagaacacgagagaattatgttacaaaatttacaagaacggttagaaaggaaaaagagaatagaagaaattatgaagcggacaagaaagacagatgtgaatgcctcaaaggtcacagaaacatccagccatgacatatatgaagaggctgaggctgacaacgaagaaagcgacaaggactcattgaatgaaatgtttccatcagccattctaaatggcacaggctcacctaccaaatttaaaatgccgttcaacaatgccaagaaaatgacacacaagctggtatttctagaagatggtaccagccaggtccgtaaagagccaaaaacatattttaatggcgatttgaaaaacttcagacaaaaaagcatgaaagacacttcaatacaggaagtagtttcaagaccatcttccaaaagaatgaccagtcacacaacgaaaaccagaaa

SEQ ID NO: 151711 - DNA, 4365 bp, Homo sapiens
  Payload ID: 9857
  Gene Symbol: MAP7D3
  Gene Name: MAP7 domain containing 3
  Uniprot ID: Q8IWC1
  ENST ID: ENST00000370661
  CDS Start-End: 14-2539
ggtcccgactccgatgatggcggacggcgccgcagctggcgctggcggcagcccatccttgagagagctgcgggcacggatggttgctgcagcaaacgagattgctaaggaaaggaggaagcaagatgtggttaatcgtgttgcaacccattcctcaaatataagatcgacatttaaaccagtaatcgatggatccatgcttaaaaatgacataaaacaaagattagcaagagagcgcagagaggagaaaaggagacagcaagacgccaataaagaaacacaactacttgaaaaagaaagaaagaccaagctccaatatgaaaaacagatggaggaaagacagagaaagctgaaggagcgaaaagagaaagaagaacaacggagaatagctgcagaagaaaaaagacaccagaaggatgaagcacaaaaggaaaaatttacagccattctttatcgtactttggaacggaggagacttgctgatgattatcagcaaaaaagatggtcatggggaggctctgcaatggcgaattctgagagcaaaactgggaaaacagacaaggagagaagctcatctttaaatagaagagatagtaacctacattcgtctactgataaagaacaagccgaaaggaagccacgtgttacaggcgtcaccaattatgtaatgcagtatgtcactgtacccttgcgtaaatgtactagcgacgaattgagggctgttatgtttcccatgtcgacaatgaaaatacctcctcaaacaaaagtagaagagtctcccttggagaaagtagagacacctcccaaggcaagtgtggatgcacccccccaggtgaatgtggaagtattctgcaacacaagcatggaagcgtcccccaaggcaggtgtgggcatggcccctgaggtgagcacggactcattccctgtggtgagcgtggacgtgtcgcctgtggtgagcacatatgattctgagatgagcatggacgcatcccccgagttgagcatagaagcactcccgaaggtggacctggaaacagttcccaaggtgagcatagtagcatccccggaggcgagcctggaagcacccccggaagtgagtctggaagcactgccagaggtgagcgtggaagcagccccagaggggagcctggaagcacctcccaaggggagcgcagaagtagcccccaaggagagtgtgaaagggtcacccaaggagagcatggaggcatctcctgaggcgatggtgaaagcatcccccaagacatcccttgaagcaagcatggaagcatctcccaaggcaaaagcgagagacgctccaaagaaatcagaaatggacaaacaggccttaatccctattgccaagaagcgtctatcatcatacactgagtgttataaatggtcatcatctcctgaaaatgcttgtggtctgccgtctcccatcagcactaacaggcaaatccaaaagaactgccctccatcaccattaccacttatttcaaaacagtcaccacagacttcttttccttataaaataatgcctattcaacacaccctgtctgtgcaaagtgcatcaagtactgtcaaaaagaaaaaagaaacagtttctaaaaccactaacagatgtgaggctttgagccaaaggcatatgatctatgaagagtctggtaataagagtactgcaggtattatgaatgccgaggcggcaacaaaaattttgacagaattgcgccgccttgctcgtgaacaaagagaaaaagaggaagaagaaagacaacgggaagaaatgcagcaaagggtcattaagaaatcaaaagacatggcaaaggaagcagttggaggccaagcagaagaccacttgaaactcaaagatgggcagcaacaaaatgagactaaaaagaagaaaggatggctggatcaggaagaccaggaagcaccactgcagaaaggggacgccaaaataaaagctcaagaggaagctgacaaacgcaagaaagaacacgagagaattatgttacaaaatttacaagaacggttagaaaggaaaaagagaatagaagaaattatgaagcggacaagaaagacagatgtgaatgcctcaaaggtcacagaaacatccagccatgacatatatgaagaggctgaggctgacaacgaagaaagcgacaaggactcattgaatgaaatgtttccatcagccattctaaatggcacaggctcacctaccaaatttaaaatgccgttcaacaatgccaagaaaatgacacacaagctggtatttctagaagatggtaccagccaggtccgtaaagagccaaaaacatattttaatggcgatttgaaaaacttcagacaaaaaagcatgaaagacacttcaatacaggaagtagtttcaagaccatcttccaaaagaatgaccagtcacacaacgaaaaccagaaaggcggatgaaaccaacaccaccagcagatcctctgcacaaacaaaatctgaaggattccatgacatcttgccaaagtcctcagacacctttagacaataagagaagaagcaaacctgtttctcctcatttggaaatcccattcctccttgtgtctcatctgagctggaaactcttcactgccaagtctggcgccaggtcctgttgatccatccattgaaactgtctaccaggatgttcctgtttacaaggccaaggtgatggacactgacctagctttcccctcacgcattgctgcctcgcatttcccttcctggtatcctctacccggagggacagacccctggcctctaccagcagattctgcagatcagcgcattttctacgcctgtgtcattgtggacactgcatgtggaatgaagttttttaacagctccaatccctaaaaaccacaagaatgcagtgtgaaataccataaagaatgccagacaggcccctgaagacctgaacccagctgagagggctgctagctcacgtgtgacattgtgcacgttgttgctcttctctgatccctgttccttgtctgtcaaatgagggggctgtgctacaatctctgcagccttttcagttttgagactccactgttctcaaacacctctaactccttggagccagagcaagagggatcaggaggcataaaacagcagcgatggccaaggagccagagcgtggaggcggactgtgcatgacattttatcatgtcagggggcaattccctgtcattttcagtgaccccacccctccagtgcctggccggcctggttggtcaaaacaggccccgaaacagcctccttgcctttggtctccttaccagtccagttacagtgtttccagatgggtcctaggcacccatctgattctaatttccccaactgtattgtaatcattgcagttaggtttacatgtgcaatatgcaaggtacttgataggcattttctttttgtttttttgagatggagtctcgctctgttgcccaggctggaatgcagtggcgtgatcttgactcactgcaacctctgcctcccaggtttaaggggttcatctgcctcagcctcctgagtagctgggactacaggcacacaccacaacacttggctaatttgtgtatttttagtagagacagggtttcaccatgttggccaggctggtctcgaactcctgacctcaggtgatctgcctgcctcagcctcccaaagtgctgggattacaggcatgagccaccgtgcccagccaggcattttcaatgctcacaacaactctatgaggtgtgggtattcatttatgcctatgaggacactgaaatttgtggagagcagcatttgttccaggtcacacagctggaaagagacagagctgatattcaaacccaagtttgtccctcaaactaacaccccacactgctttgggagtggacatagtgtcttgaggcttgcagggtatgtcacagacaccagagcagtgtctttggtgctgggaatgaaatgtttgttggcatttagtgtgtttactgggtgccagtcccctcactaagcacctgcattatgtctcccacatgggattctgcaaagtagaaattttacgtctcacaggtgaaggatcaagctcagagaggttaacttgcccacagtctcatgactacaaagtggcagagcagccaggatttgaaccctggtagcctggtgccagagcccaccctgttaaccacaagcagagaggttcttgatattctgatcccattaattatgagggagaaaatgtttctctgctgacaaattgttaaggggaaatttaccctcatttctcctgagccttaggggtgtcactcttaaaatcgcatattcaacaaacaaatgccttctaagtactga

SEQ ID NO: 151712 - DNA, 4446 bp, Homo sapiens
  Payload ID: 9857
  Gene Symbol: MAP7D3
  Gene Name: MAP7 domain containing 3
  Uniprot ID: Q8IWC1
  ENST ID: ENST00000370663
  CDS Start-End: 164-2740
aaaaggaaatggtacagagcagcctgttgaaattagacagcagggtcaccctggtcctctgtgccacaggaaggaggggtactgaagtgtcagttgttggtgggggagcagtgctgcagtgggaattccagagctgagaaggctgccatcaaccaagtgagacatgaccagcccccgagttgctgcagcaaacgagattgctaaggaaaggaggaagcaagatgtggttaatcgtgttgcaacccattcctcaaatataagatcgacatttaaaccagtaatcgatggatccatgcttaaaaatgacataaaacaaagattagcaagagagcgcagagaggagaaaaggagacagcaagacgccaataaagaaacacaactacttgaaaaagaaagaaagaccaagctccaatatgaaaaacagatggaggaaagacagagaaagctgaaggagcgaaaagagaaagaagaacaacggagaatagctgcagaagaaaaaagacaccagaaggatgaagcacaaaaggaaaaatttacagccattctttatcgtactttggaacggaggagacttgctgatgattatcagcaaaaaagatggtcatggggaggctctgcaatggcgaattctgagagcaaaactgccaataaacgatctgcatctactgaaaaacttgaacagggtacttctgctttaatcagacaaatgcctttgtcatctgcaggccttcaaaattccgttgccaaaaggaaaacagacaaggagagaagctcatctttaaatagaagagatagtaacctacattcgtctactgataaagaacaagccgaaaggaagccacgtgttacaggcgtcaccaattatgtaatgcagtatgtcactgtacccttgcgtaaatgtactagcgacgaattgagggctgttatgtttcccatgtcgacaatgaaaatacctcctcaaacaaaagtagaagagtctcccttggagaaagtagagacacctcccaaggcaagtgtggatgcacccccccaggtgaatgtggaagtattctgcaacacaagcatggaagcgtcccccaaggcaggtgtgggcatggcccctgaggtgagcacggactcattccctgtggtgagcgtggacgtgtcgcctgtggtgagcacatatgattctgagatgagcatggacgcatcccccgagttgagcatagaagcactcccgaaggtggacctggaaacagttcccaaggtgagcatagtagcatccccggaggcgagcctggaagcacccccggaagtgagtctggaagcactgccagaggtgagcgtggaagcagccccagaggggagcctggaagcacctcccaaggggagcgcagaagtagcccccaaggagagtgtgaaagggtcacccaaggagagcatggaggcatctcctgaggcgatggtgaaagcatcccccaagacatcccttgaagcaagcatggaagcatctcccaaggcaaaagcgagagacgctccaaagaaatcagaaatggacaaacaggccttaatccctattgccaagaagcgtctatcatcatacactgagtgttataaatggtcatcatctcctgaaaatgcttgtggtctgccgtctcccatcagcactaacaggcaaatccaaaagaactgccctccatcaccattaccacttatttcaaaacagtcaccacagacttcttttccttataaaataatgcctattcaacacaccctgtctgtgcaaagtgcatcaagtactgtcaaaaagaaaaaagaaacagtttctaaaaccactaacagatgtgaggctttgagccaaaggcatatgatctatgaagagtctggtaataagagtactgcaggtattatgaatgccgaggcggcaacaaaaattttgacagaattgcgccgccttgctcgtgaacaaagagaaaaagaggaagaagaaagacaacgggaagaaatgcagcaaagggtcattaagaaatcaaaagacatggcaaaggaagcagttggaggccaagcagaagaccacttgaaactcaaagatgggcagcaacaaaatgagactaaaaagaagaaaggatggctggatcaggaagaccaggaagcaccactgcagaaaggggacgccaaaataaaagctcaagaggaagctgacaaacgcaagaaagaacacgagagaattatgttacaaaatttacaagaacggttagaaaggaaaaagagaatagaagaaattatgaagcggacaagaaagacagatgtgaatgcctcaaaggtcacagaaacatccagccatgacatatatgaagaggctgaggctgacaacgaagaaagcgacaaggactcattgaatgaaatgtttccatcagccattctaaatggcacaggctcacctaccaaatttaaaatgccgttcaacaatgccaagaaaatgacacacaagctggtatttctagaagatggtaccagccaggtccgtaaagagccaaaaacatattttaatggcgatttgaaaaacttcagacaaaaaagcatgaaagacacttcaatacaggaagtagtttcaagaccatcttccaaaagaatgaccagtcacacaacgaaaaccagaaaggcggatgaaaccaacaccaccagcagatcctctgcacaaacaaaatctgaaggattccatgacatcttgccaaagtcctcagacacctttagacaataagagaagaagcaaacctgtttctcctcatttggatatgtaaaccttactcagcctgggagatgaatacatcttccactctggataactcaactcctgggcccatcagtcctcaaatttttctgcttctgacttgaacctggtaaaggaagtgacaccgaaaaattgaaagaaactgtcaaaaggccactttgatgtatatctcagatgttaaagtcatcttattctcttgtgtctaagcaagagttctaagtaaagagtggtttttgttttctttggaaaatcatcattgtctctcattcttgtgttgtcccaccaatgtgtttgctggagtgagtgcatcaaggatgctttcctgaaactgtaactgtggagtttctagaagaatctgattgcagaactaattctctttcagtatatatttgaaatcttaaagtaatgctttttctttttctttttcttttttttttttttgagacggagtcttgccctgtcgcccaggctgcagtgcagtggcacaatctcggctcactgcaacctccgcctcctcatctcaagcaattctcctgtctcagcctccccagtagctgggattacaggcatgtgccaccacacctggctaatttttttgtattttagtagagatagggttttaccatgttcaccaggctagtctcgaaatcctggcctcaagagatccacccgtcttggcctcccaaagtgttgggattacaggtgtgagccactgcacccagccaagtaatgctttttctgtgtaccagtgacaattttgacagctaaaaactcacagttgatcttgtagagaacagaatagattatgcaagggccgcaggatcgctcacaagagctgtcagattgtttctaatataaaaataccaaaggttgcaaaatccagcaaattgtattttactgtgatatatgtatatttttaactctacccatctgtgccagtgagtacacaggcactaataacctgaaatgctgggagtcctgtaaagccccatcttggaacagtcagcacctttcatgctcttgtcagtgtttccttttgaaggacatattggtgtttatctacagaaacatatattatttttattgtgtacataaaggagtatatggctgttgtcccgtggggtatgtttaattcctctaaatgtttaaagtacttttctgcctgtactctccagttctgtcgttgagtatacactcaggcttgagatacaaccaaaatttgcttgcctttctctagccactggctgccagtgagttcgtgtgatgggcacacagaaatgcacacagatgtacatacacgtatgtatgcacacacagtatatgattccataaaattcaaatgcagattaattctcctaatgagttttcagtgttgaatcgtaaatagtctgaagcaggccagtgttccttttggctgccagtcttggattagtaaaaggaggtaattctttcagattccctggttctttgccactcagagtattgtacttttgatatagaatagagaaggttacctttggtttaaaaactatttttatatactagctctttcatgtataaaacagagacaatcatcctaacaaaagagttcctgttatttttctgcacaaatgtcttgtgttgaaacactgttacagttccatataaatgtgtgctatataaaataaactttggag

SEQ ID NO: 151713 - DNA, 5873 bp, Homo sapiens
  Payload ID: 9858
  Gene Symbol: MADD
  Gene Name: MAP-kinase activating death domain
  Uniprot ID: Q8WXG6
  ENST ID: ENST00000349238
  CDS Start-End: 166-4992
cccgctgcccaggattggtaggctccaccgctcggcagccggcttccctgctcggacgccgagcaccgccaaagcgcacttcgattttcagaattcctcctgggaatgctgactccttgcttggtgccctgatgcttctctgagataaactgatgaattggaaccatggtgcaaaagaagaagttctgtcctcggttacttgactatctagtgatcgtaggggccaggcacccgagcagtgatagcgtggcccagactcctgaattgctacggcgataccccttggaggatcacactgagtttcccctgcccccagatgtagtgttcttctgccagcccgagggctgcctgagcgtgcggcagcggcgcatgagccttcgggatgatacctcttttgtcttcaccctcactgacaaggacactggagtcacgcgatatggcatctgtgttaacttctaccgctccttccaaaagcgaatctctaaggagaagggggaaggtggggcagggtcccgtgggaaggaaggaacccatgccacctgtgcctcagaagagggtggcactgagagctcagagagtggctcatccctgcagcctctcagtgctgactctacccctgatgtgaaccagtctcctcggggcaaacgccgggccaaggcggggagccgctcccgcaacagtactctcacgtccctgtgcgtgctcagccactaccctttcttctccaccttccgagagtgtttgtatactctcaagcgcctggtggactgctgtagtgagcgccttctgggcaagaaactgggcatccctcgaggcgtacaaagggacaccatgtggcggatctttactggatcgctgctggtagaggagaagtcaagtgcccttctgcatgaccttcgagagattgaggcctggatctatcgattgctgcgctccccagtacccgtctctgggcagaagcgagtagacatcgaggtcctaccccaagagctccagccagctctgacctttgctcttccagacccatctcgattcaccctagtggatttcccactgcaccttcccttggaacttctaggtgtggacgcctgtctccaggtgctaacctgcattctgttagagcacaaggtggtgctacagtcccgagactacaatgcactctccatgtctgtgatggcattcgtggcaatgatctacccactggagtatatgtttcctgtcatcccgctgctacccacctgcatggcatcagcagagcagctgctgttggctccaaccccgtacatcattggggttcctgccagcttcttcctctacaaactggacttcaaaatgcctgatgatgtatggctagtggatctggacagcaatagggtgattgcccccaccaatgcagaagtgctgcctatcctgccagaaccagaatcactagagctgaaaaagcatttaaagcaggccttggccagcatgagtctcaacacccagcccatcctcaatctggagaaatttcatgagggccaggagatcccccttctcttgggaaggccttctaatgacctgcagtccacaccgtccactgaattcaacccactcatctatggcaatgatgtggattctgtggatgttgcaaccagggttgccatggtacggttcttcaattccgccaacgtgctgcagggatttcagatgcacacgcgtaccctgcgcctctttcctcggcctgtggtagcttttcaagctggctcctttctagcctcacgtccccggcagactccttttgccgagaaattggccaggactcaggctgtggagtactttggggaatggatccttaaccccaccaactatgcctttcagcgaattcacaacaatatgtttgatccagccctgattggtgacaagccaaagtggtatgctcatcagctgcagcctatccactatcgcgtctatgacagcaattcccagctggctgaggccctgagtgtaccaccagagcgggactctgactccgaacctactgatgatagtggcagtgatagtatggattatgacgattcaagctcttcttactcctcccttggtgactttgtcagtgaaatgatgaaatgtgacattaatggtgatactcccaatgtggaccctctgacacatgcagcactgggggatgccagcgaggtggagattgacgagctgcagaatcagaaggaagcagaagagcctggcccagacagtgagaactctcaggaaaaccccccactgcgctccagctctagcaccacagccagcagcagccccagcactgtcatccacggagccaactctgaacctgctgactctacggagatggatgataaggcagcagtaggcgtctccaagcccctcccttccgtgcctcccagcattggcaaatcgaacgtggacagacgtcaggcagaaattggagaggggtcagtgcgccggcgaatctatgacaatccatacttcgagccccaatatggctttccccctgaggaagatgaggatgagcagggggaaagttacactccccgattcagccaacatgtcagtggcaatcgggctcaaaagctgctgcggcccaacagcttgagactggcaagtgactcagatgcagagtcagactctcgggcaagctctcccaactccaccgtctccaacaccagcaccgagggcttcgggggcatcatgtcttttgccagcagcctctatcggaaccacagtaccagcttcagtctttcaaacctcacactgcccaccaaaggtgcccgagagaaggccacgcccttccccagtctgaaagtatttgggctaaatactctaatggagattgttactgaagccggccccgggagtggtgaaggaaacaggagggcgttagtggatcagaagtcatctgtcattaaacacagcccaacagtgaaaagagaacctccatcaccccagggtcgatccagcaattctagtgagaaccagcagttcctgaaggaggtggtgcacagcgtgctggacggccagggagttggctggctcaacatgaaaaaggtgcgccggctgctggagagcgagcagctgcgagtctttgtcctgagcaagctgaaccgcatggtgcagtcagaggacgatgcccggcaggacatcatcccggatgtggagatcagtcggaaggtgtacaagggaatgttagacctcctcaagtgtacagtcctcagcttggagcagtcctatgcccacgcgggtctgggtggcatggccagcatctttgggcttttggagattgcccagacccactactatagtaaagaaccagacaagcggaagagaagtccaacagaaagtgtaaataccccagttggcaaggatcctggcctagctgggcggggggacccaaaggctatggcacaactgagagttccacaactgggacctcgggcaccaagtgccacaggaaagggtcctaaggaactggacaccagaagtttaaaggaagaaaattttatagcatctattgggcctgaagtaatcaaacctgtctttgaccttggtgagacagaggagaaaaagtcccagatcagcgcagacagtggtgtgagcctgacgtctagttcccagaggactgatcaagactctgtcatcggcgtgagtccagctgttatgatccgcagctcaagtcaggattctgaagttagcaccgtggtgagtaatagctctggagagacccttggagctgacagtgacttgagcagcaatgcaggtgatggaccaggtggcgagggcagtgttcacctggcaagctctcggggcactttgtctgatagtgaaattgagaccaactctgccacaagcaccatctttggtaaagcccacagcttgaagccaagcataaaggagaagctggcaggcagccccattcgtacttctgaagatgtgagccagcgagtctatctctatgagggactcctaggcaaagagcgttctactttatgggaccaaatgcaattctgggaagatgccttcttagatgctgtgatgttggagagagaagggatgggtatggaccagggtccccaggaaatgatcgacaggtacctgtcccttggagaacatgaccggaagcgcctggaagatgatgaagatcgcttgttggccacacttctgcacaacctcatctcctacatgctgctgatgaaggtaaataagaatgacatccgcaagaaggtgaggcgcctaatgggaaagtcgcacattgggcttgtgtacagccagcaaatcaatgaggtgcttgatcagctggcgaacctgaatggacgcgatctctctatctggtccagtggcagccggcacatgaagaagcagacatttgtggtacatgcagggacagatacaaacggagatatctttttcatggaggtgtgcgatgactgtgtggtgttgcgtagtaacatcggaacagtgtatgagcgctggtggtacgagaagctcatcaacatgacctactgtcccaagacgaaggtgttgtgcttgtggcgtagaaatggctctgagacccagctcaacaagttctatactaaaaagtgtcgggagctgtactactgtgtgaaggacagcatggagcgcgctgccgcccgacagcaaagcatcaaacccggacctgaattgggtggcgagttccctgtgcaggacctgaagactggtgagggtggcctgctgcaggtgaccctggaagggatcaacctcaaattcatgcacaatcaggttttcatagagctgaatcacattaaaaagtgcaatacagttcgaggcgtctttgtcctggaggaatttgttcctgaaattaaagaagtggtgagccacaagtacaagacaccaatggcccacgaaatctgctactccgtattatgtctcttctcgtacgtggctgcagttcatagcagtgaggaagatctcagaaccccgccccggcctgtctctagctgatggagaggggctacgcagctgccccagcccagggcacgcccctggccccttgctgttcccaagtgcacgatgctgctgtgactgaggagtggatgatgctcgtgtgtcctctgcaagccccctgctgtggcttggttggttaccggttatgtgtccctctgagtgtgtcttgagcgtgtccaccttctccctctccactcccagaagaccaaactgccttcccctcagggctcaagaatgtgtacagtctgtggggccggtgtgaacccactattttgtgtccttgagacatttgtgttgtggttccttgtccttgtccctggcgttataactgtccactgcaagagtctggctctcccttctctgtgacccggcatgactgggcgcctggagcagtttcactctgtgaggagtgagggaaccctggggctcaccctctcagaggaagggcacagagaggaagggaagaattggggggcagccggagtgagtggcagcctccctgcttccttctgcattcccaagccggcagctactgcccagggcccgcagtgttggctgctgcctgccacagcctctgtgactgcagtggagcggcgaattccctgtggcctgccatgccttcggcatcagaggatggagtggtcgaggctagtggagtcccagggaccgctggctgctctgcctgagcatcagggagggggcaggaaagaccaagctgggtttgcacatctgtctgcaggctgtctctccaggcacggggtgtcaggagggagagacagcctgggtatgggcaagaaatgactgtaaatatttcagccccacattatttatagaaaatgtacagttgtgtgaatgtgaaataaatgtcctcaactccc

SEQ ID NO: 151714 - DNA, 5990 bp, Homo sapiens
  Payload ID: 9858
  Gene Symbol: MADD
  Gene Name: MAP-kinase activating death domain
  Uniprot ID: Q8WXG6
  ENST ID: ENST00000311027
  CDS Start-End: 166-5109
cccgctgcccaggattggtaggctccaccgctcggcagccggcttccctgctcggacgccgagcaccgccaaagcgcacttcgattttcagaattcctcctgggaatgctgactccttgcttggtgccctgatgcttctctgagataaactgatgaattggaaccatggtgcaaaagaagaagttctgtcctcggttacttgactatctagtgatcgtaggggccaggcacccgagcagtgatagcgtggcccagactcctgaattgctacggcgataccccttggaggatcacactgagtttcccctgcccccagatgtagtgttcttctgccagcccgagggctgcctgagcgtgcggcagcggcgcatgagccttcgggatgatacctcttttgtcttcaccctcactgacaaggacactggagtcacgcgatatggcatctgtgttaacttctaccgctccttccaaaagcgaatctctaaggagaagggggaaggtggggcagggtcccgtgggaaggaaggaacccatgccacctgtgcctcagaagagggtggcactgagagctcagagagtggctcatccctgcagcctctcagtgctgactctacccctgatgtgaaccagtctcctcggggcaaacgccgggccaaggcggggagccgctcccgcaacagtactctcacgtccctgtgcgtgctcagccactaccctttcttctccaccttccgagagtgtttgtatactctcaagcgcctggtggactgctgtagtgagcgccttctgggcaagaaactgggcatccctcgaggcgtacaaagggacaccatgtggcggatctttactggatcgctgctggtagaggagaagtcaagtgcccttctgcatgaccttcgagagattgaggcctggatctatcgattgctgcgctccccagtacccgtctctgggcagaagcgagtagacatcgaggtcctaccccaagagctccagccagctctgacctttgctcttccagacccatctcgattcaccctagtggatttcccactgcaccttcccttggaacttctaggtgtggacgcctgtctccaggtgctaacctgcattctgttagagcacaaggtggtgctacagtcccgagactacaatgcactctccatgtctgtgatggcattcgtggcaatgatctacccactggagtatatgtttcctgtcatcccgctgctacccacctgcatggcatcagcagagcagctgctgttggctccaaccccgtacatcattggggttcctgccagcttcttcctctacaaactggacttcaaaatgcctgatgatgtatggctagtggatctggacagcaatagggtgattgcccccaccaatgcagaagtgctgcctatcctgccagaaccagaatcactagagctgaaaaagcatttaaagcaggccttggccagcatgagtctcaacacccagcccatcctcaatctggagaaatttcatgagggccaggagatcccccttctcttgggaaggccttctaatgacctgcagtccacaccgtccactgaattcaacccactcatctatggcaatgatgtggattctgtggatgttgcaaccagggttgccatggtacggttcttcaattccgccaacgtgctgcagggatttcagatgcacacgcgtaccctgcgcctctttcctcggcctgtggtagcttttcaagctggctcctttctagcctcacgtccccggcagactccttttgccgagaaattggccaggactcaggctgtggagtactttggggaatggatccttaaccccaccaactatgcctttcagcgaattcacaacaatatgtttgatccagccctgattggtgacaagccaaagtggtatgctcatcagctgcagcctatccactatcgcgtctatgacagcaattcccagctggctgaggccctgagtgtaccaccagagcgggactctgactccgaacctactgatgatagtggcagtgatagtatggattatgacgattcaagctcttcttactcctcccttggtgactttgtcagtgaaatgatgaaatgtgacattaatggtgatactcccaatgtggaccctctgacacatgcagcactgggggatgccagcgaggtggagattgacgagctgcagaatcagaaggaagcagaagagcctggcccagacagtgagaactctcaggaaaaccccccactgcgctccagctctagcaccacagccagcagcagccccagcactgtcatccacggagccaactctgaacctgctgactctacggagatggatgataaggcagcagtaggcgtctccaagcccctcccttccgtgcctcccagcattggcaaatcgaacgtggacagacgtcaggcagaaattggagaggggtcagtgcgccggcgaatctatgacaatccatacttcgagccccaatatggctttccccctgaggaagatgaggatgagcagggggaaagttacactccccgattcagccaacatgtcagtggcaatcgggctcaaaagctgctgcggcccaacagcttgagactggcaagtgactcagatgcagagtcagactctcgggcaagctctcccaactccaccgtctccaacaccagcaccgagggcttcgggggcatcatgtcttttgccagcagcctctatcggaaccacagtaccagcttcagtctttcaaacctcacactgcccaccaaaggtgcccgagagaaggccacgcccttccccagtctgaaagtatttgggctaaatactctaatggagattgttactgaagccggccccgggagtggtgaaggaaacaggagggcgttagtggatcagaagtcatctgtcattaaacacagcccaacagtgaaaagagaacctccatcaccccagggtcgatccagcaattctagtgagaaccagcagttcctgaaggaggtggtgcacagcgtgctggacggccagggagttggctggctcaacatgaaaaaggtgcgccggctgctggagagcgagcagctgcgagtctttgtcctgagcaagctgaaccgcatggtgcagtcagaggacgatgcccggcaggacatcatcccggatgtggagatcagtcggaaggtgtacaagggaatgttagacctcctcaagtgtacagtcctcagcttggagcagtcctatgcccacgcgggtctgggtggcatggccagcatctttgggcttttggagattgcccagacccactactatagtaaagaaccagacaagcggaagagaagtccaacagaaagtgtaaataccccagttggcaaggatcctggcctagctgggcggggggacccaaaggctatggcacaactgagagttccacaactgggacctcgggcaccaagtgccacaggaaagggtcctaaggaactggacaccagaagtttaaaggaagaaaattttatagcatctattgaattgtggaacaagcaccaggaagtgaaaaagcaaaaagctttggaaaaacagaggcctgaagtaatcaaacctgtctttgaccttggtgagacagaggagaaaaagtcccagatcagcgcagacagtggtgtgagcctgacgtctagttcccagaggactgatcaagactctgtcatcggcgtgagtccagctgttatgatccgcagctcaagtcaggattctgaagttagcaccgtggtgagtaatagctctggagagacccttggagctgacagtgacttgagcagcaatgcaggtgatggaccaggtggcgagggcagtgttcacctggcaagctctcggggcactttgtctgatagtgaaattgagaccaactctgccacaagcaccatctttggtaaagcccacagcttgaagccaagcataaaggagaagctggcaggcagccccattcgtacttctgaagatgtgagccagcgagtctatctctatgagggactcctaggaagggacaaaggatccatgtgggaccagttagaggatgcagctatggagaccttttctataagcaaagagcgttctactttatgggaccaaatgcaattctgggaagatgccttcttagatgctgtgatgttggagagagaagggatgggtatggaccagggtccccaggaaatgatcgacaggtacctgtcccttggagaacatgaccggaagcgcctggaagatgatgaagatcgcttgttggccacacttctgcacaacctcatctcctacatgctgctgatgaaggtaaataagaatgacatccgcaagaaggtgaggcgcctaatgggaaagtcgcacattgggcttgtgtacagccagcaaatcaatgaggtgcttgatcagctggcgaacctgaatggacgcgatctctctatctggtccagtggcagccggcacatgaagaagcagacatttgtggtacatgcagggacagatacaaacggagatatctttttcatggaggtgtgcgatgactgtgtggtgttgcgtagtaacatcggaacagtgtatgagcgctggtggtacgagaagctcatcaacatgacctactgtcccaagacgaaggtgttgtgcttgtggcgtagaaatggctctgagacccagctcaacaagttctatactaaaaagtgtcgggagctgtactactgtgtgaaggacagcatggagcgcgctgccgcccgacagcaaagcatcaaacccggacctgaattgggtggcgagttccctgtgcaggacctgaagactggtgagggtggcctgctgcaggtgaccctggaagggatcaacctcaaattcatgcacaatcaggttttcatagagctgaatcacattaaaaagtgcaatacagttcgaggcgtctttgtcctggaggaatttgttcctgaaattaaagaagtggtgagccacaagtacaagacaccaatggcccacgaaatctgctactccgtattatgtctcttctcgtacgtggctgcagttcatagcagtgaggaagatctcagaaccccgccccggcctgtctctagctgatggagaggggctacgcagctgccccagcccagggcacgcccctggccccttgctgttcccaagtgcacgatgctgctgtgactgaggagtggatgatgctcgtgtgtcctctgcaagccccctgctgtggcttggttggttaccggttatgtgtccctctgagtgtgtcttgagcgtgtccaccttctccctctccactcccagaagaccaaactgccttcccctcagggctcaagaatgtgtacagtctgtggggccggtgtgaacccactattttgtgtccttgagacatttgtgttgtggttccttgtccttgtccctggcgttataactgtccactgcaagagtctggctctcccttctctgtgacccggcatgactgggcgcctggagcagtttcactctgtgaggagtgagggaaccctggggctcaccctctcagaggaagggcacagagaggaagggaagaattggggggcagccggagtgagtggcagcctccctgcttccttctgcattcccaagccggcagctactgcccagggcccgcagtgttggctgctgcctgccacagcctctgtgactgcagtggagcggcgaattccctgtggcctgccatgccttcggcatcagaggatggagtggtcgaggctagtggagtcccagggaccgctggctgctctgcctgagcatcagggagggggcaggaaagaccaagctgggtttgcacatctgtctgcaggctgtctctccaggcacggggtgtcaggagggagagacagcctgggtatgggcaagaaatgactgtaaatatttcagccccacattatttatagaaaatgtacagttgtgtgaatgtgaaataaatgtcctcaactccc

SEQ ID NO: 151715 - DNA, 6005 bp, Homo sapiens
  Payload ID: 9858
  Gene Symbol: MADD
  Gene Name: MAP-kinase activating death domain
  ENST ID: ENST00000342922
  CDS Start-End: 358-5124
gatttcagcgctaaggcgtcggcggtgcacctcacgtgcatgtgtagcatgccttggtttttcctttggcatctgaaaaaggcacaacctgaaagacctagaacccagtgtcggtccccaggccctttgggacaggaagagaagagccgtgtggccgcggggaggatgtcctgaggcggggctgtcctcgcggactgactggactccatctcccagcgggcgccgcggcgcggccacgcccccccactccccgcgcgcgcccggtggagacttcgattttcagaattcctcctgggaatgctgactccttgcttggtgccctgatgcttctctgagataaactgatgaattggaaccatggtgcaaaagaagaagttctgtcctcggttacttgactatctagtgatcgtaggggccaggcacccgagcagtgatagcgtggcccagactcctgaattgctacggcgataccccttggaggatcacactgagtttcccctgcccccagatgtagtgttcttctgccagcccgagggctgcctgagcgtgcggcagcggcgcatgagccttcgggatgatacctcttttgtcttcaccctcactgacaaggacactggagtcacgcgatatggcatctgtgttaacttctaccgctccttccaaaagcgaatctctaaggagaagggggaaggtggggcagggtcccgtgggaaggaaggaacccatgccacctgtgcctcagaagagggtggcactgagagctcagagagtggctcatccctgcagcctctcagtgctgactctacccctgatgtgaaccagtctcctcggggcaaacgccgggccaaggcggggagccgctcccgcaacagtactctcacgtccctgtgcgtgctcagccactaccctttcttctccaccttccgagagtgtttgtatactctcaagcgcctggtggactgctgtagtgagcgccttctgggcaagaaactgggcatccctcgaggcgtacaaagggacaccatgtggcggatctttactggatcgctgctggtagaggagaagtcaagtgcccttctgcatgaccttcgagagattgaggcctggatctatcgattgctgcgctccccagtacccgtctctgggcagaagcgagtagacatcgaggtcctaccccaagagctccagccagctctgacctttgctcttccagacccatctcgattcaccctagtggatttcccactgcaccttcccttggaacttctaggtgtggacgcctgtctccaggtgctaacctgcattctgttagagcacaaggtggtgctacagtcccgagactacaatgcactctccatgtctgtgatggcattcgtggcaatgatctacccactggagtatatgtttcctgtcatcccgctgctacccacctgcatggcatcagcagagcagctgctgttggctccaaccccgtacatcattggggttcctgccagcttcttcctctacaaactggacttcaaaatgcctgatgatgtatggctagtggatctggacagcaatagggtgattgcccccaccaatgcagaagtgctgcctatcctgccagaaccagaatcactagagctgaaaaagcatttaaagcaggccttggccagcatgagtctcaacacccagcccatcctcaatctggagaaatttcatgagggccaggagatcccccttctcttgggaaggccttctaatgacctgcagtccacaccgtccactgaattcaacccactcatctatggcaatgatgtggattctgtggatgttgcaaccagggttgccatggtacggttcttcaattccgccaacgtgctgcagggatttcagatgcacacgcgtaccctgcgcctctttcctcggcctgtggtagcttttcaagctggctcctttctagcctcacgtccccggcagactccttttgccgagaaattggccaggactcaggctgtggagtactttggggaatggatccttaaccccaccaactatgcctttcagcgaattcacaacaatatgtttgatccagccctgattggtgacaagccaaagtggtatgctcatcagctgcagcctatccactatcgcgtctatgacagcaattcccagctggctgaggccctgagtgtaccaccagagcgggactctgactccgaacctactgatgatagtggcagtgatagtatggattatgacgattcaagctcttcttactcctcccttggtgactttgtcagtgaaatgatgaaatgtgacattaatggtgatactcccaatgtggaccctctgacacatgcagcactgggggatgccagcgaggtggagattgacgagctgcagaatcagaaggaagcagaagagcctggcccagacagtgagaactctcaggaaaaccccccactgcgctccagctctagcaccacagccagcagcagccccagcactgtcatccacggagccaactctgaacctgctgactctacggagatggatgataaggcagcagtaggcgtctccaagcccctcccttccgtgcctcccagcattggcaaatcgaacgtggacagacgtcaggcagaaattggagaggggtcagtgcgccggcgaatctatgacaatccatacttcgagccccaatatggctttccccctgaggaagatgaggatgagcagggggaaagttacactccccgattcagccaacatgtcagtggcaatcgggctcaaaagctgctgcggcccaacagcttgagactggcaagtgactcagatgcagagtcagactctcgggcaagctctcccaactccaccgtctccaacaccagcaccgagggcttcgggggcatcatgtcttttgccagcagcctctatcggaaccacagtaccagcttcagtctttcaaacctcacactgcccaccaaaggtgcccgagagaaggccacgcccttccccagtctgaaaggaaacaggagggcgttagtggatcagaagtcatctgtcattaaacacagcccaacagtgaaaagagaacctccatcaccccagggtcgatccagcaattctagtgagaaccagcagttcctgaaggaggtggtgcacagcgtgctggacggccagggagttggctggctcaacatgaaaaaggtgcgccggctgctggagagcgagcagctgcgagtctttgtcctgagcaagctgaaccgcatggtgcagtcagaggacgatgcccggcaggacatcatcccggatgtggagatcagtcggaaggtgtacaagggaatgttagacctcctcaagtgtacagtcctcagcttggagcagtcctatgcccacgcgggtctgggtggcatggccagcatctttgggcttttggagattgcccagacccactactatagtaaagaaccagacaagcggaagagaagtccaacagaaagtgtaaataccccagttggcaaggatcctggcctagctgggcggggggacccaaaggctatggcacaactgagagttccacaactgggacctcgggcaccaagtgccacaggaaagggtcctaaggaactggacaccagaagtttaaaggaagaaaattttatagcatctattgggcctgaagtaatcaaacctgtctttgaccttggtgagacagaggagaaaaagtcccagatcagcgcagacagtggtgtgagcctgacgtctagttcccagaggactgatcaagactctgtcatcggcgtgagtccagctgttatgatccgcagctcaagtcaggattctgaagttagcaccgtggtgagtaatagctctggagagacccttggagctgacagtgacttgagcagcaatgcaggtgatggaccaggtggcgagggcagtgttcacctggcaagctctcggggcactttgtctgatagtgaaattgagaccaactctgccacaagcaccatctttggtaaagcccacagcttgaagccaagcataaaggagaagctggcaggcagccccattcgtacttctgaagatgtgagccagcgagtctatctctatgagggactcctaggcaaagagcgttctactttatgggaccaaatgcaattctgggaagatgccttcttagatgctgtgatgttggagagagaagggatgggtatggaccagggtccccaggaaatgatcgacaggtacctgtcccttggagaacatgaccggaagcgcctggaagatgatgaagatcgcttgttggccacacttctgcacaacctcatctcctacatgctgctgatgaaggtaaataagaatgacatccgcaagaaggtgaggcgcctaatgggaaagtcgcacattgggcttgtgtacagccagcaaatcaatgaggtgcttgatcagctggcgaacctgaatggacgcgatctctctatctggtccagtggcagccggcacatgaagaagcagacatttgtggtacatgcagggacagatacaaacggagatatctttttcatggaggtgtgcgatgactgtgtggtgttgcgtagtaacatcggaacagtgtatgagcgctggtggtacgagaagctcatcaacatgacctactgtcccaagacgaaggtgttgtgcttgtggcgtagaaatggctctgagacccagctcaacaagttctatactaaaaagtgtcgggagctgtactactgtgtgaaggacagcatggagcgcgctgccgcccgacagcaaagcatcaaacccggacctgaattgggtggcgagttccctgtgcaggacctgaagactggtgagggtggcctgctgcaggtgaccctggaagggatcaacctcaaattcatgcacaatcaggttttcatagagctgaatcacattaaaaagtgcaatacagttcgaggcgtctttgtcctggaggaatttgttcctgaaattaaagaagtggtgagccacaagtacaagacaccaatggcccacgaaatctgctactccgtattatgtctcttctcgtacgtggctgcagttcatagcagtgaggaagatctcagaaccccgccccggcctgtctctagctgatggagaggggctacgcagctgccccagcccagggcacgcccctggccccttgctgttcccaagtgcacgatgctgctgtgactgaggagtggatgatgctcgtgtgtcctctgcaagccccctgctgtggcttggttggttaccggttatgtgtccctctgagtgtgtcttgagcgtgtccaccttctccctctccactcccagaagaccaaactgccttcccctcagggctcaagaatgtgtacagtctgtggggccggtgtgaacccactattttgtgtccttgagacatttgtgttgtggttccttgtccttgtccctggcgttataactgtccactgcaagagtctggctctcccttctctgtgacccggcatgactgggcgcctggagcagtttcactctgtgaggagtgagggaaccctggggctcaccctctcagaggaagggcacagagaggaagggaagaattggggggcagccggagtgagtggcagcctccctgcttccttctgcattcccaagccggcagctactgcccagggcccgcagtgttggctgctgcctgccacagcctctgtgactgcagtggagcggcgaattccctgtggcctgccatgccttcggcatcagaggatggagtggtcgaggctagtggagtcccagggaccgctggctgctctgcctgagcatcagggagggggcaggaaagaccaagctgggtttgcacatctgtctgcaggctgtctctccaggcacggggtgtcaggagggagagacagcctgggtatgggcaagaaatgactgtaaatatttcagccccacattatttatagaaaatgtacagttgtgtgaatgtgaaataaatgtcctcaactccc

SEQ ID NO: 151716 - DNA, 5942 bp, Homo sapiens
  Payload ID: 9858
  Gene Symbol: MADD
  Gene Name: MAP-kinase activating death domain
  Uniprot ID: Q8WXG6
  ENST ID: ENST00000395336
  CDS Start-End: 188-4933
ctggcgcccgctcggagcggcgccgcgctggggagcgactgacgccccgctgccgggggacgtcgggctgggcctggccagtcccccagagcttgggagacttcgattttcagaattcctcctgggaatgctgactccttgcttggtgccctgatgcttctctgagataaactgatgaattggaaccatggtgcaaaagaagaagttctgtcctcggttacttgactatctagtgatcgtaggggccaggcacccgagcagtgatagcgtggcccagactcctgaattgctacggcgataccccttggaggatcacactgagtttcccctgcccccagatgtagtgttcttctgccagcccgagggctgcctgagcgtgcggcagcggcgcatgagccttcgggatgatacctcttttgtcttcaccctcactgacaaggacactggagtcacgcgatatggcatctgtgttaacttctaccgctccttccaaaagcgaatctctaaggagaagggggaaggtggggcagggtcccgtgggaaggaaggaacccatgccacctgtgcctcagaagagggtggcactgagagctcagagagtggctcatccctgcagcctctcagtgctgactctacccctgatgtgaaccagtctcctcggggcaaacgccgggccaaggcggggagccgctcccgcaacagtactctcacgtccctgtgcgtgctcagccactaccctttcttctccaccttccgagagtgtttgtatactctcaagcgcctggtggactgctgtagtgagcgccttctgggcaagaaactgggcatccctcgaggcgtacaaagggacaccatgtggcggatctttactggatcgctgctggtagaggagaagtcaagtgcccttctgcatgaccttcgagagattgaggcctggatctatcgattgctgcgctccccagtacccgtctctgggcagaagcgagtagacatcgaggtcctaccccaagagctccagccagctctgacctttgctcttccagacccatctcgattcaccctagtggatttcccactgcaccttcccttggaacttctaggtgtggacgcctgtctccaggtgctaacctgcattctgttagagcacaaggtggtgctacagtcccgagactacaatgcactctccatgtctgtgatggcattcgtggcaatgatctacccactggagtatatgtttcctgtcatcccgctgctacccacctgcatggcatcagcagagcagctgctgttggctccaaccccgtacatcattggggttcctgccagcttcttcctctacaaactggacttcaaaatgcctgatgatgtatggctagtggatctggacagcaatagggtgattgcccccaccaatgcagaagtgctgcctatcctgccagaaccagaatcactagagctgaaaaagcatttaaagcaggccttggccagcatgagtctcaacacccagcccatcctcaatctggagaaatttcatgagggccaggagatcccccttctcttgggaaggccttctaatgacctgcagtccacaccgtccactgaattcaacccactcatctatggcaatgatgtggattctgtggatgttgcaaccagggttgccatggtacggttcttcaattccgccaacgtgctgcagggatttcagatgcacacgcgtaccctgcgcctctttcctcggcctgtggtagcttttcaagctggctcctttctagcctcacgtccccggcagactccttttgccgagaaattggccaggactcaggctgtggagtactttggggaatggatccttaaccccaccaactatgcctttcagcgaattcacaacaatatgtttgatccagccctgattggtgacaagccaaagtggtatgctcatcagctgcagcctatccactatcgcgtctatgacagcaattcccagctggctgaggccctgagtgtaccaccagagcgggactctgactccgaacctactgatgatagtggcagtgatagtatggattatgacgattcaagctcttcttactcctcccttggtgactttgtcagtgaaatgatgaaatgtgacattaatggtgatactcccaatgtggaccctctgacacatgcagcactgggggatgccagcgaggtggagattgacgagctgcagaatcagaaggaagcagaagagcctggcccagacagtgagaactctcaggaaaaccccccactgcgctccagctctagcaccacagccagcagcagccccagcactgtcatccacggagccaactctgaacctgctgactctacggagatggatgataaggcagcagtaggcgtctccaagcccctcccttccgtgcctcccagcattggcaaatcgaacgtggacagacgtcaggcagaaattggagaggggtcagtgcgccggcgaatctatgacaatccatacttcgagccccaatatggctttccccctgaggaagatgaggatgagcagggggaaagttacactccccgattcagccaacatgtcagtggcaatcgggctcaaaagctgctgcggcccaacagcttgagactggcaagtgactcagatgcagagtcagactctcgggcaagctctcccaactccaccgtctccaacaccagcaccgagggcttcgggggcatcatgtcttttgccagcagcctctatcggaaccacagtaccagcttcagtctttcaaacctcacactgcccaccaaaggtgcccgagagaaggccacgcccttccccagtctgaaagtatttgggctaaatactctaatggagattgttactgaagccggccccgggagtggtgaaggaaacaggagggcgttagtggatcagaagtcatctgtcattaaacacagcccaacagtgaaaagagaacctccatcaccccagggtcgatccagcaattctagtgagaaccagcagttcctgaaggaggtggtgcacagcgtgctggacggccagggagttggctggctcaacatgaaaaaggtgcgccggctgctggagagcgagcagctgcgagtctttgtcctgagcaagctgaaccgcatggtgcagtcagaggacgatgcccggcaggacatcatcccggatgtggagatcagtcggaaggtgtacaagggaatgttagacctcctcaagtgtacagtcctcagcttggagcagtcctatgcccacgcgggtctgggtggcatggccagcatctttgggcttttggagattgcccagacccactactatagtaaagaaccagacaagcggaagagaagtccaacagaaagtgtaaataccccagttggcaaggatcctggcctagctgggcggggggacccaaaggctatggcacaactgagagttccacaactgggacctcgggcaccaagtgccacaggaaagggtcctaaggaactggacaccagaagtttaaaggaagaaaattttatagcatctattgaattgtggaacaagcaccaggaagtgaaaaagcaaaaagctttggaaaaacagaggcctgaagtaatcaaacctgtctttgaccttggtgagacagaggagaaaaagtcccagatcagcgcagacagtggtgtgagcctgacgtctagttcccagaggactgatcaagactctgtcatcggcgtgagtccagctgttatgatccgcagctcaagtcaggattctgaagttagcaccgtggtgagtaatagctctggagagacccttggagctgacagtgacttgagcagcaatgcaggtgatggaccaggtggcgagggcagtgttcacctggcaagctctcggggcactttgtctgatagtgaaattgagaccaactctgccacaagcaccatctttggtaaagcccacagcttgaagccaagcataaaggagaagctggcaggcagccccattcgtacttctgaagatgtgagccagcgagtctatctctatgagggactcctaggaagggacaaaggatccatgtgggaccagttagaggatgcagctatggagaccttttctataagcaaagagcgttctactttatgggaccaaatgcaattctgggaagatgccttcttagatgctgtgatgttggagagagaagggatgggtatggaccagggtccccaggaaatgatcgacaggtacctgtcccttggagaacatgaccggaagcgcctggaagatgatgaagatcgcttgttggccacacttctgcacaacctcatctcctacatgctgctgatgaaggtaaataagaatgacatccgcaagaaggtgaggcgcctaatgggaaagtcgcacattgggcttgtgtacagccagcaaatcaatgaggtgcttgatcagctggcgaacctgaatggacgcgatctctctatctggtccagtggcagccggcacatgaagaagcagacatttgtggtacatgcagggacagatacaaacggagatatctttttcatggaggtgtgcgatgactgtgtggtgttgcgtagtaacatcggaacagtgtatgagcgctggtggtacgagaagctcatcaacatgacctactgtcccaagacgaaggtgttgtgcttgtggcgtagaaatggctctgagacccagctcaacaagttctatactaaaaagtgtcgggagctgtactactgtgtgaaggacagcatggagcgcgctgccgcccgacagcaaagcatcaaacccggacctgaattgggtggcgagttccctgtgcaggacctgaagactggtgagggtggcctgctgcaggtgaccctggaagggatcaacctcaaattcatgcacaatcagttcctgaaattaaagaagtggtgagccacaagtacaagacaccaatggcccacgaaatctgctactccgtattatgtctcttctcgtacgtggctgcagttcatagcagtgaggaagatctcagaaccccgccccggcctgtctctagctgatggagaggggctacgcagctgccccagcccagggcacgcccctggccccttgctgttcccaagtgcacgatgctgctgtgactgaggagtggatgatgctcgtgtgtcctctgcaagccccctgctgtggcttggttggttaccggttatgtgtccctctgagtgtgtcttgagcgtgtccaccttctccctctccactcccagaagaccaaactgccttcccctcagggctcaagaatgtgtacagtctgtggggccggtgtgaacccactattttgtgtccttgagacatttgtgttgtggttccttgtccttgtccctggcgttataactgtccactgcaagagtctggctctcccttctctgtgacccggcatgactgggcgcctggagcagtttcactctgtgaggagtgagggaaccctggggctcaccctctcagaggaagggcacagagaggaagggaagaattggggggcagccggagtgagtggcagcctccctgcttccttctgcattcccaagccggcagctactgcccagggcccgcagtgttggctgctgcctgccacagcctctgtgactgcagtggagcggcgaattccctgtggcctgccatgccttcggcatcagaggatggagtggtcgaggctagtggagtcccagggaccgctggctgctctgcctgagcatcagggagggggcaggaaagaccaagctgggtttgcacatctgtctgcaggctgtctctccaggcacggggtgtcaggagggagagacagcctgggtatgggcaagaaatgactgtaaatatttcagccccacattatttatagaaaatgtacagttgtgtgaatgtgaaataaatgtcctcaactccc

SEQ ID NO: 151717 - DNA, 4988 bp, Homo sapiens
  Payload ID: 9858
  Gene Symbol: MADD
  Gene Name: MAP-kinase activating death domain
  Uniprot ID: Q8WXG6
  ENST ID: ENST00000395344
  CDS Start-End: 156-4781
aggattggtaggctccaccgctcggcagccggcttccctgctcggacgccgagcaccgccaaagcgcacttcgattttcagaattcctcctgggaatgctgactccttgcttggtgccctgatgcttctctgagataaactgatgaattggaaccatggtgcaaaagaagaagttctgtcctcggttacttgactatctagtgatcgtaggggccaggcacccgagcagtgatagcgtggcccagactcctgaattgctacggcgataccccttggaggatcacactgagtttcccctgcccccagatgtagtgttcttctgccagcccgagggctgcctgagcgtgcggcagcggcgcatgagccttcgggatgatacctcttttgtcttcaccctcactgacaaggacactggagtcacgcgatatggcatctgtgttaacttctaccgctccttccaaaagcgaatctctaaggagaagggggaaggtggggcagggtcccgtgggaaggaaggaacccatgccacctgtgcctcagaagagggtggcactgagagctcagagagtggctcatccctgcagcctctcagtgctgactctacccctgatgtgaaccagtctcctcggggcaaacgccgggccaaggcggggagccgctcccgcaacagtactctcacgtccctgtgcgtgctcagccactaccctttcttctccaccttccgagagtgtttgtatactctcaagcgcctggtggactgctgtagtgagcgccttctgggcaagaaactgggcatccctcgaggcgtacaaagggacaccatgtggcggatctttactggatcgctgctggtagaggagaagtcaagtgcccttctgcatgaccttcgagagattgaggcctggatctatcgattgctgcgctccccagtacccgtctctgggcagaagcgagtagacatcgaggtcctaccccaagagctccagccagctctgacctttgctcttccagacccatctcgattcaccctagtggatttcccactgcaccttcccttggaacttctaggtgtggacgcctgtctccaggtgctaacctgcattctgttagagcacaaggtggtgctacagtcccgagactacaatgcactctccatgtctgtgatggcattcgtggcaatgatctacccactggagtatatgtttcctgtcatcccgctgctacccacctgcatggcatcagcagagcagctgctgttggctccaaccccgtacatcattggggttcctgccagcttcttcctctacaaactggacttcaaaatgcctgatgatgtatggctagtggatctggacagcaatagggtgattgcccccaccaatgcagaagtgctgcctatcctgccagaaccagaatcactagagctgaaaaagcatttaaagcaggccttggccagcatgagtctcaacacccagcccatcctcaatctggagaaatttcatgagggccaggagatcccccttctcttgggaaggccttctaatgacctgcagtccacaccgtccactgaattcaacccactcatctatggcaatgatgtggattctgtggatgttgcaaccagggttgccatggtacggttcttcaattccgccaacgtgctgcagggatttcagatgcacacgcgtaccctgcgcctctttcctcggcctgtggtagcttttcaagctggctcctttctagcctcacgtccccggcagactccttttgccgagaaattggccaggactcaggctgtggagtactttggggaatggatccttaaccccaccaactatgcctttcagcgaattcacaacaatatgtttgatccagccctgattggtgacaagccaaagtggtatgctcatcagctgcagcctatccactatcgcgtctatgacagcaattcccagctggctgaggccctgagtgtaccaccagagcgggactctgactccgaacctactgatgatagtggcagtgatagtatggattatgacgattcaagctcttcttactcctcccttggtgactttgtcagtgaaatgatgaaatgtgacattaatggtgatactcccaatgtggaccctctgacacatgcagcactgggggatgccagcgaggtggagattgacgagctgcagaatcagaaggaagcagaagagcctggcccagacagtgagaactctcaggaaaaccccccactgcgctccagctctagcaccacagccagcagcagccccagcactgtcatccacggagccaactctgaacctgctgactctacggagatggatgataaggcagcagtaggcgtctccaagcccctcccttccgtgcctcccagcattggcaaatcgaacgtggacagacgtcaggcagaaattggagagggggctcaaaagctgctgcggcccaacagcttgagactggcaagtgactcagatgcagagtcagactctcgggcaagctctcccaactccaccgtctccaacaccagcaccgagggcttcgggggcatcatgtcttttgccagcagcctctatcggaaccacagtaccagcttcagtctttcaaacctcacactgcccaccaaaggtgcccgagagaaggccacgcccttccccagtctgaaaggaaacaggagggcgttagtggatcagaagtcatctgtcattaaacacagcccaacagtgaaaagagaacctccatcaccccagggtcgatccagcaattctagtgagaaccagcagttcctgaaggaggtggtgcacagcgtgctggacggccagggagttggctggctcaacatgaaaaaggtgcgccggctgctggagagcgagcagctgcgagtctttgtcctgagcaagctgaaccgcatggtgcagtcagaggacgatgcccggcaggacatcatcccggatgtggagatcagtcggaaggtgtacaagggaatgttagacctcctcaagtgtacagtcctcagcttggagcagtcctatgcccacgcgggtctgggtggcatggccagcatctttgggcttttggagattgcccagacccactactatagtaaagaaccagacaagcggaagagaagtccaacagaaagtgtaaataccccagttggcaaggatcctggcctagctgggcggggggacccaaaggctatggcacaactgagagttccacaactgggacctcgggcaccaagtgccacaggaaagggtcctaaggaactggacaccagaagtttaaaggaagaaaattttatagcatctattgggcctgaagtaatcaaacctgtctttgaccttggtgagacagaggagaaaaagtcccagatcagcgcagacagtggtgtgagcctgacgtctagttcccagaggactgatcaagactctgtcatcggcgtgagtccagctgttatgatccgcagctcaagtcaggattctgaagtgagtaatagctctggagagacccttggagctgacagtgacttgagcagcaatgcaggtgatggaccaggtggcgagggcagtgttcacctggcaagctctcggggcactttgtctgatagtgaaattgagaccaactctgccacaagcaccatctttggtaaagcccacagcttgaagccaagcataaaggagaagctggcaggcagccccattcgtacttctgaagatgtgagccagcgagtctatctctatgagggactcctaggcaaagagcgttctactttatgggaccaaatgcaattctgggaagatgccttcttagatgctgtgatgttggagagagaagggatgggtatggaccagggtccccaggaaatgatcgacaggtacctgtcccttggagaacatgaccggaagcgcctggaagatgatgaagatcgcttgttggccacacttctgcacaacctcatctcctacatgctgctgatgaaggtaaataagaatgacatccgcaagaaggtgaggcgcctaatgggaaagtcgcacattgggcttgtgtacagccagcaaatcaatgaggtgcttgatcagctggcgaacctgaatggacgcgatctctctatctggtccagtggcagccggcacatgaagaagcagacatttgtggtacatgcagggacagatacaaacggagatatctttttcatggaggtgtgcgatgactgtgtggtgttgcgtagtaacatcggaacagtgtatgagcgctggtggtacgagaagctcatcaacatgacctactgtcccaagacgaaggtgttgtgcttgtggcgtagaaatggctctgagacccagctcaacaagttctatactaaaaagtgtcgggagctgtactactgtgtgaaggacagcatggagcgcgctgccgcccgacagcaaagcatcaaacccggacctgaattgggtggcgagttccctgtgcaggacctgaagactggtgagggtggcctgctgcaggtgaccctggaagggatcaacctcaaattcatgcacaatcaggttttcatagagctgaatcacattaaaaagtgcaatacagttcgaggcgtctttgtcctggaggaatttgttcctgaaattaaagaagtggtgagccacaagtacaagacaccaatggcccacgaaatctgctactccgtattatgtctcttctcgtacgtggctgcagttcatagcagtgaggaagatctcagaaccccgccccggcctgtctctagctgatggagaggggctacgcagctgccccagcccagggcacgcccctggccccttgctgttcccaagtgcacgatgctgctgtgactgaggagtggatgatgctcgtgtgtcctctgcaagccccctgctgtggcttggttggttaccggttatgtgtccctctgagtgtgtcttgagcgtgtccaccttctccctctccactcccagaag

SEQ ID NO: 151718 - DNA, 5744 bp, Homo sapiens
  Payload ID: 9858
  Gene Symbol: MADD
  Gene Name: MAP-kinase activating death domain
  Uniprot ID: Q8WXG6
  ENST ID: ENST00000407859
  CDS Start-End: 166-4863
cccgctgcccaggattggtaggctccaccgctcggcagccggcttccctgctcggacgccgagcaccgccaaagcgcacttcgattttcagaattcctcctgggaatgctgactccttgcttggtgccctgatgcttctctgagataaactgatgaattggaaccatggtgcaaaagaagaagttctgtcctcggttacttgactatctagtgatcgtaggggccaggcacccgagcagtgatagcgtggcccagactcctgaattgctacggcgataccccttggaggatcacactgagtttcccctgcccccagatgtagtgttcttctgccagcccgagggctgcctgagcgtgcggcagcggcgcatgagccttcgggatgatacctcttttgtcttcaccctcactgacaaggacactggagtcacgcgatatggcatctgtgttaacttctaccgctccttccaaaagcgaatctctaaggagaagggggaaggtggggcagggtcccgtgggaaggaaggaacccatgccacctgtgcctcagaagagggtggcactgagagctcagagagtggctcatccctgcagcctctcagtgctgactctacccctgatgtgaaccagtctcctcggggcaaacgccgggccaaggcggggagccgctcccgcaacagtactctcacgtccctgtgcgtgctcagccactaccctttcttctccaccttccgagagtgtttgtatactctcaagcgcctggtggactgctgtagtgagcgccttctgggcaagaaactgggcatccctcgaggcgtacaaagggacaccatgtggcggatctttactggatcgctgctggtagaggagaagtcaagtgcccttctgcatgaccttcgagagattgaggcctggatctatcgattgctgcgctccccagtacccgtctctgggcagaagcgagtagacatcgaggtcctaccccaagagctccagccagctctgacctttgctcttccagacccatctcgattcaccctagtggatttcccactgcaccttcccttggaacttctaggtgtggacgcctgtctccaggtgctaacctgcattctgttagagcacaaggtggtgctacagtcccgagactacaatgcactctccatgtctgtgatggcattcgtggcaatgatctacccactggagtatatgtttcctgtcatcccgctgctacccacctgcatggcatcagcagagcagctgctgttggctccaaccccgtacatcattggggttcctgccagcttcttcctctacaaactggacttcaaaatgcctgatgatgtatggctagtggatctggacagcaatagggtgattgcccccaccaatgcagaagtgctgcctatcctgccagaaccagaatcactagagctgaaaaagcatttaaagcaggccttggccagcatgagtctcaacacccagcccatcctcaatctggagaaatttcatgagggccaggagatcccccttctcttgggaaggccttctaatgacctgcagtccacaccgtccactgaattcaacccactcatctatggcaatgatgtggattctgtggatgttgcaaccagggttgccatggtacggttcttcaattccgccaacgtgctgcagggatttcagatgcacacgcgtaccctgcgcctctttcctcggcctgtggtagcttttcaagctggctcctttctagcctcacgtccccggcagactccttttgccgagaaattggccaggactcaggctgtggagtactttggggaatggatccttaaccccaccaactatgcctttcagcgaattcacaacaatatgtttgatccagccctgattggtgacaagccaaagtggtatgctcatcagctgcagcctatccactatcgcgtctatgacagcaattcccagctggctgaggccctgagtgtaccaccagagcgggactctgactccgaacctactgatgatagtggcagtgatagtatggattatgacgattcaagctcttcttactcctcccttggtgactttgtcagtgaaatgatgaaatgtgacattaatggtgatactcccaatgtggaccctctgacacatgcagcactgggggatgccagcgaggtggagattgacgagctgcagaatcagaaggaagcagaagagcctggcccagacagtgagaactctcaggaaaaccccccactgcgctccagctctagcaccacagccagcagcagccccagcactgtcatccacggagccaactctgaacctgctgactctacggagatggatgataaggcagcagtaggcgtctccaagcccctcccttccgtgcctcccagcattggcaaatcgaacgtggacagacgtcaggcagaaattggagagggggctcaaaagctgctgcggcccaacagcttgagactggcaagtgactcagatgcagagtcagactctcgggcaagctctcccaactccaccgtctccaacaccagcaccgagggcttcgggggcatcatgtcttttgccagcagcctctatcggaaccacagtaccagcttcagtctttcaaacctcacactgcccaccaaaggtgcccgagagaaggccacgcccttccccagtctgaaagtatttgggctaaatactctaatggagattgttactgaagccggccccgggagtggtgaaggaaacaggagggcgttagtggatcagaagtcatctgtcattaaacacagcccaacagtgaaaagagaacctccatcaccccagggtcgatccagcaattctagtgagaaccagcagttcctgaaggaggtggtgcacagcgtgctggacggccagggagttggctggctcaacatgaaaaaggtgcgccggctgctggagagcgagcagctgcgagtctttgtcctgagcaagctgaaccgcatggtgcagtcagaggacgatgcccggcaggacatcatcccggatgtggagatcagtcggaaggtgtacaagggaatgttagacctcctcaagtgtacagtcctcagcttggagcagtcctatgcccacgcgggtctgggtggcatggccagcatctttgggcttttggagattgcccagacccactactatagtaaagaaccagacaagcggaagagaagtccaacagaaagtgtaaataccccagttggcaaggatcctggcctagctgggcggggggacccaaaggctatggcacaactgagagttccacaactgggacctcgggcaccaagtgccacaggaaagggtcctaaggaactggacaccagaagtttaaaggaagaaaattttatagcatctattgggcctgaagtaatcaaacctgtctttgaccttggtgagacagaggagaaaaagtcccagatcagcgcagacagtggtgtgagcctgacgtctagttcccagaggactgatcaagactctgtcatcggcgtgagtccagctgttatgatccgcagctcaagtcaggattctgaagttagcaccgtggtgagtaatagctctggagagacccttggagctgacagtgacttgagcagcaatgcaggtgatggaccaggtggcgagggcagtgttcacctggcaagctctcggggcactttgtctgatagtgaaattgagaccaactctgccacaagcaccatctttggtaaagcccacagcttgaagccaagcataaaggagaagctggcaggcagccccattcgtacttctgaagatgtgagccagcgagtctatctctatgagggactcctaggcaaagagcgttctactttatgggaccaaatgcaattctgggaagatgccttcttagatgctgtgatgttggagagagaagggatgggtatggaccagggtccccaggaaatgatcgacaggtacctgtcccttggagaacatgaccggaagcgcctggaagatgatgaagatcgcttgttggccacacttctgcacaacctcatctcctacatgctgctgatgaaggtaaataagaatgacatccgcaagaaggtgaggcgcctaatgggaaagtcgcacattgggcttgtgtacagccagcaaatcaatgaggtgcttgatcagctggcgaacctgaatggacgcgatctctctatctggtccagtggcagccggcacatgaagaagcagacatttgtggtacatgcagggacagatacaaacggagatatctttttcatggaggtgtgcgatgactgtgtggtgttgcgtagtaacatcggaacagtgtatgagcgctggtggtacgagaagctcatcaacatgacctactgtcccaagacgaaggtgttgtgcttgtggcgtagaaatggctctgagacccagctcaacaagttctatactaaaaagtgtcgggagctgtactactgtgtgaaggacagcatggagcgcgctgccgcccgacagcaaagcatcaaacccggacctgaattgggtggcgagttccctgtgcaggacctgaagactggtgagggtggcctgctgcaggtgaccctggaagggatcaacctcaaattcatgcacaatcaggttttcatagagctgaatcacattaaaaagtgcaatacagttcgaggcgtctttgtcctggaggaatttgttcctgaaattaaagaagtggtgagccacaagtacaagacaccaatggcccacgaaatctgctactccgtattatgtctcttctcgtacgtggctgcagttcatagcagtgaggaagatctcagaaccccgccccggcctgtctctagctgatggagaggggctacgcagctgccccagcccagggcacgcccctggccccttgctgttcccaagtgcacgatgctgctgtgactgaggagtggatgatgctcgtgtgtcctctgcaagccccctgctgtggcttggttggttaccggttatgtgtccctctgagtgtgtcttgagcgtgtccaccttctccctctccactcccagaagaccaaactgccttcccctcagggctcaagaatgtgtacagtctgtggggccggtgtgaacccactattttgtgtccttgagacatttgtgttgtggttccttgtccttgtccctggcgttataactgtccactgcaagagtctggctctcccttctctgtgacccggcatgactgggcgcctggagcagtttcactctgtgaggagtgagggaaccctggggctcaccctctcagaggaagggcacagagaggaagggaagaattggggggcagccggagtgagtggcagcctccctgcttccttctgcattcccaagccggcagctactgcccagggcccgcagtgttggctgctgcctgccacagcctctgtgactgcagtggagcggcgaattccctgtggcctgccatgccttcggcatcagaggatggagtggtcgaggctagtggagtcccagggaccgctggctgctctgcctgagcatcagggagggggcaggaaagaccaagctgggtttgcacatctgtctgcaggctgtctctccaggcacggggtgtcaggagggagagacagcctgggtatgggcaagaaatgactgtaaatatttcagccccacattatttatagaaaatgtacagttgtgtgaatgtgaaataaatgtcctcaactccc

SEQ ID NO: 151719 - DNA, 5823 bp, Homo sapiens
  Payload ID: 9858
  Gene Symbol: MADD
  Gene Name: MAP-kinase activating death domain
  Uniprot ID: Q8WXG6
  ENST ID: ENST00000402192
  CDS Start-End: 180-4943
cgctcggagcggcgccgcgctggggagcgactgacgccccgctgccgggggacgtcgggctgggcctggccagtcccccagagcttgggagacttcgattttcagaattcctcctgggaatgctgactccttgcttggtgccctgatgcttctctgagataaactgatgaattggaaccatggtgcaaaagaagaagttctgtcctcggttacttgactatctagtgatcgtaggggccaggcacccgagcagtgatagcgtggcccagactcctgaattgctacggcgataccccttggaggatcacactgagtttcccctgcccccagatgtagtgttcttctgccagcccgagggctgcctgagcgtgcggcagcggcgcatgagccttcgggatgatacctcttttgtcttcaccctcactgacaaggacactggagtcacgcgatatggcatctgtgttaacttctaccgctccttccaaaagcgaatctctaaggagaagggggaaggtggggcagggtcccgtgggaaggaaggaacccatgccacctgtgcctcagaagagggtggcactgagagctcagagagtggctcatccctgcagcctctcagtgctgactctacccctgatgtgaaccagtctcctcggggcaaacgccgggccaaggcggggagccgctcccgcaacagtactctcacgtccctgtgcgtgctcagccactaccctttcttctccaccttccgagagtgtttgtatactctcaagcgcctggtggactgctgtagtgagcgccttctgggcaagaaactgggcatccctcgaggcgtacaaagggacaccatgtggcggatctttactggatcgctgctggtagaggagaagtcaagtgcccttctgcatgaccttcgagagattgaggcctggatctatcgattgctgcgctccccagtacccgtctctgggcagaagcgagtagacatcgaggtcctaccccaagagctccagccagctctgacctttgctcttccagacccatctcgattcaccctagtggatttcccactgcaccttcccttggaacttctaggtgtggacgcctgtctccaggtgctaacctgcattctgttagagcacaaggtggtgctacagtcccgagactacaatgcactctccatgtctgtgatggcattcgtggcaatgatctacccactggagtatatgtttcctgtcatcccgctgctacccacctgcatggcatcagcagagcagctgctgttggctccaaccccgtacatcattggggttcctgccagcttcttcctctacaaactggacttcaaaatgcctgatgatgtatggctagtggatctggacagcaatagggtgattgcccccaccaatgcagaagtgctgcctatcctgccagaaccagaatcactagagctgaaaaagcatttaaagcaggccttggccagcatgagtctcaacacccagcccatcctcaatctggagaaatttcatgagggccaggagatcccccttctcttgggaaggccttctaatgacctgcagtccacaccgtccactgaattcaacccactcatctatggcaatgatgtggattctgtggatgttgcaaccagggttgccatggtacggttcttcaattccgccaacgtgctgcagggatttcagatgcacacgcgtaccctgcgcctctttcctcggcctgtggtagcttttcaagctggctcctttctagcctcacgtccccggcagactccttttgccgagaaattggccaggactcaggctgtggagtactttggggaatggatccttaaccccaccaactatgcctttcagcgaattcacaacaatatgtttgatccagccctgattggtgacaagccaaagtggtatgctcatcagctgcagcctatccactatcgcgtctatgacagcaattcccagctggctgaggccctgagtgtaccaccagagcgggactctgactccgaacctactgatgatagtggcagtgatagtatggattatgacgattcaagctcttcttactcctcccttggtgactttgtcagtgaaatgatgaaatgtgacattaatggtgatactcccaatgtggaccctctgacacatgcagcactgggggatgccagcgaggtggagattgacgagctgcagaatcagaaggaagcagaagagcctggcccagacagtgagaactctcaggaaaaccccccactgcgctccagctctagcaccacagccagcagcagccccagcactgtcatccacggagccaactctgaacctgctgactctacggagatggatgataaggcagcagtaggcgtctccaagcccctcccttccgtgcctcccagcattggcaaatcgaacgtggacagacgtcaggcagaaattggagaggggtcagtgcgccggcgaatctatgacaatccatacttcgagccccaatatggctttccccctgaggaagatgaggatgagcagggggaaagttacactccccgattcagccaacatgtcagtggcaatcgggctcaaaagctgctgcggcccaacagcttgagactggcaagtgactcagatgcagagtcagactctcgggcaagctctcccaactccaccgtctccaacaccagcaccgagggcttcgggggcatcatgtcttttgccagcagcctctatcggaaccacagtaccagcttcagtctttcaaacctcacactgcccaccaaaggtgcccgagagaaggccacgcccttccccagtctgaaaggaaacaggagggcgttagtggatcagaagtcatctgtcattaaacacagcccaacagtgaaaagagaacctccatcaccccagggtcgatccagcaattctagtgagaaccagcagttcctgaaggaggtggtgcacagcgtgctggacggccagggagttggctggctcaacatgaaaaaggtgcgccggctgctggagagcgagcagctgcgagtctttgtcctgagcaagctgaaccgcatggtgcagtcagaggacgatgcccggcaggacatcatcccggatgtggagatcagtcggaaggtgtacaagggaatgttagacctcctcaagtgtacagtcctcagcttggagcagtcctatgcccacgcgggtctgggtggcatggccagcatctttgggcttttggagattgcccagacccactactatagtaaagaaccagacaagcggaagagaagtccaacagaaagtgtaaataccccagttggcaaggatcctggcctagctgggcggggggacccaaaggctatggcacaactgagagttccacaactgggacctcgggcaccaagtgccacaggaaagggtcctaaggaactggacaccagaagtttaaaggaagaaaattttatagcatctattgggcctgaagtaatcaaacctgtctttgaccttggtgagacagaggagaaaaagtcccagatcagcgcagacagtggtgtgagcctgacgtctagttcccagaggactgatcaagactctgtcatcggcgtgagtccagctgttatgatccgcagctcaagtcaggattctgaagttagcaccgtgagtaatagctctggagagacccttggagctgacagtgacttgagcagcaatgcaggtgatggaccaggtggcgagggcagtgttcacctggcaagctctcggggcactttgtctgatagtgaaattgagaccaactctgccacaagcaccatctttggtaaagcccacagcttgaagccaagcataaaggagaagctggcaggcagccccattcgtacttctgaagatgtgagccagcgagtctatctctatgagggactcctaggcaaagagcgttctactttatgggaccaaatgcaattctgggaagatgccttcttagatgctgtgatgttggagagagaagggatgggtatggaccagggtccccaggaaatgatcgacaggtacctgtcccttggagaacatgaccggaagcgcctggaagatgatgaagatcgcttgttggccacacttctgcacaacctcatctcctacatgctgctgatgaaggtaaataagaatgacatccgcaagaaggtgaggcgcctaatgggaaagtcgcacattgggcttgtgtacagccagcaaatcaatgaggtgcttgatcagctggcgaacctgaatggacgcgatctctctatctggtccagtggcagccggcacatgaagaagcagacatttgtggtacatgcagggacagatacaaacggagatatctttttcatggaggtgtgcgatgactgtgtggtgttgcgtagtaacatcggaacagtgtatgagcgctggtggtacgagaagctcatcaacatgacctactgtcccaagacgaaggtgttgtgcttgtggcgtagaaatggctctgagacccagctcaacaagttctatactaaaaagtgtcgggagctgtactactgtgtgaaggacagcatggagcgcgctgccgcccgacagcaaagcatcaaacccggacctgaattgggtggcgagttccctgtgcaggacctgaagactggtgagggtggcctgctgcaggtgaccctggaagggatcaacctcaaattcatgcacaatcaggttttcatagagctgaatcacattaaaaagtgcaatacagttcgaggcgtctttgtcctggaggaatttgttcctgaaattaaagaagtggtgagccacaagtacaagacaccaatggcccacgaaatctgctactccgtattatgtctcttctcgtacgtggctgcagttcatagcagtgaggaagatctcagaaccccgccccggcctgtctctagctgatggagaggggctacgcagctgccccagcccagggcacgcccctggccccttgctgttcccaagtgcacgatgctgctgtgactgaggagtggatgatgctcgtgtgtcctctgcaagccccctgctgtggcttggttggttaccggttatgtgtccctctgagtgtgtcttgagcgtgtccaccttctccctctccactcccagaagaccaaactgccttcccctcagggctcaagaatgtgtacagtctgtggggccggtgtgaacccactattttgtgtccttgagacatttgtgttgtggttccttgtccttgtccctggcgttataactgtccactgcaagagtctggctctcccttctctgtgacccggcatgactgggcgcctggagcagtttcactctgtgaggagtgagggaaccctggggctcaccctctcagaggaagggcacagagaggaagggaagaattggggggcagccggagtgagtggcagcctccctgcttccttctgcattcccaagccggcagctactgcccagggcccgcagtgttggctgctgcctgccacagcctctgtgactgcagtggagcggcgaattccctgtggcctgccatgccttcggcatcagaggatggagtggtcgaggctagtggagtcccagggaccgctggctgctctgcctgagcatcagggagggggcaggaaagaccaagctgggtttgcacatctgtctgcaggctgtctctccaggcacggggtgtcaggagggagagacagcctgggtatgggcaagaaatgactgtaaatatttcagccccacattatttatagaaaatgtacagttgtgtgaatgtgaaataaatgtcctcaactcc

SEQ ID NO: 151720 - DNA, 5614 bp, Homo sapiens
  Payload ID: 9858
  Gene Symbol: MADD
  Gene Name: MAP-kinase activating death domain
  Uniprot ID: Q8WXG6
  ENST ID: ENST00000406482
  CDS Start-End: 166-4605
cccgctgcccaggattggtaggctccaccgctcggcagccggcttccctgctcggacgccgagcaccgccaaagcgcacttcgattttcagaattcctcctgggaatgctgactccttgcttggtgccctgatgcttctctgagataaactgatgaattggaaccatggtgcaaaagaagaagttctgtcctcggttacttgactatctagtgatcgtaggggccaggcacccgagcagtgatagcgtggcccagactcctgaattgctacggcgataccccttggaggatcacactgagtttcccctgcccccagatgtagtgttcttctgccagcccgagggctgcctgagcgtgcggcagcggcgcatgagccttcgggatgatacctcttttgtcttcaccctcactgacaaggacactggagtcacgcgatatggcatctgtgttaacttctaccgctccttccaaaagcgaatctctaaggagaagggggaaggtggggcagggtcccgtgggaaggaaggaacccatgccacctgtgcctcagaagagggtggcactgagagctcagagagtggctcatccctgcagcctctcagtgctgactctacccctgatgtgaaccagtctcctcggggcaaacgccgggccaaggcggggagccgctcccgcaacagtactctcacgtccctgtgcgtgctcagccactaccctttcttctccaccttccgagagtgtttgtatactctcaagcgcctggtggactgctgtagtgagcgccttctgggcaagaaactgggcatccctcgaggcgtacaaagggacaccatgtggcggatctttactggatcgctgctggtagaggagaagtcaagtgcccttctgcatgaccttcgagagattgaggcctggatctatcgattgctgcgctccccagtacccgtctctgggcagaagcgagtagacatcgaggtcctaccccaagagctccagccagctctgacctttgctcttccagacccatctcgattcaccctagtggatttcccactgcaccttcccttggaacttctaggtgtggacgcctgtctccaggtgctaacctgcattctgttagagcacaaggtggtgctacagtcccgagactacaatgcactctccatgtctgtgatggcattcgtggcaatgatctacccactggagtatatgtttcctgtcatcccgctgctacccacctgcatggcatcagcagagcagctgctgttggctccaaccccgtacatcattggggttcctgccagcttcttcctctacaaactggacttcaaaatgcctgatgatgtatggctagtggatctggacagcaatagggtgattgcccccaccaatgcagaagtgctgcctatcctgccagaaccagaatcactagagctgaaaaagcatttaaagcaggccttggccagcatgagtctcaacacccagcccatcctcaatctggagaaatttcatgagggccaggagatcccccttctcttgggaaggccttctaatgacctgcagtccacaccgtccactgaattcaacccactcatctatggcaatgatgtggattctgtggatgttgcaaccagggttgccatggtacggttcttcaattccgccaacgtgctgcagggatttcagatgcacacgcgtaccctgcgcctctttcctcggcctgtggtagcttttcaagctggctcctttctagcctcacgtccccggcagactccttttgccgagaaattggccaggactcaggctgtggagtactttggggaatggatccttaaccccaccaactatgcctttcagcgaattcacaacaatatgtttgatccagccctgattggtgacaagccaaagtggtatgctcatcagctgcagcctatccactatcgcgtctatgacagcaattcccagctggctgaggccctgagtgtaccaccagagcgggactctgactccgaacctactgatgatagtggcagtgatagtatggattatgacgattcaagctcttcttactcctcccttggtgactttgtcagtgaaatgatgaaatgtgacattaatggtgatactcccaatgtggaccctctgacacatgcagcactgggggatgccagcgaggtggagattgacgagctgcagaatcagaaggaagcagaagagcctggcccagacagtgagaactctcaggaaaaccccccactgcgctccagctctagcaccacagccagcagcagccccagcactgtcatccacggagccaactctgaacctgctgactctacggagatggatgataaggcagcagtaggcgtctccaagcccctcccttccgtgcctcccagcattggcaaatcgaacgtggacagacgtcaggcagaaattggagagggggctcaaaagctgctgcggcccaacagcttgagactggcaagtgactcagatgcagagtcagactctcgggcaagctctcccaactccaccgtctccaacaccagcaccgagggcttcgggggcatcatgtcttttgccagcagcctctatcggaaccacagtaccagcttcagtctttcaaacctcacactgcccaccaaaggtgcccgagagaaggccacgcccttccccagtctgaaaggaaacaggagggcgttagtggatcagaagtcatctgtcattaaacacagcccaacagtgaaaagagaacctccatcaccccagggtcgatccagcaattctagtgagaaccagcagttcctgaaggaggtggtgcacagcgtgctggacggccagggagttggctggctcaacatgaaaaaggtgcgccggctgctggagagcgagcagctgcgagtctttgtcctgagcaagctgaaccgcatggtgcagtcagaggacgatgcccggcaggacatcatcccggatgtggagatcagtcggaaggtgtacaagggaatgttagacctcctcaagtgtacagtcctcagcttggagcagtcctatgcccacgcgggtctgggtggcatggccagcatctttgggcttttggagattgcccagacccactactatagtaaagaaccagacaagcggaagagaagtccaacagaaagtgtaaataccccagttggcaaggatcctggcctagctgggcggggggacccaaaggctatggcacaactgagagttccacaactgggacctcgggcaccaagtgccacaggaaagggtcctaaggaactggacaccagaagtttaaaggaagaaaattttatagcatctattgggcctgaagtaatcaaacctgtctttgaccttggtgagacagaggagaaaaagtcccagatcagcgcagacagtggtgtgagcctgacgtctagttcccagaggactgatcaagactctgtcatcggcgtgagtccagctgttatgatccgcagctcaagtcaggattctgaagttagcaccgtggtgagtaatagctctggagagacccttggagctgacagtgacttgagcagcaatgcaggtgatggaccaggtggcgagggcagtgttcacctggcaagctctcggggcactttgtctgatagtgaaattgagaccaactctgccacaagcaccatctttggtaaagcccacagcttgaagccaagcataaaggagaagctggcaggcagccccattcgtacttctgaagatgtgagccagcgagtctatctctatgagggactcctaggcaaagagcgttctactttatgggaccaaatgcaattctgggaagatgccttcttagatgctgtgatgttggagagagaagggatgggtatggaccagggtccccaggaaatgatcgacaggtacctgtcccttggagaacatgaccggaagcgcctggaagatgatgaagatcgcttgttggccacacttctgcacaacctcatctcctacatgctgctgatgaaggtaaataagaatgacatccgcaagaaggtgaggcgcctaatgggaaagtcgcacattgggcttgtgtacagccagcaaatcaatgaggtgcttgatcagctggcgaacctgaatggacgcgatctctctatctggtccagtggcagccggcacatgaagaagcagacatttgtggtacatgcagggacagatacaaacggagatatctttttcatggaggtgtgcgatgactgtgtggtgttgcgtagtaacatcggaacagtgtatgagcgctggtggtacgagaagctcatcaacatgacctactgtcccaagacgaaggtgttgtgcttgtggcgtagaaatggctctgagacccagctcaacaagttctatactaaaaagtgtcgggagctgtactactgtgtgaaggacagcatggagcgcgctgccgcccgacagcaaagcatcaaacccggacctgaattgggtggcgagttccctgtgcaggacctgaagactggtgagggtggcctgctgcaggtgaccctggaagggatcaacctcaaattcatgcacaatcagttcctgaaattaaagaagtggtgagccacaagtacaagacaccaatggcccacgaaatctgctactccgtattatgtctcttctcgtacgtggctgcagttcatagcagtgaggaagatctcagaaccccgccccggcctgtctctagctgatggagaggggctacgcagctgccccagcccagggcacgcccctggccccttgctgttcccaagtgcacgatgctgctgtgactgaggagtggatgatgctcgtgtgtcctctgcaagccccctgctgtggcttggttggttaccggttatgtgtccctctgagtgtgtcttgagcgtgtccaccttctccctctccactcccagaagaccaaactgccttcccctcagggctcaagaatgtgtacagtctgtggggccggtgtgaacccactattttgtgtccttgagacatttgtgttgtggttccttgtccttgtccctggcgttataactgtccactgcaagagtctggctctcccttctctgtgacccggcatgactgggcgcctggagcagtttcactctgtgaggagtgagggaaccctggggctcaccctctcagaggaagggcacagagaggaagggaagaattggggggcagccggagtgagtggcagcctccctgcttccttctgcattcccaagccggcagctactgcccagggcccgcagtgttggctgctgcctgccacagcctctgtgactgcagtggagcggcgaattccctgtggcctgccatgccttcggcatcagaggatggagtggtcgaggctagtggagtcccagggaccgctggctgctctgcctgagcatcagggagggggcaggaaagaccaagctgggtttgcacatctgtctgcaggctgtctctccaggcacggggtgtcaggagggagagacagcctgggtatgggcaagaaatgactgtaaatatttcagccccacattatttatagaaaatgtacagttgtgtgaatgtgaaataaatgtcctcaactccc

SEQ ID NO: 151721 - DNA, 1823 bp, Homo sapiens
  Payload ID: 9858
  Gene Symbol: MADD
  Gene Name: MAP-kinase activating death domain
  ENST ID: ENST00000405573
  CDS Start-End: 214-1533
attgcatctggggtagaattgtggaacaagcaccaggaagtgaaaaagcaaaaagctttggaaaaacagaggcctgaagtaatcaaacctgtctttgaccttggtgagacagaggagaaaaagtcccagatcagcgcagacagtggtgtgagcctgacgtctagttcccagaggactgatcaagactctgtcatcggcgtgagtccagctgttatgatccgcagctcaagtcaggattctgaagtgagtaatagctctggagagacccttggagctgacagtgacttgagcagcaatgcaggtgatggaccaggtggcgagggcagtgttcacctggcaagctctcggggcactttgtctgatagtgaaattgagaccaactctgccacaagcaccatctttggtaaagcccacagcttgaagccaagcataaaggagaagctggcaggcagccccattcgtacttctgaagatgtgagccagcgagtctatctctatgagggactcctaggaagggacaaaggatccatgtgggaccagttagaggatgcagctatggagaccttttctataagcaaagagcgttctactttatgggaccaaatgcaattctgggaagatgccttcttagatgctgtgatgttggagagagaagggatgggtatggaccagggtccccaggaaatgatcgacaggtacctgtcccttggagaacatgaccggaagcgcctggaagatgatgaagatcgcttgttggccacacttctgcacaacctcatctcctacatgctgctgatgaaggtaaataagaatgacatccgcaagaaggtgaggcgcctaatgggaaagtcgcacattgggcttgtgtacagccagcaaatcaatgaggtgcttgatcagctggcgaacctgaatggacgcgatctctctatctggtccagtggcagccggcacatgaagaagcagacatttgtggtacatgcagggacagatacaaacggagatatctttttcatggaggtgtgcgatgactgtgtggtgttgcgtagtaacatcggaacagtgtatgagcgctggtggtacgagaagctcatcaacatgacctactgtcccaagacgaaggtgttgtgcttgtggcgtagaaatggctctgagacccagctcaacaagttctatactaaaaagtgtcgggagctgtactactgtgtgaaggacagcatggagcgcgctgccgcccgacagcaaagcatcaaacccggacctgaattgggtggcgagttccctgtgcaggacctgaagactggtgagggtggcctgctgcaggtgaccctggaagggatcaacctcaaattcatgcacaatcaggtaggtgcgagcggcagcacgaggctccctgtcgttccatctgtaagaaggaccaatgtccaagcccccagtacttccccagcaagcatgagagagggccctctggagctagagggagaactggagcagctggacccaggaaagaaaccccaggggagggcacagtgacgttggcgaccacctggcgctgtgaaggtgcaccagggagcccgtgggggaggctgggcaggagcgaggccaggtggccacgctgccccatccgttggactccacacagtgtgagtgggagcgtctcacttggcccttcccctgcagtgtctctgccttcctctattcccaggatatgcttctgcttggtggttttgctttgagagtctagactggccgatctccttgtgtctttctggtgtgcgtgcagcttgcgtgtgcgtgcgtgcgtgcctgcgtgcttgtgtgta

SEQ ID NO: 151722 - DNA, 5684 bp, Homo sapiens
  Payload ID: 9858
  Gene Symbol: MADD
  Gene Name: MAP-kinase activating death domain
  Uniprot ID: Q8WXG6
  ENST ID: ENST00000402799
  CDS Start-End: 166-4803
cccgctgcccaggattggtaggctccaccgctcggcagccggcttccctgctcggacgccgagcaccgccaaagcgcacttcgattttcagaattcctcctgggaatgctgactccttgcttggtgccctgatgcttctctgagataaactgatgaattggaaccatggtgcaaaagaagaagttctgtcctcggttacttgactatctagtgatcgtaggggccaggcacccgagcagtgatagcgtggcccagactcctgaattgctacggcgataccccttggaggatcacactgagtttcccctgcccccagatgtagtgttcttctgccagcccgagggctgcctgagcgtgcggcagcggcgcatgagccttcgggatgatacctcttttgtcttcaccctcactgacaaggacactggagtcacgcgatatggcatctgtgttaacttctaccgctccttccaaaagcgaatctctaaggagaagggggaaggtggggcagggtcccgtgggaaggaaggaacccatgccacctgtgcctcagaagagggtggcactgagagctcagagagtggctcatccctgcagcctctcagtgctgactctacccctgatgtgaaccagtctcctcggggcaaacgccgggccaaggcggggagccgctcccgcaacagtactctcacgtccctgtgcgtgctcagccactaccctttcttctccaccttccgagagtgtttgtatactctcaagcgcctggtggactgctgtagtgagcgccttctgggcaagaaactgggcatccctcgaggcgtacaaagggacaccatgtggcggatctttactggatcgctgctggtagaggagaagtcaagtgcccttctgcatgaccttcgagagattgaggcctggatctatcgattgctgcgctccccagtacccgtctctgggcagaagcgagtagacatcgaggtcctaccccaagagctccagccagctctgacctttgctcttccagacccatctcgattcaccctagtggatttcccactgcaccttcccttggaacttctaggtgtggacgcctgtctccaggtgctaacctgcattctgttagagcacaaggtggtgctacagtcccgagactacaatgcactctccatgtctgtgatggcattcgtggcaatgatctacccactggagtatatgtttcctgtcatcccgctgctacccacctgcatggcatcagcagagcagctgctgttggctccaaccccgtacatcattggggttcctgccagcttcttcctctacaaactggacttcaaaatgcctgatgatgtatggctagtggatctggacagcaatagggtgattgcccccaccaatgcagaagtgctgcctatcctgccagaaccagaatcactagagctgaaaaagcatttaaagcaggccttggccagcatgagtctcaacacccagcccatcctcaatctggagaaatttcatgagggccaggagatcccccttctcttgggaaggccttctaatgacctgcagtccacaccgtccactgaattcaacccactcatctatggcaatgatgtggattctgtggatgttgcaaccagggttgccatggtacggttcttcaattccgccaacgtgctgcagggatttcagatgcacacgcgtaccctgcgcctctttcctcggcctgtggtagcttttcaagctggctcctttctagcctcacgtccccggcagactccttttgccgagaaattggccaggactcaggctgtggagtactttggggaatggatccttaaccccaccaactatgcctttcagcgaattcacaacaatatgtttgatccagccctgattggtgacaagccaaagtggtatgctcatcagctgcagcctatccactatcgcgtctatgacagcaattcccagctggctgaggccctgagtgtaccaccagagcgggactctgactccgaacctactgatgatagtggcagtgatagtatggattatgacgattcaagctcttcttactcctcccttggtgactttgtcagtgaaatgatgaaatgtgacattaatggtgatactcccaatgtggaccctctgacacatgcagcactgggggatgccagcgaggtggagattgacgagctgcagaatcagaaggaagcagaagagcctggcccagacagtgagaactctcaggaaaaccccccactgcgctccagctctagcaccacagccagcagcagccccagcactgtcatccacggagccaactctgaacctgctgactctacggagatggatgataaggcagcagtaggcgtctccaagcccctcccttccgtgcctcccagcattggcaaatcgaacgtggacagacgtcaggcagaaattggagagggggctcaaaagctgctgcggcccaacagcttgagactggcaagtgactcagatgcagagtcagactctcgggcaagctctcccaactccaccgtctccaacaccagcaccgagggcttcgggggcatcatgtcttttgccagcagcctctatcggaaccacagtaccagcttcagtctttcaaacctcacactgcccaccaaaggtgcccgagagaaggccacgcccttccccagtctgaaaggaaacaggagggcgttagtggatcagaagtcatctgtcattaaacacagcccaacagtgaaaagagaacctccatcaccccagggtcgatccagcaattctagtgagaaccagcagttcctgaaggaggtggtgcacagcgtgctggacggccagggagttggctggctcaacatgaaaaaggtgcgccggctgctggagagcgagcagctgcgagtctttgtcctgagcaagctgaaccgcatggtgcagtcagaggacgatgcccggcaggacatcatcccggatgtggagatcagtcggaaggtgtacaagggaatgttagacctcctcaagtgtacagtcctcagcttggagcagtcctatgcccacgcgggtctgggtggcatggccagcatctttgggcttttggagattgcccagacccactactatagtaaagaaccagacaagcggaagagaagtccaacagaaagtgtaaataccccagttggcaaggatcctggcctagctgggcggggggacccaaaggctatggcacaactgagagttccacaactgggacctcgggcaccaagtgccacaggaaagggtcctaaggaactggacaccagaagtttaaaggaagaaaattttatagcatctattgggcctgaagtaatcaaacctgtctttgaccttggtgagacagaggagaaaaagtcccagatcagcgcagacagtggtgtgagcctgacgtctagttcccagaggactgatcaagactctgtcatcggcgtgagtccagctgttatgatccgcagctcaagtcaggattctgaagttagcaccgtggtgagtaatagctctggagagacccttggagctgacagtgacttgagcagcaatgcaggtgatggaccaggtggcgagggcagtgttcacctggcaagctctcggggcactttgtctgatagtgaaattgagaccaactctgccacaagcaccatctttggtaaagcccacagcttgaagccaagcataaaggagaagctggcaggcagccccattcgtacttctgaagatgtgagccagcgagtctatctctatgagggactcctaggcaaagagcgttctactttatgggaccaaatgcaattctgggaagatgccttcttagatgctgtgatgttggagagagaagggatgggtatggaccagggtccccaggaaatgatcgacaggtacctgtcccttggagaacatgaccggaagcgcctggaagatgatgaagatcgcttgttggccacacttctgcacaacctcatctcctacatgctgctgatgaaggtaaataagaatgacatccgcaagaaggtgaggcgcctaatgggaaagtcgcacattgggcttgtgtacagccagcaaatcaatgaggtgcttgatcagctggcgaacctgaatggacgcgatctctctatctggtccagtggcagccggcacatgaagaagcagacatttgtggtacatgcagggacagatacaaacggagatatctttttcatggaggtgtgcgatgactgtgtggtgttgcgtagtaacatcggaacagtgtatgagcgctggtggtacgagaagctcatcaacatgacctactgtcccaagacgaaggtgttgtgcttgtggcgtagaaatggctctgagacccagctcaacaagttctatactaaaaagtgtcgggagctgtactactgtgtgaaggacagcatggagcgcgctgccgcccgacagcaaagcatcaaacccggacctgaattgggtggcgagttccctgtgcaggacctgaagactggtgagggtggcctgctgcaggtgaccctggaagggatcaacctcaaattcatgcacaatcaggttttcatagagctgaatcacattaaaaagtgcaatacagttcgaggcgtctttgtcctggaggaatttgttcctgaaattaaagaagtggtgagccacaagtacaagacaccaatggcccacgaaatctgctactccgtattatgtctcttctcgtacgtggctgcagttcatagcagtgaggaagatctcagaaccccgccccggcctgtctctagctgatggagaggggctacgcagctgccccagcccagggcacgcccctggccccttgctgttcccaagtgcacgatgctgctgtgactgaggagtggatgatgctcgtgtgtcctctgcaagccccctgctgtggcttggttggttaccggttatgtgtccctctgagtgtgtcttgagcgtgtccaccttctccctctccactcccagaagaccaaactgccttcccctcagggctcaagaatgtgtacagtctgtggggccggtgtgaacccactattttgtgtccttgagacatttgtgttgtggttccttgtccttgtccctggcgttataactgtccactgcaagagtctggctctcccttctctgtgacccggcatgactgggcgcctggagcagtttcactctgtgaggagtgagggaaccctggggctcaccctctcagaggaagggcacagagaggaagggaagaattggggggcagccggagtgagtggcagcctccctgcttccttctgcattcccaagccggcagctactgcccagggcccgcagtgttggctgctgcctgccacagcctctgtgactgcagtggagcggcgaattccctgtggcctgccatgccttcggcatcagaggatggagtggtcgaggctagtggagtcccagggaccgctggctgctctgcctgagcatcagggagggggcaggaaagaccaagctgggtttgcacatctgtctgcaggctgtctctccaggcacggggtgtcaggagggagagacagcctgggtatgggcaagaaatgactgtaaatatttcagccccacattatttatagaaaatgtacagttgtgtgaatgtgaaataaatgtcctcaactccc

SEQ ID NO: 151723 - DNA, 437 bp, Homo sapiens
  Payload ID: 9858
  Gene Symbol: MADD
  Gene Name: MAP-kinase activating death domain
  ENST ID: ENST00000453571
  CDS Start-End: 212-437
aatagaggaggaagcctgcgatctttaggatccgcctccaggcccagaggagggagagtcacaaatgacagccttggccgtgagagggggcctcttcttactaacccccactgcgccatatggacttcgattttcagaattcctcctgggaatgctgactccttgcttggtgccctgatgcttctctgagataaactgatgaattggaaccatggtgcaaaagaagaagttctgtcctcggttacttgactatctagtgatcgtaggggccaggcacccgagcagtgatagcgtggcccagactcctgaattgctacggcgataccccttggaggatcacactgagtttcccctgcccccagatgtagtgttcttctgccagcccgagggctgcctgagcgtgcggcagcggcgcatgagccttcgggatgatacct

SEQ ID NO: 151724 - DNA, 549 bp, Homo sapiens
  Payload ID: 9858
  Gene Symbol: MADD
  Gene Name: MAP-kinase activating death domain
  ENST ID: ENST00000428807
  CDS Start-End: 87-549
cccccgctgcccaggattggtaggctccaccgctcggcagccggcttccctgctcggacgccgagcaccgccaaagcgcggacaccatgtggcggatctttactggatcgctgctggtagaggagaagtcaagtgcccttctgcatgaccttcgagagattgaggcctggatctatcgattgctgcgctccccagtacccgtctctgggcagaagcgagtagacatcgaggtcctaccccaagagctccagccagctctgacctttgctcttccagacccatctcgattcaccctagtggatttcccactgcaccttcccttggaacttctaggtgtggacgcctgtctccaggtgctaacctgcattctgttagagcacaaggtggtgctacagtcccgagactacaatgcactctccatgtctgtgatggcattcgtggcaatgatctacccactggagtatatgtttcctgtcatcccgctgctacccacctgcatggcatcagcagagcagctgctgttggctccaaccccgtacatcattgggg

SEQ ID NO: 151725 - DNA, 580 bp, Homo sapiens
  Payload ID: 9858
  Gene Symbol: MADD
  Gene Name: MAP-kinase activating death domain
  ENST ID: ENST00000422579
  CDS Start-End: 176-580
tatagagataaaactgaatcctattacctgcaggtcctctactgggagcaagggaaaggagaaagcagtattttgaggatttgagagacttcgattttcagaattcctcctgggaatgctgactccttgcttggtgccctgatgcttctctgagataaactgatgaattggaaccatggtgcaaaagaagaagttctgtcctcggttacttgactatctagtgatcgtaggggccaggcacccgagcagtgatagcgtggcccagactcctgaattgctacggcgataccccttggaggatcacactgagtttcccctgcccccagatgtagtgttcttctgccagcccgagggctgcctgagcgtgcggcagcggcgcatgagccttcgggatgatacctcttttgtcttcaccctcactgacaaggacactggagtcacgcgatatggcatctgtgttaacttctaccgctccttccaaaagcgaatctctaaggagaagggggaaggtggggcagggtcccgtgggaaggaaggaacccatgccacctgtgcctcagaagagggtggcactgagagc

SEQ ID NO: 151726 - DNA, 711 bp, Homo sapiens
  Payload ID: 9858
  Gene Symbol: MADD
  Gene Name: MAP-kinase activating death domain
  ENST ID: ENST00000444117
  CDS Start-End: 303-711
aggctccaccgctcggcagccggcttccctgctcggacgccgagcaccgccaaagcgcgtgagtggggggtggggactgggggatggggagcccgtcaggaagtctcaggggccgattatcttgggaagtgactttcagaggaatccccatgtcgtcgaaacgggcgctatgaccccgtcgggtgagagtctctctgagcaacccaaacagaagacttcgattttcagaattcctcctgggaatgctgactccttgcttggtgccctgatgcttctctgagataaactgatgaattggaaccatggtgcaaaagaagaagttctgtcctcggttacttgactatctagtgatcgtaggggccaggcacccgagcagtgatagcgtggcccagactcctgaattgctacggcgataccccttggaggatcacactgagtttcccctgcccccagatgtagtgttcttctgccagcccgagggctgcctgagcgtgcggcagcggcgcatgagccttcgggatgatacctcttttgtcttcaccctcactgacaaggacactggagtcacgcgatatggcatctgtgttaacttctaccgctccttccaaaagcgaatctctaaggagaagggggaaggtggggcagggtcccgtgggaaggaaggaacccatgccacctgtgcctcagaagagggtggcactgagagctcag

SEQ ID NO: 151727 - DNA, 658 bp, Homo sapiens
  Payload ID: 9858
  Gene Symbol: MADD
  Gene Name: MAP-kinase activating death domain
  ENST ID: ENST00000634938
  CDS Start-End: 1-598
cggagatatctttttcatggaggtgtgcgatgactgtgtggtgttgcgtagtaacatcggaacagtgtatgagcgctggtggtacgagaagctcatcaacatgacctactgtcccaagacgaaggtgttgtgcttgtggcgtagaaatggctctgagacccagctcaacaagttctatactaaaaagtgtcgggagctgtactactgtgtgaaggacagcatggagcgcgctgccgcccgacagcaaagcatcaaacccggacctgaattgggtggcgagttccctgtgcaggacctgaagactggtgagggtggcctgctgcaggtgaccctggaagggatcaacctcaaattcatgcacaatcaggagcggaaggttttcatagagctgaatcacattaaaaagtgcaatacagttcgaggcgtctttgtcctggaggaatttgttcctgaaattaaagaagtggtgagccacaagtacaagacaccaatggcccacgaaatctgctactccgtattatgtctcttctcgtacgtggctgcagttcatagcagtgaggaagatctcagaaccccgccccggcctgtctctagctgatggagaggggctacgcagctgccccagcccagggcacgcccctggccccttgctgttccc

SEQ ID NO: 151728 - DNA, 1699 bp, Homo sapiens
  Payload ID: 9859
  Gene Symbol: MARCKSL1
  Gene Name: MARCKS-like 1
  Uniprot ID: P49006
  ENST ID: ENST00000329421
  CDS Start-End: 347-934
gtacccgaccgccagcgtcgcctgctgcgcaagtggggcctgcgagccaaccccgcctccgcccctcgattgggcgcgcatttaaatgtccggccccgccccgagctccgggcgcttatatataggcagctcggcgggcggcgggcggcattctggcgcggagcggagcggcggcgggcgcagctagcgggtcggccgcggagcggaggtgcagctcggcttcccccggcacccctccccctcgggcgccagccccacccctccgccggccgggccgaccccgccgtactatcccctgcggcgcgagcccggggcggctccaagcgccccccagcagacccccatcatgggcagccagagctccaaggctccccggggcgacgtgaccgccgaggaggcagcaggcgcttcccccgcgaaggccaacggccaggagaatggccacgtgaaaagcaatggagacttatcccccaagggtgaaggggagtcgccccctgtgaacggaacagatgaggcagccggggccactggcgatgccatcgagccagcaccccctagccagggtgctgaggccaagggggaggtcccccccaaggagacccccaagaagaagaagaaattctctttcaagaagcctttcaaattgagcggcctgtccttcaagagaaatcggaaggagggtgggggtgattcttctgcctcctcacccacagaggaagagcaggagcagggggagatcggtgcctgcagcgacgagggcactgctcaggaagggaaggccgcagccacccctgagagccaggaaccccaggccaagggggcagaggctagtgcagcctcagaagaagaggcagggccccaggctacagagccatccactccctcggggccggagagtggccctacaccagccagcgctgagcagaatgagtagctaggtaggggcaggtgggtgatctctaagctgcaaaaactgtgctgtccttgtgaggtcactgcctggacctggtgccctggctgccttcctgtgcccagaaaggaaggggctattgcctcctcccagccacgttccctttcctcctctccctcctgtggattctcccatcagccatctggttctcctcttaaggccagttgaagatggtcccttacagcttcccaagttaggttagtgatgtgaaatgctcctgtccctggccctacctccttccctgtccccacccctgcataaggcagttgttggttttcttccccaattcttttccaagtaggttttgtttaccctactccccaaatccctgagccagaagtggggtgcttatactcccaaaccttgagtgtccagccttcccctgttgtttttagtctcttgtgctgtgcctagtggcacctgggctggggaggacactgccccgtctaggtttttataaatgtcttactcaagttcaaacctccagcctgtgaatcaactgtgtctcttttttgacttggtaagcaagtattaggctttggggtggggggaggtctgtaatgtgaaacaacttcttgtctttttttctcccactgttgtaaataacttttaatggccaaaccccagatttgtactttttttttttttctaactgctaaaaccattctcttccacctggttttactgtaacatttggaaaaggaataaatgtcgtccctttagtggtgc

SEQ ID NO: 151729 - DNA, 825 bp, Homo sapiens
  Payload ID: 9860
  Gene Symbol: MZB1
  Gene Name: marginal zone B and B1 cell-specific protein
  Uniprot ID: Q8WU39
  ENST ID: ENST00000302125
  CDS Start-End: 59-628
cacacacacatctgcacctcaaccacagactacacttgctgaactggctcctggggccatgaggctgtcactgccactgctgctgctgctgctgggagcctgggccatcccagggggcctcggggacagggcgccactcacagccacagccccacaactggatgatgaggagatgtactcagcccacatgcccgctcacctgcgctgtgatgcctgcagagctgtggcttaccagatgtggcaaaatctggcaaaggcagagaccaaacttcatacctcaaactctggggggcggcgggagctgagcgagttggtctacacggatgtcctggaccggagctgctcccggaactggcaggactacggagttcgagaagtggaccaagtgaaacgtctcacaggcccaggacttagcgaggggccagagccaagcatcagcgtgatggtcacagggggcccctggcctaccaggctctccaggacatgtttgcactacttgggggagtttggagaagaccagatctatgaagcccaccaacaaggccgaggggctctggaggcattgctatgtgggggaccccagggggcctgctcagagaaggtgtcagccacaagagaagagctctagtcctggactctaccctcctctgaaagaagctggggcttgctctgacggtctccactcccgtctgcaggcagccaggagggcaggaagcccttgctctgtgctgccatcctgcctccctcctccagcctcagggcactcgggcctgggtgggagtcaacgccttcccctctggactcaaataaaacccagtgacctca

SEQ ID NO: 151730 - DNA, 988 bp, Homo sapiens
  Payload ID: 9860
  Gene Symbol: MZB1
  Gene Name: marginal zone B and B1 cell-specific protein
  Uniprot ID: Q8WU39
  ENST ID: ENST00000417694
  CDS Start-End: 58-285
acacacacatctgcacctcaaccacagactacacttgctgaactggctcctggggccatgaggctgtcactgccactgctgctgctgctgctgggagcctgggccatcccagggggcctcggggacagggcgccactcacagccacagccccacaactggatgatgaggagatgtactcagcccacatgcccgctcacctgcgctgtgatgcctgcagagctgtggcttaccagagactctgctcctatcctccccacctccccctaactgagcagcagtcctgaggccctgcctcccagtccctccttgttccagatgtggcaaaatctggcaaaggcagagaccaaacttcatacctcaaactctggggggcggcgggagctgagcgagttggtctacacggatgtcctggaccggagctgctcccggaactggcaggactacggagttcgagaagtggaccaagtgaaacgtctcacaggcccaggacttagcgaggggccagagccaagcatcagcgtgatggtcacagggggcccctggcctaccaggctctccaggacatgtttgcactacttgggggagtttggagaagaccagatctatgaagcccaccaacaaggccgaggggctctggaggcattgctatgtgggggaccccagggggcctgctcagagaaggtgtcagccacaagagaagagctctagtcctggactctaccctcctctgaaagaagctggggcttgctctgacggtctccactcccgtctgcaggcagccaggagggcaggaagcccttgctctgtgctgccatcctgcctccctcctccagcctcagggcactcgggcctgggtgggagtcaacgccttcccctctggactcaaataaaacccagtgacctcacttcttttctctgcaaaaggtgcttgtggggctgggagtgcagacattggtgtttctgctgatgtcccttgtgaaaaaaaaa

SEQ ID NO: 151731 - DNA, 1096 bp, Homo sapiens
  Payload ID: 9860
  Gene Symbol: MZB1
  Gene Name: marginal zone B and B1 cell-specific protein
  Uniprot ID: Q8WU39
  ENST ID: ENST00000503481
  CDS Start-End: 226-597
tgaaatggagctgagatggctggagccagggtccagctagaggacaatgcccacgtggcatcttcggggccctggaggagggagtgggaggaggatgggaggggtgaggtgtcagttccccattggtctaggccaggtgttctgtggcggtccccacaccacacaagcacacacacatctgcacctcaaccacagactacacttgctgaactggctcctggggccatgaggctgtcactgccactgctgctgctgctgctgggagcctgggccatcccagggggcctcggggacagggcgccactcacagccacagccccacaactggatgatgaggagatgtactcagcccacatgcccgctcacctgcgctgtgatgcctgcagagctgtggcttaccagtccctccttgttccagatgtggcaaaatctggcaaaggcagagaccaaacttcatacctcaaactctggggggcggcgggagctgagcgagttggtctacacggatgtcctggaccggagctgctcccggaactggcaggactacggagttcgagaagtggaccaagtgaaacgtctcacaggcccaggacttagcgaggggccagagccaagcatcagcgtgatggtcacagggggcccctggcctaccaggctctccaggacatgtttgcactacttgggggagtttggagaagaccagatctatgaagcccaccaacaaggccgaggggctctggaggcattgctatgtgggggaccccagggggcctgctcagagaaggtgtcagccacaagagaagagctctagtcctggactctaccctcctctgaaagaagctggggcttgctctgacggtctccactcccgtctgcaggcagccaggagggcaggaagcccttgctctgtgctgccatcctgcctccctcctccagcctcagggcactcgggcctgggtgggagtcaacgccttcccctctggactcaaataaaacccagtgacctcacttcttttctctgcaaaaggtgcttgtggggctgggagtgcagacattggtgtttctgctgatgtcccttgtgaaaaaaaaaaaaaaa

SEQ ID NO: 151732 - DNA, 636 bp, Homo sapiens
  Payload ID: 9860
  Gene Symbol: MZB1
  Gene Name: marginal zone B and B1 cell-specific protein
  ENST ID: ENST00000503351
  CDS Start-End: 1-181
gtcactgccactgctgctgctgctgctgggagcctgggccatcccagggggcctcggggacagggcgccactcacagccacagccccacaactggatgatgaggagatgtactcagcccacatgcccgctcacctgcgctgtgatgcctgcagagctgtggcttaccaggcccatccttgagtccggactccctccccaaccctgacggggcggctttggctatgtgtacatggtgcaagtgcacacgtgtgagcgcctgcacatgtggcaaaatctggcaaaggcagagaccaaacttcatacctcaaactctggggggcggcgggagctgagcgagttggtctacacggatgtcctggaccggagctgctcccggaactggcaggactacggagttcgagaagtggaccaagtgaaacgtctcacaggcccaggacttagcgaggggccagagccaagcatcagcgtgatggtcacagggggcccctggcctaccaggctctccaggacatgtttgcactacttgggggagtttggagaagaccagatctatgaagcccaccaacaaggccgaggggctctggaggcattgctatgtgggggaccccagggggcctgctcagagaaggtgtcag

SEQ ID NO: 151733 - DNA, 681 bp, Homo sapiens
  Payload ID: 9860
  Gene Symbol: MZB1
  Gene Name: marginal zone B and B1 cell-specific protein
  ENST ID: ENST00000513389
  CDS Start-End: 40-270
caaccacagactacacttgctgaactggctcctggggccatgaggctgtcactgccactgctgctgctgctgctgggagcctgggccatcccagggggcctcggggacagggcgccactcacagccacagccccacaactggatgatgaggagatgtactcagcccacatgcccgctcacctgcgctgtgatgcctgcagagctgtggcttaccagctacggagttcgagaagtggaccaagtgaaacgtctcacaggcccaggacttagcgaggggccagagccaagcatcagcgtgatggtcacagggggcccctggcctaccaggctctccaggacatgtttgcactacttgggggagtttggagaagaccagatctatgaagcccaccaacaaggccgaggggctctggaggcattgctatgtgggggaccccagggggcctgctcagagaaggtgtcagccacaagagaagagctctagtcctggactctaccctcctctgaaagaagctggggcttgctctgacggtctccactcccgtctgcaggcagccaggagggcaggaagcccttgctctgtgctgccatcctgcctccctcctccagcctcagggcactcgggcctgggtgggagtcaacgccttcccctctggactcaaataaaacccagtgacctca

SEQ ID NO: 151734 - DNA, 11417 bp, Homo sapiens
  Payload ID: 9861
  Gene Symbol: MKI67
  Gene Name: marker of proliferation Ki-67
  Uniprot ID: P46013
  ENST ID: ENST00000368653
  CDS Start-End: 196-8886
taccgggcggaggtgagcgcggcgccggctcctcctgcggcggactttgggtgcgacttgacgagcggtggttcgacaagtggccttgcgggccggatcgtcccagtggaagagttgtaaatttgcttctggccttcccctacggattatacctggccttcccctacggattatactcaacttactgtttagaaaatgtggcccacgagacgcctggttactatcaaaaggagcggggtcgacggtccccactttcccctgagcctcagcacctgcttgtttggaaggggtattgaatgtgacatccgtatccagcttcctgttgtgtcaaaacaacattgcaaaattgaaatccatgagcaggaggcaatattacataatttcagttccacaaatccaacacaagtaaatgggtctgttattgatgagcctgtacggctaaaacatggagatgtaataactattattgatcgttccttcaggtatgaaaatgaaagtcttcagaatggaaggaagtcaactgaatttccaagaaaaatacgtgaacaggagccagcacgtcgtgtctcaagatctagcttctcttctgaccctgatgagagtgagggaatacctttgaaaagaaggcgtgtgtcctttggtgggcacctaagacctgaactatttgatgaaaacttgcctcctaatacgcctctcaaaaggggagaagccccaaccaaaagaaagtctctggtaatgcacactccacctgtcctgaagaaaatcatcaaggaacagcctcaaccatcaggaaaacaagagtcaggttcagaaatccatgtggaagtgaaggcacaaagcttggttataagccctccagctcctagtcctaggaaaactccagttgccagtgatcaacgccgtaggtcctgcaaaacagcccctgcttccagcagcaaatctcagacagaggttcctaagagaggagggagaaagagtggcaacctgccttcaaagagagtgtctatcagccgaagtcaacatgatattttacagatgatatgttccaaaagaagaagtggtgcttcggaagcaaatctgattgttgcaaaatcatgggcagatgtagtaaaacttggtgcaaaacaaacacaaactaaagtcataaaacatggtcctcaaaggtcaatgaacaaaaggcaaagaagacctgctactccaaagaagcctgtgggcgaagttcacagtcaatttagtacaggccacgcaaactctccttgtaccataataatagggaaagctcatactgaaaaagtacatgtgcctgctcgaccctacagagtgctcaacaacttcatttccaaccaaaaaatggactttaaggaagatctttcaggaatagctgaaatgttcaagaccccagtgaaggagcaaccgcagttgacaagcacatgtcacatcgctatttcaaattcagagaatttgcttggaaaacagtttcaaggaactgattcaggagaagaacctctgctccccacctcagagagttttggaggaaatgtgttcttcagtgcacagaatgcagcaaaacagccatctgataaatgctctgcaagccctcccttaagacggcagtgtattagagaaaatggaaacgtagcaaaaacgcccaggaacacctacaaaatgacttctctggagacaaaaacttcagatactgagacagagccttcaaaaacagtatccactgcaaacaggtcaggaaggtctacagagttcaggaatatacagaagctacctgtggaaagtaagagtgaagaaacaaatacagaaattgttgagtgcatcctaaaaagaggtcagaaggcaacactactacaacaaaggagagaaggagagatgaaggaaatagaaagaccttttgagacatataaggaaaatattgaattaaaagaaaacgatgaaaagatgaaagcaatgaagagatcaagaacttgggggcagaaatgtgcaccaatgtctgacctgacagacctcaagagcttgcctgatacagaactcatgaaagacacggcacgtggccagaatctcctccaaacccaagatcatgccaaggcaccaaagagtgagaaaggcaaaatcactaaaatgccctgccagtcattacaaccagaaccaataaacaccccaacacacacaaaacaacagttgaaggcatccctggggaaagtaggtgtgaaagaagagctcctagcagtcggcaagttcacacggacgtcaggggagaccacgcacacgcacagagagccagcaggagatggcaagagcatcagaacgtttaaggagtctccaaagcagatcctggacccagcagcccgtgtaactggaatgaagaagtggccaagaacgcctaaggaagaggcccagtcactagaagacctggctggcttcaaagagctcttccagacaccaggtccctctgaggaatcaatgactgatgagaaaactaccaaaatagcctgcaaatctccaccaccagaatcagtggacactccaacaagcacaaagcaatggcctaagagaagtctcaggaaagcagatgtagaggaagaattcttagcactcaggaaactaacaccatcagcagggaaagccatgcttacgcccaaaccagcaggaggtgatgagaaagacattaaagcatttatgggaactccagtgcagaaactggacctggcaggaactttacctggcagcaaaagacagctacagactcctaaggaaaaggcccaggctctagaagacctggctggctttaaagagctcttccagactcctggtcacaccgaggaattagtggctgctggtaaaaccactaaaataccctgcgactctccacagtcagacccagtggacaccccaacaagcacaaagcaacgacccaagagaagtatcaggaaagcagatgtagagggagaactcttagcgtgcaggaatctaatgccatcagcaggcaaagccatgcacacgcctaaaccatcagtaggtgaagagaaagacatcatcatatttgtgggaactccagtgcagaaactggacctgacagagaacttaaccggcagcaagagacggccacaaactcctaaggaagaggcccaggctctggaagacctgactggctttaaagagctcttccagacccctggtcatactgaagaagcagtggctgctggcaaaactactaaaatgccctgcgaatcttctccaccagaatcagcagacaccccaacaagcacaagaaggcagcccaagacacctttggagaaaagggacgtacagaaggagctctcagccctgaagaagctcacacagacatcaggggaaaccacacacacagataaagtaccaggaggtgaggataaaagcatcaacgcgtttagggaaactgcaaaacagaaactggacccagcagcaagtgtaactggtagcaagaggcacccaaaaactaaggaaaaggcccaacccctagaagacctggctggcttgaaagagctcttccagacaccagtatgcactgacaagcccacgactcacgagaaaactaccaaaatagcctgcagatcacaaccagacccagtggacacaccaacaagctccaagccacagtccaagagaagtctcaggaaagtggacgtagaagaagaattcttcgcactcaggaaacgaacaccatcagcaggcaaagccatgcacacacccaaaccagcagtaagtggtgagaaaaacatctacgcatttatgggaactccagtgcagaaactggacctgacagagaacttaactggcagcaagagacggctacaaactcctaaggaaaaggcccaggctctagaagacctggctggctttaaagagctcttccagacacgaggtcacactgaggaatcaatgactaacgataaaactgccaaagtagcctgcaaatcttcacaaccagacccagacaaaaacccagcaagctccaagcgacggctcaagacatccctggggaaagtgggcgtgaaagaagagctcctagcagttggcaagctcacacagacatcaggagagactacacacacacacacagagccaacaggagatggtaagagcatgaaagcatttatggagtctccaaagcagatcttagactcagcagcaagtctaactggcagcaagaggcagctgagaactcctaagggaaagtctgaagtccctgaagacctggccggcttcatcgagctcttccagacaccaagtcacactaaggaatcaatgactaacgaaaaaactaccaaagtatcctacagagcttcacagccagacctagtggacaccccaacaagctccaagccacagcccaagagaagtctcaggaaagcagacactgaagaagaatttttagcatttaggaaacaaacgccatcagcaggcaaagccatgcacacacccaaaccagcagtaggtgaagagaaagacatcaacacgtttttgggaactccagtgcagaaactggaccagccaggaaatttacctggcagcaatagacggctacaaactcgtaaggaaaaggcccaggctctagaagaactgactggcttcagagagcttttccagacaccatgcactgataaccccacgactgatgagaaaactaccaaaaaaatactctgcaaatctccgcaatcagacccagcggacaccccaacaaacacaaagcaacggcccaagagaagcctcaagaaagcagacgtagaggaagaatttttagcattcaggaaactaacaccatcagcaggcaaagccatgcacacgcctaaagcagcagtaggtgaagagaaagacatcaacacatttgtggggactccagtggagaaactggacctgctaggaaatttacctggcagcaagagacggccacaaactcctaaagaaaaggccaaggctctagaagatctggctggcttcaaagagctcttccagacaccaggtcacactgaggaatcaatgaccgatgacaaaatcacagaagtatcctgcaaatctccacaaccagacccagtcaaaaccccaacaagctccaagcaacgactcaagatatccttggggaaagtaggtgtgaaagaagaggtcctaccagtcggcaagctcacacagacgtcagggaagaccacacagacacacagagagacagcaggagatggaaagagcatcaaagcgtttaaggaatctgcaaagcagatgctggacccagcaaactatggaactgggatggagaggtggccaagaacacctaaggaagaggcccaatcactagaagacctggccggcttcaaagagctcttccagacaccagaccacactgaggaatcaacaactgatgacaaaactaccaaaatagcctgcaaatctccaccaccagaatcaatggacactccaacaagcacaaggaggcggcccaaaacacctttggggaaaagggatatagtggaagagctctcagccctgaagcagctcacacagaccacacacacagacaaagtaccaggagatgaggataaaggcatcaacgtgttcagggaaactgcaaaacagaaactggacccagcagcaagtgtaactggtagcaagaggcagccaagaactcctaagggaaaagcccaacccctagaagacttggctggcttgaaagagctcttccagacaccaatatgcactgacaagcccacgactcatgagaaaactaccaaaatagcctgcagatctccacaaccagacccagtgggtaccccaacaatcttcaagccacagtccaagagaagtctcaggaaagcagacgtagaggaagaatccttagcactcaggaaacgaacaccatcagtagggaaagctatggacacacccaaaccagcaggaggtgatgagaaagacatgaaagcatttatgggaactccagtgcagaaattggacctgccaggaaatttacctggcagcaaaagatggccacaaactcctaaggaaaaggcccaggctctagaagacctggctggcttcaaagagctcttccagacaccaggcactgacaagcccacgactgatgagaaaactaccaaaatagcctgcaaatctccacaaccagacccagtggacaccccagcaagcacaaagcaacggcccaagagaaacctcaggaaagcagacgtagaggaagaatttttagcactcaggaaacgaacaccatcagcaggcaaagccatggacacaccaaaaccagcagtaagtgatgagaaaaatatcaacacatttgtggaaactccagtgcagaaactggacctgctaggaaatttacctggcagcaagagacagccacagactcctaaggaaaaggctgaggctctagaggacctggttggcttcaaagaactcttccagacaccaggtcacactgaggaatcaatgactgatgacaaaatcacagaagtatcctgtaaatctccacagccagagtcattcaaaacctcaagaagctccaagcaaaggctcaagatacccctggtgaaagtggacatgaaagaagagcccctagcagtcagcaagctcacacggacatcaggggagactacgcaaacacacacagagccaacaggagatagtaagagcatcaaagcgtttaaggagtctccaaagcagatcctggacccagcagcaagtgtaactggtagcaggaggcagctgagaactcgtaaggaaaaggcccgtgctctagaagacctggttgacttcaaagagctcttctcagcaccaggtcacactgaagagtcaatgactattgacaaaaacacaaaaattccctgcaaatctcccccaccagaactaacagacactgccacgagcacaaagagatgccccaagacacgtcccaggaaagaagtaaaagaggagctctcagcagttgagaggctcacgcaaacatcagggcaaagcacacacacacacaaagaaccagcaagcggtgatgagggcatcaaagtattgaagcaacgtgcaaagaagaaaccaaacccagtagaagaggaacccagcaggagaaggccaagagcacctaaggaaaaggcccaacccctggaagacctggccggcttcacagagctctctgaaacatcaggtcacactcaggaatcactgactgctggcaaagccactaaaataccctgcgaatctcccccactagaagtggtagacaccacagcaagcacaaagaggcatctcaggacacgtgtgcagaaggtacaagtaaaagaagagccttcagcagtcaagttcacacaaacatcaggggaaaccacggatgcagacaaagaaccagcaggtgaagataaaggcatcaaagcattgaaggaatctgcaaaacagacaccggctccagcagcaagtgtaactggcagcaggagacggccaagagcacccagggaaagtgcccaagccatagaagacctagctggcttcaaagacccagcagcaggtcacactgaagaatcaatgactgatgacaaaaccactaaaataccctgcaaatcatcaccagaactagaagacaccgcaacaagctcaaagagacggcccaggacacgtgcccagaaagtagaagtgaaggaggagctgttagcagttggcaagctcacacaaacctcaggggagaccacgcacaccgacaaagagccggtaggtgagggcaaaggcacgaaagcatttaagcaacctgcaaagcggaagctggacgcagaagatgtaattggcagcaggagacagccaagagcacctaaggaaaaggcccaacccctggaagatctggccagcttccaagagctctctcaaacaccaggccacactgaggaactggcaaatggtgctgctgatagctttacaagcgctccaaagcaaacacctgacagtggaaaacctctaaaaatatccagaagagttcttcgggcccctaaagtagaacccgtgggagacgtggtaagcaccagagaccctgtaaaatcacaaagcaaaagcaacacttccctgcccccactgcccttcaagaggggaggtggcaaagatggaagcgtcacgggaaccaagaggctgcgctgcatgccagcaccagaggaaattgtggaggagctgccagccagcaagaagcagagggttgctcccagggcaagaggcaaatcatccgaacccgtggtcatcatgaagagaagtttgaggacttctgcaaaaagaattgaacctgcggaagagctgaacagcaacgacatgaaaaccaacaaagaggaacacaaattacaagactcggtccctgaaaataagggaatatccctgcgctccagacgccaaaataagactgaggcagaacagcaaataactgaggtctttgtattagcagaaagaatagaaataaacagaaatgaaaagaagcccatgaagacctccccagagatggacattcagaatccagatgatggagcccggaaacccatacctagagacaaagtcactgagaacaaaaggtgcttgaggtctgctagacagaatgagagctcccagcctaaggtggcagaggagagcggagggcagaagagtgcgaaggttctcatgcagaatcagaaagggaaaggagaagcaggaaattcagactccatgtgcctgagatcaagaaagacaaaaagccagcctgcagcaagcactttggagagcaaatctgtgcagagagtaacgcggagtgtcaagaggtgtgcagaaaatccaaagaaggctgaggacaatgtgtgtgtcaagaaaataagaaccagaagtcatagggacagtgaagatatttgacagaaaaatcgaactgggaaaaatataataaagttagttttgtgataagttctagtgcagtttttgtcataaattacaagtgaattctgtaagtaaggctgtcagtctgcttaagggaagaaaactttggatttgctgggtctgaatcggcttcataaactccactgggagcactgctgggctcctggactgagaatagttgaacaccgggggctttgtgaaggagtctgggccaaggtttgccctcagctttgcagaatgaagccttgaggtctgtcaccacccacagccaccctacagcagccttaactgtgacacttgccacactgtgtcgtcgtttgtttgcctatgtcctccagggcacggtggcaggaacaactatcctcgtctgtcccaacactgagcaggcactcggtaaacacgaatgaatggatgagcgcacggatgaatggagcttacaagatctgtctttccaatggccgggggcatttggtccccaaattaaggctattggacatctgcacaggacagtcctatttttgatgtcctttcctttctgaaaataaagttttgtgctttggagaatgactcgtgagcacatctttagggaccaagagtgactttctgtaaggagtgactcgtggcttgccttggtctcttgggaatacttttctaactagggttgctctcacctgagacattctccacccgcggaatctcagggtcccaggctgtgggccatcacgacctcaaactggctcctaatctccagctttcctgtcattgaaagcttcggaagtttactggctctgctcccgcctgttttctttctgactctatctggcagcccgatgccacccagtacaggaagtgacaccagtactctgtaaagcatcatcatccttggagagactgagcactcagcaccttcagccacgatttcaggatcgcttccttgtgagccgctgcctccgaaatctcctttgaagcccagacatctttctccagcttcagacttgtagatataactcgttcatcttcatttactttccactttgccccctgtcctctctgtgttccccaaatcagagaatagcccgccatcccccaggtcacctgtctggattcctccccattcacccaccttgccaggtgcaggtgaggatggtgcaccagacagggtagctgtcccccaaaatgtgccctgtgcgggcagtgccctgtctccacgtttgtttccccagtgtctggcggggagccaggtgacatcataaatacttgctgaatgaatgcagaaatcagcggtactgacttgtactatattggctgccatgatagggttctcacagcgtcatccatgatcgtaagggagaatgacattctgcttgagggagggaatagaaaggggcagggaggggacatctgagggcttcacagggctgcaaagggtacagggattgcaccagggcagaacaggggagggtgttcaaggaagagtggctcttagcagaggcactttggaaggtgtgaggcataaatgcttccttctacgtaggccaacctcaaaactttcagtaggaatgttgctatgatcaagttgttctaacactttagacttagtagtaattatgaacctcacatagaaaaatttcatccagccatatgcctgtggagtggaatattctgtttagtagaaaaatcctttagagttcagctctaaccagaaatcttgctgaagtatgtcagcaccttttctcaccctggtaagtacagtatttcaagagcacgctaagggtggttttcattttacagggctgttgatgatgggttaaaaatgttcatttaagggctacccccgtgtttaatagatgaacaccacttctacacaaccctccttggtactgggggagggagagatctgacaaatactgcccattcccctaggctgactggatttgagaacaaatacccacccatttccaccatggtatggtaacttctctgagcttcagtttccaagtgaatttccatgtaataggacattcccattaaatacaagctgtttttactttttcgcctcccagggcctgtgggatctggtcccccagcctctcttgggctttcttacactaactctgtacctaccatctcctgcctcccttaggcaggcacctccaaccaccacacactccctgctgttttccctgcctggaactttccctcctgccccaccaagatcatttcatccagtcctgagctcagcttaagggaggcttcttgcctgtgggttccctcacccccatgcctgtcctccaggctggggcaggttcttagtttgcctggaattgttctgtacctctttgtagcacgtagtgttgtggaaactaagccactaattgagtttctggctcccctcctggggttgtaagttttgttcattcatgagggccgactgcatttcctggttactctatcccagtgaccagccacaggagatgtccaataaagtatgtgatgaaatggtcttaaaa

SEQ ID NO: 151735 - DNA, 12678 bp, Homo sapiens
  Payload ID: 9861
  Gene Symbol: MKI67
  Gene Name: marker of proliferation Ki-67
  Uniprot ID: P46013
  ENST ID: ENST00000368654
  CDS Start-End: 377-10147
gggcgggaggactcgactcggtgggagccgctagagccgggcgcccggggacgtagcctgtagggccaccgggtccccgtcagaggcggcggcgggagcagcggggactgcaggccggggtgcagcgaacgcgaccccgcgggctgcggcccggtgtgtgcggagcgtggcgggcgcagcttaccgggcggaggtgagcgcggcgccggctcctcctgcggcggactttgggtgcgacttgacgagcggtggttcgacaagtggccttgcgggccggatcgtcccagtggaagagttgtaaatttgcttctggccttcccctacggattatacctggccttcccctacggattatactcaacttactgtttagaaaatgtggcccacgagacgcctggttactatcaaaaggagcggggtcgacggtccccactttcccctgagcctcagcacctgcttgtttggaaggggtattgaatgtgacatccgtatccagcttcctgttgtgtcaaaacaacattgcaaaattgaaatccatgagcaggaggcaatattacataatttcagttccacaaatccaacacaagtaaatgggtctgttattgatgagcctgtacggctaaaacatggagatgtaataactattattgatcgttccttcaggtatgaaaatgaaagtcttcagaatggaaggaagtcaactgaatttccaagaaaaatacgtgaacaggagccagcacgtcgtgtctcaagatctagcttctcttctgaccctgatgagaaagctcaagattccaaggcctattcaaaaatcactgaaggaaaagtttcaggaaatcctcaggtacatatcaagaatgtcaaagaagacagtaccgcagatgactcaaaagacagtgttgctcagggaacaactaatgttcattcctcagaacatgctggacgtaatggcagaaatgcagctgatcccatttctggggattttaaagaaatttccagcgttaaattagtgagccgttatggagaattgaagtctgttcccactacacaatgtcttgacaatagcaaaaaaaatgaatctcccttttggaagctttatgagtcagtgaagaaagagttggatgtaaaatcacaaaaagaaaatgtcctacagtattgtagaaaatctggattacaaactgattacgcaacagagaaagaaagtgctgatggtttacagggggagacccaactgttggtctcgcgtaagtcaagaccaaaatctggtgggagcggccacgctgtggcagagcctgcttcacctgaacaagagcttgaccagaacaaggggaagggaagagacgtggagtctgttcagactcccagcaaggctgtgggcgccagctttcctctctatgagccggctaaaatgaagacccctgtacaatattcacagcaacaaaattctccacaaaaacataagaacaaagacctgtatactactggtagaagagaatctgtgaatctgggtaaaagtgaaggcttcaaggctggtgataaaactcttactcccaggaagctttcaactagaaatcgaacaccagctaaagttgaagatgcagctgactctgccactaagccagaaaatctctcttccaaaaccagaggaagtattcctacagatgtggaagttctgcctacggaaactgaaattcacaatgagccatttttaactctgtggctcactcaagttgagaggaagatccaaaaggattccctcagcaagcctgagaaattgggcactacagctggacagatgtgctctgggttacctggtcttagttcagttgatatcaacaactttggtgattccattaatgagagtgagggaatacctttgaaaagaaggcgtgtgtcctttggtgggcacctaagacctgaactatttgatgaaaacttgcctcctaatacgcctctcaaaaggggagaagccccaaccaaaagaaagtctctggtaatgcacactccacctgtcctgaagaaaatcatcaaggaacagcctcaaccatcaggaaaacaagagtcaggttcagaaatccatgtggaagtgaaggcacaaagcttggttataagccctccagctcctagtcctaggaaaactccagttgccagtgatcaacgccgtaggtcctgcaaaacagcccctgcttccagcagcaaatctcagacagaggttcctaagagaggagggagaaagagtggcaacctgccttcaaagagagtgtctatcagccgaagtcaacatgatattttacagatgatatgttccaaaagaagaagtggtgcttcggaagcaaatctgattgttgcaaaatcatgggcagatgtagtaaaacttggtgcaaaacaaacacaaactaaagtcataaaacatggtcctcaaaggtcaatgaacaaaaggcaaagaagacctgctactccaaagaagcctgtgggcgaagttcacagtcaatttagtacaggccacgcaaactctccttgtaccataataatagggaaagctcatactgaaaaagtacatgtgcctgctcgaccctacagagtgctcaacaacttcatttccaaccaaaaaatggactttaaggaagatctttcaggaatagctgaaatgttcaagaccccagtgaaggagcaaccgcagttgacaagcacatgtcacatcgctatttcaaattcagagaatttgcttggaaaacagtttcaaggaactgattcaggagaagaacctctgctccccacctcagagagttttggaggaaatgtgttcttcagtgcacagaatgcagcaaaacagccatctgataaatgctctgcaagccctcccttaagacggcagtgtattagagaaaatggaaacgtagcaaaaacgcccaggaacacctacaaaatgacttctctggagacaaaaacttcagatactgagacagagccttcaaaaacagtatccactgcaaacaggtcaggaaggtctacagagttcaggaatatacagaagctacctgtggaaagtaagagtgaagaaacaaatacagaaattgttgagtgcatcctaaaaagaggtcagaaggcaacactactacaacaaaggagagaaggagagatgaaggaaatagaaagaccttttgagacatataaggaaaatattgaattaaaagaaaacgatgaaaagatgaaagcaatgaagagatcaagaacttgggggcagaaatgtgcaccaatgtctgacctgacagacctcaagagcttgcctgatacagaactcatgaaagacacggcacgtggccagaatctcctccaaacccaagatcatgccaaggcaccaaagagtgagaaaggcaaaatcactaaaatgccctgccagtcattacaaccagaaccaataaacaccccaacacacacaaaacaacagttgaaggcatccctggggaaagtaggtgtgaaagaagagctcctagcagtcggcaagttcacacggacgtcaggggagaccacgcacacgcacagagagccagcaggagatggcaagagcatcagaacgtttaaggagtctccaaagcagatcctggacccagcagcccgtgtaactggaatgaagaagtggccaagaacgcctaaggaagaggcccagtcactagaagacctggctggcttcaaagagctcttccagacaccaggtccctctgaggaatcaatgactgatgagaaaactaccaaaatagcctgcaaatctccaccaccagaatcagtggacactccaacaagcacaaagcaatggcctaagagaagtctcaggaaagcagatgtagaggaagaattcttagcactcaggaaactaacaccatcagcagggaaagccatgcttacgcccaaaccagcaggaggtgatgagaaagacattaaagcatttatgggaactccagtgcagaaactggacctggcaggaactttacctggcagcaaaagacagctacagactcctaaggaaaaggcccaggctctagaagacctggctggctttaaagagctcttccagactcctggtcacaccgaggaattagtggctgctggtaaaaccactaaaataccctgcgactctccacagtcagacccagtggacaccccaacaagcacaaagcaacgacccaagagaagtatcaggaaagcagatgtagagggagaactcttagcgtgcaggaatctaatgccatcagcaggcaaagccatgcacacgcctaaaccatcagtaggtgaagagaaagacatcatcatatttgtgggaactccagtgcagaaactggacctgacagagaacttaaccggcagcaagagacggccacaaactcctaaggaagaggcccaggctctggaagacctgactggctttaaagagctcttccagacccctggtcatactgaagaagcagtggctgctggcaaaactactaaaatgccctgcgaatcttctccaccagaatcagcagacaccccaacaagcacaagaaggcagcccaagacacctttggagaaaagggacgtacagaaggagctctcagccctgaagaagctcacacagacatcaggggaaaccacacacacagataaagtaccaggaggtgaggataaaagcatcaacgcgtttagggaaactgcaaaacagaaactggacccagcagcaagtgtaactggtagcaagaggcacccaaaaactaaggaaaaggcccaacccctagaagacctggctggcttgaaagagctcttccagacaccagtatgcactgacaagcccacgactcacgagaaaactaccaaaatagcctgcagatcacaaccagacccagtggacacaccaacaagctccaagccacagtccaagagaagtctcaggaaagtggacgtagaagaagaattcttcgcactcaggaaacgaacaccatcagcaggcaaagccatgcacacacccaaaccagcagtaagtggtgagaaaaacatctacgcatttatgggaactccagtgcagaaactggacctgacagagaacttaactggcagcaagagacggctacaaactcctaaggaaaaggcccaggctctagaagacctggctggctttaaagagctcttccagacacgaggtcacactgaggaatcaatgactaacgataaaactgccaaagtagcctgcaaatcttcacaaccagacccagacaaaaacccagcaagctccaagcgacggctcaagacatccctggggaaagtgggcgtgaaagaagagctcctagcagttggcaagctcacacagacatcaggagagactacacacacacacacagagccaacaggagatggtaagagcatgaaagcatttatggagtctccaaagcagatcttagactcagcagcaagtctaactggcagcaagaggcagctgagaactcctaagggaaagtctgaagtccctgaagacctggccggcttcatcgagctcttccagacaccaagtcacactaaggaatcaatgactaacgaaaaaactaccaaagtatcctacagagcttcacagccagacctagtggacaccccaacaagctccaagccacagcccaagagaagtctcaggaaagcagacactgaagaagaatttttagcatttaggaaacaaacgccatcagcaggcaaagccatgcacacacccaaaccagcagtaggtgaagagaaagacatcaacacgtttttgggaactccagtgcagaaactggaccagccaggaaatttacctggcagcaatagacggctacaaactcgtaaggaaaaggcccaggctctagaagaactgactggcttcagagagcttttccagacaccatgcactgataaccccacgactgatgagaaaactaccaaaaaaatactctgcaaatctccgcaatcagacccagcggacaccccaacaaacacaaagcaacggcccaagagaagcctcaagaaagcagacgtagaggaagaatttttagcattcaggaaactaacaccatcagcaggcaaagccatgcacacgcctaaagcagcagtaggtgaagagaaagacatcaacacatttgtggggactccagtggagaaactggacctgctaggaaatttacctggcagcaagagacggccacaaactcctaaagaaaaggccaaggctctagaagatctggctggcttcaaagagctcttccagacaccaggtcacactgaggaatcaatgaccgatgacaaaatcacagaagtatcctgcaaatctccacaaccagacccagtcaaaaccccaacaagctccaagcaacgactcaagatatccttggggaaagtaggtgtgaaagaagaggtcctaccagtcggcaagctcacacagacgtcagggaagaccacacagacacacagagagacagcaggagatggaaagagcatcaaagcgtttaaggaatctgcaaagcagatgctggacccagcaaactatggaactgggatggagaggtggccaagaacacctaaggaagaggcccaatcactagaagacctggccggcttcaaagagctcttccagacaccagaccacactgaggaatcaacaactgatgacaaaactaccaaaatagcctgcaaatctccaccaccagaatcaatggacactccaacaagcacaaggaggcggcccaaaacacctttggggaaaagggatatagtggaagagctctcagccctgaagcagctcacacagaccacacacacagacaaagtaccaggagatgaggataaaggcatcaacgtgttcagggaaactgcaaaacagaaactggacccagcagcaagtgtaactggtagcaagaggcagccaagaactcctaagggaaaagcccaacccctagaagacttggctggcttgaaagagctcttccagacaccaatatgcactgacaagcccacgactcatgagaaaactaccaaaatagcctgcagatctccacaaccagacccagtgggtaccccaacaatcttcaagccacagtccaagagaagtctcaggaaagcagacgtagaggaagaatccttagcactcaggaaacgaacaccatcagtagggaaagctatggacacacccaaaccagcaggaggtgatgagaaagacatgaaagcatttatgggaactccagtgcagaaattggacctgccaggaaatttacctggcagcaaaagatggccacaaactcctaaggaaaaggcccaggctctagaagacctggctggcttcaaagagctcttccagacaccaggcactgacaagcccacgactgatgagaaaactaccaaaatagcctgcaaatctccacaaccagacccagtggacaccccagcaagcacaaagcaacggcccaagagaaacctcaggaaagcagacgtagaggaagaatttttagcactcaggaaacgaacaccatcagcaggcaaagccatggacacaccaaaaccagcagtaagtgatgagaaaaatatcaacacatttgtggaaactccagtgcagaaactggacctgctaggaaatttacctggcagcaagagacagccacagactcctaaggaaaaggctgaggctctagaggacctggttggcttcaaagaactcttccagacaccaggtcacactgaggaatcaatgactgatgacaaaatcacagaagtatcctgtaaatctccacagccagagtcattcaaaacctcaagaagctccaagcaaaggctcaagatacccctggtgaaagtggacatgaaagaagagcccctagcagtcagcaagctcacacggacatcaggggagactacgcaaacacacacagagccaacaggagatagtaagagcatcaaagcgtttaaggagtctccaaagcagatcctggacccagcagcaagtgtaactggtagcaggaggcagctgagaactcgtaaggaaaaggcccgtgctctagaagacctggttgacttcaaagagctcttctcagcaccaggtcacactgaagagtcaatgactattgacaaaaacacaaaaattccctgcaaatctcccccaccagaactaacagacactgccacgagcacaaagagatgccccaagacacgtcccaggaaagaagtaaaagaggagctctcagcagttgagaggctcacgcaaacatcagggcaaagcacacacacacacaaagaaccagcaagcggtgatgagggcatcaaagtattgaagcaacgtgcaaagaagaaaccaaacccagtagaagaggaacccagcaggagaaggccaagagcacctaaggaaaaggcccaacccctggaagacctggccggcttcacagagctctctgaaacatcaggtcacactcaggaatcactgactgctggcaaagccactaaaataccctgcgaatctcccccactagaagtggtagacaccacagcaagcacaaagaggcatctcaggacacgtgtgcagaaggtacaagtaaaagaagagccttcagcagtcaagttcacacaaacatcaggggaaaccacggatgcagacaaagaaccagcaggtgaagataaaggcatcaaagcattgaaggaatctgcaaaacagacaccggctccagcagcaagtgtaactggcagcaggagacggccaagagcacccagggaaagtgcccaagccatagaagacctagctggcttcaaagacccagcagcaggtcacactgaagaatcaatgactgatgacaaaaccactaaaataccctgcaaatcatcaccagaactagaagacaccgcaacaagctcaaagagacggcccaggacacgtgcccagaaagtagaagtgaaggaggagctgttagcagttggcaagctcacacaaacctcaggggagaccacgcacaccgacaaagagccggtaggtgagggcaaaggcacgaaagcatttaagcaacctgcaaagcggaagctggacgcagaagatgtaattggcagcaggagacagccaagagcacctaaggaaaaggcccaacccctggaagatctggccagcttccaagagctctctcaaacaccaggccacactgaggaactggcaaatggtgctgctgatagctttacaagcgctccaaagcaaacacctgacagtggaaaacctctaaaaatatccagaagagttcttcgggcccctaaagtagaacccgtgggagacgtggtaagcaccagagaccctgtaaaatcacaaagcaaaagcaacacttccctgcccccactgcccttcaagaggggaggtggcaaagatggaagcgtcacgggaaccaagaggctgcgctgcatgccagcaccagaggaaattgtggaggagctgccagccagcaagaagcagagggttgctcccagggcaagaggcaaatcatccgaacccgtggtcatcatgaagagaagtttgaggacttctgcaaaaagaattgaacctgcggaagagctgaacagcaacgacatgaaaaccaacaaagaggaacacaaattacaagactcggtccctgaaaataagggaatatccctgcgctccagacgccaaaataagactgaggcagaacagcaaataactgaggtctttgtattagcagaaagaatagaaataaacagaaatgaaaagaagcccatgaagacctccccagagatggacattcagaatccagatgatggagcccggaaacccatacctagagacaaagtcactgagaacaaaaggtgcttgaggtctgctagacagaatgagagctcccagcctaaggtggcagaggagagcggagggcagaagagtgcgaaggttctcatgcagaatcagaaagggaaaggagaagcaggaaattcagactccatgtgcctgagatcaagaaagacaaaaagccagcctgcagcaagcactttggagagcaaatctgtgcagagagtaacgcggagtgtcaagaggtgtgcagaaaatccaaagaaggctgaggacaatgtgtgtgtcaagaaaataagaaccagaagtcatagggacagtgaagatatttgacagaaaaatcgaactgggaaaaatataataaagttagttttgtgataagttctagtgcagtttttgtcataaattacaagtgaattctgtaagtaaggctgtcagtctgcttaagggaagaaaactttggatttgctgggtctgaatcggcttcataaactccactgggagcactgctgggctcctggactgagaatagttgaacaccgggggctttgtgaaggagtctgggccaaggtttgccctcagctttgcagaatgaagccttgaggtctgtcaccacccacagccaccctacagcagccttaactgtgacacttgccacactgtgtcgtcgtttgtttgcctatgtcctccagggcacggtggcaggaacaactatcctcgtctgtcccaacactgagcaggcactcggtaaacacgaatgaatggatgagcgcacggatgaatggagcttacaagatctgtctttccaatggccgggggcatttggtccccaaattaaggctattggacatctgcacaggacagtcctatttttgatgtcctttcctttctgaaaataaagttttgtgctttggagaatgactcgtgagcacatctttagggaccaagagtgactttctgtaaggagtgactcgtggcttgccttggtctcttgggaatacttttctaactagggttgctctcacctgagacattctccacccgcggaatctcagggtcccaggctgtgggccatcacgacctcaaactggctcctaatctccagctttcctgtcattgaaagcttcggaagtttactggctctgctcccgcctgttttctttctgactctatctggcagcccgatgccacccagtacaggaagtgacaccagtactctgtaaagcatcatcatccttggagagactgagcactcagcaccttcagccacgatttcaggatcgcttccttgtgagccgctgcctccgaaatctcctttgaagcccagacatctttctccagcttcagacttgtagatataactcgttcatcttcatttactttccactttgccccctgtcctctctgtgttccccaaatcagagaatagcccgccatcccccaggtcacctgtctggattcctccccattcacccaccttgccaggtgcaggtgaggatggtgcaccagacagggtagctgtcccccaaaatgtgccctgtgcgggcagtgccctgtctccacgtttgtttccccagtgtctggcggggagccaggtgacatcataaatacttgctgaatgaatgcagaaatcagcggtactgacttgtactatattggctgccatgatagggttctcacagcgtcatccatgatcgtaagggagaatgacattctgcttgagggagggaatagaaaggggcagggaggggacatctgagggcttcacagggctgcaaagggtacagggattgcaccagggcagaacaggggagggtgttcaaggaagagtggctcttagcagaggcactttggaaggtgtgaggcataaatgcttccttctacgtaggccaacctcaaaactttcagtaggaatgttgctatgatcaagttgttctaacactttagacttagtagtaattatgaacctcacatagaaaaatttcatccagccatatgcctgtggagtggaatattctgtttagtagaaaaatcctttagagttcagctctaaccagaaatcttgctgaagtatgtcagcaccttttctcaccctggtaagtacagtatttcaagagcacgctaagggtggttttcattttacagggctgttgatgatgggttaaaaatgttcatttaagggctacccccgtgtttaatagatgaacaccacttctacacaaccctccttggtactgggggagggagagatctgacaaatactgcccattcccctaggctgactggatttgagaacaaatacccacccatttccaccatggtatggtaacttctctgagcttcagtttccaagtgaatttccatgtaataggacattcccattaaatacaagctgtttttactttttcgcctcccagggcctgtgggatctggtcccccagcctctcttgggctttcttacactaactctgtacctaccatctcctgcctcccttaggcaggcacctccaaccaccacacactccctgctgttttccctgcctggaactttccctcctgccccaccaagatcatttcatccagtcctgagctcagcttaagggaggcttcttgcctgtgggttccctcacccccatgcctgtcctccaggctggggcaggttcttagtttgcctggaattgttctgtacctctttgtagcacgtagtgttgtggaaactaagccactaattgagtttctggctcccctcctggggttgtaagttttgttcattcatgagggccgactgcatttcctggttactctatcccagtgaccagccacaggagatgtccaataaagtatgtgatgaaatggtcttaaaa

SEQ ID NO: 151736 - DNA, 12490 bp, Homo sapiens
  Payload ID: 9861
  Gene Symbol: MKI67
  Gene Name: marker of proliferation Ki-67
  ENST ID: ENST00000617118
  CDS Start-End: 196-9963
taccgggcggaggtgagcgcggcgccggctcctcctgcggcggactttgggtgcgacttgacgagcggtggttcgacaagtggccttgcgggccggatcgtcccagtggaagagttgtaaatttgcttctggccttcccctacggattatacctggccttcccctacggattatactcaacttactgtttagaaaatgtggcccacgagacgcctggttactatcaaaaggagcggggtcgacggtccccactttcccctgagcctcagcacctgcttgtttggaaggggtattgaatgtgacatccgtatccagcttcctgttgtgtcaaaacaacattgcaaaattgaaatccatgagcaggaggcaatattacataatttcagttccacaaatccaacacaagtaaatgggtctgttattgatgagcctgtacggctaaaacatggagatgtaataactattattgatcgttccttcaggtatgaaaatgaaagtcttcagaatggaaggaagtcaactgaatttccaagaaaaatacgtgaacaggagccagcacgtcgtgtctcaagatctagcttctcttctgaccctgatgagaaagctcaagattccaaggcctattcaaaaatcactgaaggaaaagtttcaggaaatcctcaggtacatatcaagaatgtcaaagaagacagtaccgcagatgactcaaaagacagtgttgctcagggaacaactaatgttcattcctcagaacatgctggacgtaatggcagaaatgcagctgatcccatttctggggattttaaagaaatttccagcgttaaattagtgagccgttatggagaattgaagtctgttcccactacacaatgtcttgacaatagcaaaaaaaatgaatctcccttttggaagctttatgagtcagtgaagaaagagttggatgtaaaatcacaaaaagaaaatgtcctacagtattgtagaaaatctggattacaaactgattacgcaacagagaaagaaagtgctgatggtttacagggggagacccaactgttggtctcgcgtaagtcaagaccaaaatctggtgggagcggccacgctgtggcagagcctgcttcacctgaacaagagcttgaccagaacaaggggaagggaagagacgtggagtctgttcagactcccagcaaggctgtgggcgccagctttcctctctatgagccggctaaaatgaagacccctgtacaatattcacagcaacaaaattctccacaaaaacataagaacaaagacctgtatactactggtagaagagaatctgtgaatctgggtaaaagtgaaggcttcaaggctggtgataaaactcttactcccaggaagctttcaactagaaatcgaacaccagctaaagttgaagatgcagctgactctgccactaagccagaaaatctctcttccaaaaccagaggaagtattcctacagatgtggaagttctgcctacggaaactgaaattcacaatgagccatttttaactctgtggctcactcaagttgagaggaagatccaaaaggattccctcagcaagcctgagaaattgggcactacagctggacagatgtgctctgggttacctggtcttagttcagttgatatcaacaactttggtgattccattaatgagagtgagggaatacctttgaaaagaaggcgtgtgtcctttggtgggcacctaagacctgaactatttgatgaaaacttgcctcctaatacgcctctcaaaaggggagaagccccaaccaaaagaaagtctctggtaatgcacactccacctgtcctgaagaaaatcatcaaggaacagcctcaaccatcaggaaaacaagagtcaggttcagaaatccatgtggaagtgaaggcacaaagcttggttataagccctccagctcctagtcctaggaaaactccagttgccagtgatcaacgccgtaggtcctgcaaaacagcccctgcttccagcagcaaatctcagacagaggttcctaagagaggaggagaaagagtggcaacctgccttcaaagagtgtctatcagccgaagtcaacatgatattttacagatgatatgttccaaaagaagaagtggtgcttcggaagcaaatctgattgttgcaaaatcatgggcagatgtagtaaaacttggtgcaaaacaaacacaaactaaagtcataaaacatggtcctcaaaggtcaatgaacaaaaggcaaagaagacctgctactccaaagaagcctgtgggcgaagttcacagtcaatttagtacaggccacgcaaactctccttgtaccataataatagggaaagctcatactgaaaaagtacatgtgcctgctcgaccctacagagtgctcaacaacttcatttccaaccaaaaaatggactttaaggaagatctttcaggaatagctgaaatgttcaagaccccagtgaaggagcaaccgcagttgacaagcacatgtcacatcgctatttcaaattcagagaatttgcttggaaaacagtttcaaggaactgattcaggagaagaacctctgctccccacctcagagagttttggaggaaatgtgttcttcagtgcacagaatgcagcaaaacagccatctgataaatgctctgcaagccctcccttaagacggcagtgtattagagaaaatggaaacgtagcaaaaacgcccaggaacacctacaaaatgacttctctggagacaaaaacttcagatactgagacagagccttcaaaaacagtatccactgcaaacaggtcaggaaggtctacagagttcaggaatatacagaagctacctgtggaaagtaagagtgaagaaacaaatacagaaattgttgagtgcatcctaaaaagaggtcagaaggcaacactactacaacaaaggagagaaggagagatgaaggaaatagaaagaccttttgagacatataaggaaaatattgaattaaaagaaaacgatgaaaagatgaaagcaatgaagagatcaagaacttgggggcagaaatgtgcaccaatgtctgacctgacagacctcaagagcttgcctgatacagaactcatgaaagacacggcacgtggccagaatctcctccaaacccaagatcatgccaaggcaccaaagagtgagaaaggcaaaatcactaaaatgccctgccagtcattacaaccagaaccaataaacaccccaacacacacaaaacaacagttgaaggcatccctggggaaagtaggtgtgaaagaagagctcctagcagtcggcaagttcacacggacgtcaggggagaccacgcacacgcacagagagccagcaggagatggcaagagcatcagaacgtttaaggagtctccaaagcagatcctggacccagcagcccgtgtaactggaatgaagaagtggccaagaacgcctaaggaagaggcccagtcactagaagacctggctggcttcaaagagctcttccagacaccaggtccctctgaggaatcaatgactgatgagaaaactaccaaaatagcctgcaaatctccaccaccagaatcagtggacactccaacaagcacaaagcaatggcctaagagaagtctcaggaaagcagatgtagaggaagaattcttagcactcaggaaactaacaccatcagcagggaaagccatgcttacgcccaaaccagcaggaggtgatgagaaagacattaaagcatttatgggaactccagtgcagaaactggacctggcaggaactttacctggcagcaaaagacagctacagactcctaaggaaaaggcccaggctctagaagacctggctggctttaaagagctcttccagactcctggtcacaccgaggaattagtggctgctggtaaaaccactaaaataccctgcgactctccacagtcagacccagtggacaccccaacaagcacaaagcaacgacccaagagaagtatcaggaaagcagatgtagagggagaactcttagcgtgcaggaatctaatgccatcagcaggcaaagccatgcacacgcctaaaccatcagtaggtgaagagaaagacatcatcatatttgtgggaactccagtgcagaaactggacctgacagagaacttaaccggcagcaagagacggccacaaactcctaaggaagaggcccaggctctggaagacctgactggctttaaagagctcttccagacccctggtcatactgaagaagcagtggctgctggcaaaactactaaaatgccctgcgaatcttctccaccagaatcagcagacaccccaacaagcacaagaaggcagcccaagacacctttggagaaaagggacgtacagaaggagctctcagccctgaagaagctcacacagacatcaggggaaaccacacacacagataaagtaccaggaggtgaggataaaagcatcaacgcgtttagggaaactgcaaaacagaaactggacccagcagcaagtgtaactggtagcaagaggcacccaaaaactaaggaaaaggcccaacccctagaagacctggctggcttgaaagagctcttccagacaccagtatgcactgacaagcccacgactcacgagaaaactaccaaaatagcctgcagatcacaaccagacccagtggacacaccaacaagctccaagccacagtccaagagaagtctcaggaaagtggacgtagaagaagaattcttcgcactcaggaaacgaacaccatcagcaggcaaagccatgcacacacccaaaccagcagtaagtggtgagaaaaacatctacgcatttatgggaactccagtgcagaaactggacctgacagagaacttaactggcagcaagagacggctacaaactcctaaggaaaaggcccaggctctagaagacctggctggctttaaagagctcttccagacacgaggtcacactgaggaatcaatgactaacgataaaactgccaaagtagcctgcaaatcttcacaaccagacccagacaaaaacccagcaagctccaagcgacggctcaagacatccctggggaaagtgggcgtgaaagaagagctcctagcagttggcaagctcacacagacatcaggagagactacacacacacacacagagccaacaggagatggtaagagcatgaaagcatttatggagtctccaaagcagatcttagactcagcagcaagtctaactggcagcaagaggcagctgagaactcctaagggaaagtctgaagtccctgaagacctggccggcttcatcgagctcttccagacaccaagtcacactaaggaatcaatgactaacgaaaaaactaccaaagtatcctacagagcttcacagccagacctagtggacaccccaacaagctccaagccacagcccaagagaagtctcaggaaagcagacactgaagaagaatttttagcatttaggaaacaaacgccatcagcaggcaaagccatgcacacacccaaaccagcagtaggtgaagagaaagacatcaacacgtttttgggaactccagtgcagaaactggaccagccaggaaatttacctggcagcaatagacggctacaaactcgtaaggaaaaggcccaggctctagaagaactgactggcttcagagagcttttccagacaccatgcactgataaccccacgactgatgagaaaactaccaaaaaaatactctgcaaatctccgcaatcagacccagcggacaccccaacaaacacaaagcaacggcccaagagaagcctcaagaaagcagacgtagaggaagaatttttagcattcaggaaactaacaccatcagcaggcaaagccatgcacacgcctaaagcagcagtaggtgaagagaaagacatcaacacatttgtggggactccagtggagaaactggacctgctaggaaatttacctggcagcaagagacggccacaaactcctaaagaaaaggccaaggctctagaagatctggctggcttcaaagagctcttccagacaccaggtcacactgaggaatcaatgaccgatgacaaaatcacagaagtatcctgcaaatctccacaaccagacccagtcaaaaccccaacaagctccaagcaacgactcaagatatccttggggaaagtaggtgtgaaagaagaggtcctaccagtcggcaagctcacacagacgtcagggaagaccacacagacacacagagagacagcaggagatggaaagagcatcaaagcgtttaaggaatctgcaaagcagatgctggacccagcaaactatggaactgggatggagaggtggccaagaacacctaaggaagaggcccaatcactagaagacctggccggcttcaaagagctcttccagacaccagaccacactgaggaatcaacaactgatgacaaaactaccaaaatagcctgcaaatctccaccaccagaatcaatggacactccaacaagcacaaggaggcggcccaaaacacctttggggaaaagggatatagtggaagagctctcagccctgaagcagctcacacagaccacacacacagacaaagtaccaggagatgaggataaaggcatcaacgtgttcagggaaactgcaaaacagaaactggacccagcagcaagtgtaactggtagcaagaggcagccaagaactcctaagggaaaagcccaacccctagaagacttggctggcttgaaagagctcttccagacaccaatatgcactgacaagcccacgactcatgagaaaactaccaaaatagcctgcagatctccacaaccagacccagtgggtaccccaacaatcttcaagccacagtccaagagaagtctcaggaaagcagacgtagaggaagaatccttagcactcaggaaacgaacaccatcagtagggaaagctatggacacacccaaaccagcaggaggtgatgagaaagacatgaaagcatttatgggaactccagtgcagaaattggacctgccaggaaatttacctggcagcaaaagatggccacaaactcctaaggaaaaggcccaggctctagaagacctggctggcttcaaagagctcttccagacaccaggcactgacaagcccacgactgatgagaaaactaccaaaatagcctgcaaatctccacaaccagacccagtggacaccccagcaagcacaaagcaacggcccaagagaaacctcaggaaagcagacgtagaggaagaatttttagcactcaggaaacgaacaccatcagcaggcaaagccatggacacaccaaaaccagcagtaagtgatgagaaaaatatcaacacatttgtggaaactccagtgcagaaactggacctgctaggaaatttacctggcagcaagagacagccacagactcctaaggaaaaggctgaggctctagaggacctggttggcttcaaagaactcttccagacaccaggtcacactgaggaatcaatgactgatgacaaaatcacagaagtatcctgtaaatctccacagccagagtcattcaaaacctcaagaagctccaagcaaaggctcaagatacccctggtgaaagtggacatgaaagaagagcccctagcagtcagcaagctcacacggacatcaggggagactacgcaaacacacacagagccaacaggagatagtaagagcatcaaagcgtttaaggagtctccaaagcagatcctggacccagcagcaagtgtaactggtagcaggaggcagctgagaactcgtaaggaaaaggcccgtgctctagaagacctggttgacttcaaagagctcttctcagcaccaggtcacactgaagagtcaatgactattgacaaaaacacaaaaattccctgcaaatctcccccaccagaactaacagacactgccacgagcacaaagagatgccccaagacacgtcccaggaaagaagtaaaagaggagctctcagcagttgagaggctcacgcaaacatcagggcaaagcacacacacacacaaagaaccagcaagcggtgatgagggcatcaaagtattgaagcaacgtgcaaagaagaaaccaaacccagtagaagaggaacccagcaggagaaggccaagagcacctaaggaaaaggcccaacccctggaagacctggccggcttcacagagctctctgaaacatcaggtcacactcaggaatcactgactgctggcaaagccactaaaataccctgcgaatctcccccactagaagtggtagacaccacagcaagcacaaagaggcatctcaggacacgtgtgcagaaggtacaagtaaaagaagagccttcagcagtcaagttcacacaaacatcaggggaaaccacggatgcagacaaagaaccagcaggtgaagataaaggcatcaaagcattgaaggaatctgcaaaacagacaccggctccagcagcaagtgtaactggcagcaggagacggccaagagcacccagggaaagtgcccaagccatagaagacctagctggcttcaaagacccagcagcaggtcacactgaagaatcaatgactgatgacaaaaccactaaaataccctgcaaatcatcaccagaactagaagacaccgcaacaagctcaaagagacggcccaggacacgtgcccagaaagtagaagtgaaggaggagctgttagcagttggcaagctcacacaaacctcaggggagaccacgcacaccgacaaagagccggtaggtgagggcaaaggcacgaaagcatttaagcaacctgcaaagcggaagctggacgcagaagatgtaattggcagcaggagacagccaagagcacctaaggaaaaggcccaacccctggaagatctggccagcttccaagagctctctcaaacaccaggccacactgaggaactggcaaatggtgctgctgatagctttacaagcgctccaaagcaaacacctgacagtggaaaacctctaaaaatatccagaagagttcttcgggcccctaaagtagaacccgtgggagacgtggtaagcaccagagaccctgtaaaatcacaaagcaaaagcaacacttccctgcccccactgcccttcaagaggggaggtggcaaagatggaagcgtcacgggaaccaagaggctgcgctgcatgccagcaccagaggaaattgtggaggagctgccagccagcaagaagcagagggttgctcccagggcaagaggcaaatcatccgaacccgtggtcatcatgaagagaagtttgaggacttctgcaaaaagaattgaacctgcggaagagctgaacagcaacgacatgaaaaccaacaaagaggaacacaaattacaagactcggtccctgaaaataagggaatatccctgcgctccagacgccaaaataagactgaggcagaacagcaaataactgaggtctttgtattagcagaaagaatagaaataaacagaaatgaaaagaagcccatgaagacctccccagagatggacattcagaatccagatgatggagcccggaaacccatacctagagacaaagtcactgagaacaaaaggtgcttgaggtctgctagacagaatgagagctcccagcctaaggtggcagaggagagcggagggcagaagagtgcgaaggttctcatgcagaatcagaaagggaaaggagaagcaggaaattcagactccatgtgcctgagatcaagaaagacaaaaagccagcctgcagcaagcactttggagagcaaatctgtgcagagagtaacgcggagtgtcaagaggtgtgcagaaaatccaaagaaggctgaggacaatgtgtgtgtcaagaaaataagaaccagaagtcatagggacagtgaagatatttgacagaaaaatcgaactgggaaaaatataataaagttagttttgtgataagttctagtgcagtttttgtcataaattacaagtgaattctgtaagtaaggctgtcagtctgcttaagggaagaaaactttggatttgctgggtctgaatcggcttcataaactccactgggagcactgctgggctcctggactgagaatagttgaacaccgggggctttgtgaaggagtctgggccaaggtttgccctcagctttgcagaatgaagccttgaggtctgtcaccacccacagccaccctacagcagccttaactgtgacacttgccacactgtgtcgtcgtttgtttgcctatgtcctccagggcacggtggcaggaacaactatcctcgtctgtcccaacactgagcaggcactcggtaaacacgaatgaatggatgagcgcacggatgaatggagcttacaagatctgtctttccaatggccgggggcatttggtccccaaattaaggctattggacatctgcacaggacagtcctatttttgatgtcctttcctttctgaaaataaagttttgtgctttggagaatgactcgtgagcacatctttagggaccaagagtgactttctgtaaggagtgactcgtggcttgccttggtctcttgggaatacttttctaactagggttgctctcacctgagacattctccacccgcggaatctcagggtcccaggctgtgggccatcacgacctcaaactggctcctaatctccagctttcctgtcattgaaagcttcggaagtttactggctctgctcccgcctgttttctttctgactctatctggcagcccgatgccacccagtacaggaagtgacaccagtactctgtaaagcatcatcatccttggagagactgagcactcagcaccttcagccacgatttcaggatcgcttccttgtgagccgctgcctccgaaatctcctttgaagcccagacatctttctccagcttcagacttgtagatataactcgttcatcttcatttactttccactttgccccctgtcctctctgtgttccccaaatcagagaatagcccgccatcccccaggtcacctgtctggattcctccccattcacccaccttgccaggtgcaggtgaggatggtgcaccagacagggtagctgtcccccaaaatgtgccctgtgcgggcagtgccctgtctccacgtttgtttccccagtgtctggcggggagccaggtgacatcataaatacttgctgaatgaatgcagaaatcagcggtactgacttgtactatattggctgccatgatagggttctcacagcgtcatccatgatcgtaagggagaatgacattctgcttgagggagggaatagaaaggggcagggaggggacatctgagggcttcacagggctgcaaagggtacagggattgcaccagggcagaacaggggagggtgttcaaggaagagtggctcttagcagaggcactttggaaggtgtgaggcataaatgcttccttctacgtaggccaacctcaaaactttcagtaggaatgttgctatgatcaagttgttctaacactttagacttagtagtaattatgaacctcacatagaaaaatttcatccagccatatgcctgtggagtggaatattctgtttagtagaaaaatcctttagagttcagctctaaccagaaatcttgctgaagtatgtcagcaccttttctcaccctggtaagtacagtatttcaagagcacgctaagggtggttttcattttacagggctgttgatgatgggttaaaaatgttcatttaagggctacccccgtgtttaatagatgaacaccacttctacacaaccctccttggtactgggggagggagagatctgacaaatactgcccattcccctaggctgactggatttgagaacaaatacccacccatttccaccatggtatggtaacttctctgagcttcagtttccaagtgaatttccatgtaataggacattcccattaaatacaagctgtttttactttttcgcctcccagggcctgtgggatctggtcccccagcctctcttgggctttcttacactaactctgtacctaccatctcctgcctcccttaggcaggcacctccaaccaccacacactccctgctgttttccctgcctggaactttccctcctgccccaccaagatcatttcatccagtcctgagctcagcttaagggaggcttcttgcctgtgggttccctcacccccatgcctgtcctccaggctggggcaggttcttagtttgcctggaattgttctgtacctctttgtagcacgtagtgttgtggaaactaagccactaattgagtttctggctcccctcctggggttgtaagttttgttcattcatgagggccgactgcatttcctggttactctatcccagtgaccagccacaggagatgtccaataaagtatgtgatgaaatggtctt

SEQ ID NO: 151737 - DNA, 3221 bp, Homo sapiens
  Payload ID: 9862
  Gene Symbol: MARVELD1
  Gene Name: MARVEL domain containing 1
  Uniprot ID: Q9BSK0
  ENST ID: ENST00000285605
  CDS Start-End: 154-675
gaaaggaggagaggaagagaggactaagaggggagcaaggcgaggaggccgcggcgggcgcagcgggcacctgggccgtgctgcccccgcgagcaaggcgccgccattccgctgctcggggcgccgccgccgccgccaccgcgcccaggggccatgctcccgccgcccccgcgccagccgccgccccaggcgcgtgcggcccgcggcgcggtgcgcctgcagcggcccttcctgcgcagcccgctgggcgtgttgcggctgctgcagctgctggccggcgctgccttctggatcactatcgccaccagcaagtaccagggccccgtgcacttcgcgctcttcgtgtccgtgctcttctggctgctcaccctgggcctctacttcctcacgctgctgggcaagcacgagctggtccccgtgctgggctcgcgctggctcatggtcaacgtggcgcacgatgtgctggcggccgcgctctacggcgccgccaccggcatcatgagcgaccagatgcagcgccacagctactgcaacctcaaggattacccgctcccctgcgcctaccacgccttcctggcggccgccgtctgcggcggcgtctgccacggcctctacctgctttcggcgctctatggctgcgggcgtcgctgccagggcaagcaggaggtggcgtgaggccgcccgcgcccgccgcggccccgatcggggcgggggaatccccggagaccagcctccttaatcccttcccccgccgccgccccgcgcgggtgcgccctggcaccctctccctgccctccagcgtttccactgtcgcccgcgcccgggaaccctgacgctcagctcccgcccgacggcagcgccgccgccgcccagaatcccagcccagaatcccgaccgccgcgccggacgcgccgtctcccgggacaagcgcaggctgcgatccgaggggctgacacacactcgcagacgagccgccccgaggcgaaacctcgcggttcctcttcccttccctgctgagactaagacgtggacaggggccgcgcagatccgggggaggctcccaaattggaaccaggcttctggctgcccccttccctcccgccccgtggtcggaagagcactcccttccctggcccctcatccagcctccggtgctgtaaaacgcaggcgctgggccgcgggcggagctgaggacaggccttggctggtcccaggatgagcgacgagtttggttttagctggggattgtgctggcatcctgcgaagctcctcccagccggtctctctgtgctcggttgtcttggggtggggcccatccgccgaggtggggaccgataggagaagccggtgggttgtacccttacacttgtggagtctcctcttgcctctacctactccgcctttgtccttaaggtttttgcaggccagtgccaaacacacactaactgtcctggcctctccgtgacacaagtctcttcccagccttcctcacaggcttctgccgcccccctcatctccaccctcccccatatctgtttgcattaggagttccacgaccatggtggaatgttaaggtgaaccccaccccttcttacagatggggacccagagcctgctcttgggaacagccagagtaagattggaacccagacttgcagtccagcgctgtttgcattaaaagggtgggtgagtcaggacccctggctcaggagccgcctctcctaaaagagggtttcaaggccaaatgggtttgtcaacggtgctgtctccctttcttggagatgctcattagcttatcaaagactgagaagtcccgctgttacagaaataatttagtttgctgtattaactgctcctgggcctggagcagtattcccaccttaagattcccagcatccctgtgctgtcccggctctcattcatgccgaagggcccaacccattggctgtgttctgtttgaagatttggggggcgccttctctttcttccccagggaattctctagcagagggaggggacccaccccagtgaggaagtagattgctgcctctagccagagacctgaactggggaatttgaacattcctttacattgttggagaaatgaagccaaagttattcagatggttttcccaggctaaaggaaagtcacctgcaagagatcccggcactgatctggagcagctgacagggtgggtctcccttaccaaagagaagaaccactctctggcgctggggtgacctgctggctgggcctgtaaggtttccatgttgctgaggccatggagattcccagagctggtcacaccgaccgctctcagggcccgctgccctgggctggcaacaccattctggccttggcctgcagaagctttcagagtcttcactggcagtagggggagatggggagaggaatgatctctgcccagccccttcctttccaaaccatgcaatggaagagcccagatgggtgaagattgattttgccttaactcaagagaattcctgttctccttgtgctatgatttggacacaagattctggatacctggaacttagctgtgtactcctgtaccctaaacagtggatttgagttccagcgtttattcttttttccttttttcagatcaccatctaagttacatctttagctcaggtccatccttctcaagatctccttcttagccccccagcccctggtgctgtctgtggtcaggtgaccttactcaggagcagatatctccttggccgccatggagcctcatccatccacacgtgcctgtagcattccagagctcactgcccttctagatgtgccttcccgcttggcttccagcggcttgtgctcactctgtctgccaggtatgagaagaacacgtaagaccgccaccacactcaccctccctcaaggccctgtgccataggggtggccacccgacctgcccccagaacttttggatactggaggcagttgcataggtctccctctctgggcaccaggactcagtccagcccaagactactctgggcagctcccatcccagtctggggccatttgcagactcaggaaaggatttctacagtgttctataaaagccaaaagagagagtgggtttgggaagagtgagggtggttggggagaggggaccgatgtgcctcattgtttagtggtgattacaaatatgcttttctggataaagtttggttgtttgctcttggtg

SEQ ID NO: 151738 - DNA, 2153 bp, Homo sapiens
  Payload ID: 9863
  Gene Symbol: MARVELD2
  Gene Name: MARVEL domain containing 2
  Uniprot ID: Q8N4S9
  ENST ID: ENST00000325631
  CDS Start-End: 75-1751
gcccgataccggtttcagagtcctgggcagcgtgcgcgctcttcctggcggctgcgcaggtgtgaaaatcacaaatgtcaaatgatggaagatccaggaatcgggacaggcgctacgatgaggtcccaagcgacctgccctatcaagataccaccataagaacccacccaactcttcatgacagtgagcgggcagtgagcgctgatcccttgccaccaccccctctcccattacagccaccattcggcccagacttctactcaagtgacacagaagaaccagctatagcgccagatctcaaaccagtaaggcgctttgtccctgactcctggaagaactttttcagagggaagaaaaaggaccccgaatgggataagccggtgtctgatatcaggtacatctccgatggagtggagtgttcaccaccagcctctccagcaagaccaaaccaccgttcgcccctcaactcctgcaaagatccctacggagggtcagaaggaacctttagttcccggaaagaggctgacgcagtgtttccccgggatccctatggatctctagaccgacacacacaaacagttcgaacatacagtgagaaggtggaggagtataacctgagatactcctacatgaagtcgtgggcaggcctgctgagaatactgggtgtggtggagctgcttttgggggccggtgtctttgcttgtgtcacagcttacattcacaaggacagtgagtggtacaacttgtttggatattcacaaccgtatggcatgggaggcgttggtggattgggcagtatgtatgggggctattactacactggccctaagaccccttttgtactcgtggttgctggattagcttggatcaccaccattattattctggttcttggcatgtccatgtattaccggaccattcttctggactctaattggtggcccctaactgaatttggaattaacgttgccttgtttattttgtatatggccgcagccatagtctatgtgaatgataccaaccgaggtggcctctgctactatccgttatttaatacaccagtgaatgcagtgttctgccgggtagaaggaggacagatagctgcaatgatcttcctgtttgtcaccatgatagtttatctcattagtgctttggtttgcctaaagttatggaggcatgaggcagctcggagacatagagaatatatggaacaacaggagataaatgagccatcattgtcatcgaaaaggaaaatgtgtgaaatggccaccagtggtgacagacaaagagactcagaagttaatttcaaggaactgagaacagcaaaaatgaaacctgaactactgagtggacacatccccccaggccacattcctaaacctatcgtgatgcccgactatgtggcaaaataccctgtgattcagacagatgatgagcgagaacgctataaagctgtgttccaagaccagttttcagagtacaaagagctgtctgcagaagttcaggctgtcctgaggaagtttgatgagctggatgcagtgatgagcagattgccacatcattcggaaagccgacaggaacatgagagaatttcaagaatccatgaagagtttaagaaaaaaaagaatgatcctacatttctggaaaaaaaagaacgctgtgattacctaaagaataaactttctcacataaagcaaagaattcaagaatatgataaagtaatgaattgggatgtacaaggttattcttaacgcttatttgaaaccactttatttttttattttattttatttttttgagatgaagtctcgctctgttacccaggctggaatgcagtggcacaatctcggctcactgcaacctccacctcccgggttcaagcaattctcctgttcaagcaattagcctccccagtagctgggattacaggcgtgcgctgccacaccccgctaatttttgtatttttagtagagacgaggtttcaccatgttggtcaggctgggaaactactttttttaaaaaatagcaagtttactatttatttactgcctttttaatgctagcctctgtggtagagaagcaagcgcttcccaaatcagcttccaattggtttaaccagtatgcaacattaaagattttactcagacattttt

SEQ ID NO: 151739 - DNA, 4376 bp, Homo sapiens
  Payload ID: 9863
  Gene Symbol: MARVELD2
  Gene Name: MARVEL domain containing 2
  Uniprot ID: Q8N4S9
  ENST ID: ENST00000454295
  CDS Start-End: 60-1700
cagagtcctgggcagcgtgcgcgctcttcctggcggctgcgcaggtgtgaaaatcacaaatgtcaaatgatggaagatccaggaatcgggacaggcgctacgatgaggtcccaagcgacctgccctatcaagataccaccataagaacccacccaactcttcatgacagtgagcgggcagtgagcgctgatcccttgccaccaccccctctcccattacagccaccattcggcccagacttctactcaagtgacacagaagaaccagctatagcgccagatctcaaaccagtaaggcgctttgtccctgactcctggaagaactttttcagagggaagaaaaaggaccccgaatgggataagccggtgtctgatatcaggtacatctccgatggagtggagtgttcaccaccagcctctccagcaagaccaaaccaccgttcgcccctcaactcctgcaaagatccctacggagggtcagaaggaacctttagttcccggaaagaggctgacgcagtgtttccccgggatccctatggatctctagaccgacacacacaaacagttcgaacatacagtgagaaggtggaggagtataacctgagatactcctacatgaagtcgtgggcaggcctgctgagaatactgggtgtggtggagctgcttttgggggccggtgtctttgcttgtgtcacagcttacattcacaaggacagtgagtggtacaacttgtttggatattcacaaccgtatggcatgggaggcgttggtggattgggcagtatgtatgggggctattactacactggccctaagaccccttttgtactcgtggttgctggattagcttggatcaccaccattattattctggttcttggcatgtccatgtattaccggaccattcttctggactctaattggtggcccctaactgaatttggaattaacgttgccttgtttattttgtatatggccgcagccatagtctatgtgaatgataccaaccgaggtggcctctgctactatccgttatttaatacaccagtgaatgcagtgttctgccgggtagaaggaggacagatagctgcaatgatcttcctgtttgtcaccatgatagtttatctcattagtgctttggtttgcctaaagttatggaggcatgaggcagctcggagacatagagaatatatggaacaacaggagtgtgaaatggccaccagtggtgacagacaaagagactcagaagttaatttcaaggaactgagaacagcaaaaatgaaacctgaactactgagtggacacatccccccaggccacattcctaaacctatcgtgatgcccgactatgtggcaaaataccctgtgattcagacagatgatgagcgagaacgctataaagctgtgttccaagaccagttttcagagtacaaagagctgtctgcagaagttcaggctgtcctgaggaagtttgatgagctggatgcagtgatgagcagattgccacatcattcggaaagccgacaggaacatgagagaatttcaagaatccatgaagagtttaagaaaaaaaagaatgatcctacatttctggaaaaaaaagaacgctgtgattacctaaagaataaactttctcacataaagcaaagaattcaagaatatgataaagtaatgaattgggatgtacaaggttattcttaacgcttatttgaaaccactttatttttttattttattttatttttttgagatgaagtctcgctctgttacccaggctggaatgcagtggcacaatctcggctcactgcaacctccacctcccgggttcaagcaattctcctgttcaagcaattagcctccccagtagctgggattacaggcgtgcgctgccacaccccgctaatttttgtatttttagtagagacgaggtttcaccatgttggtcaggctgggaaactactttttttaaaaaatagcaagtttactatttatttactgcctttttaatgctagcctctgtggtagagaagcaagcgcttcccaaatcagcttccaattggtttaaccagtatgcaacattaaagattttactcagacatttttaaacgaattcaaatgttctaagggcctttactaagaatggaaaaaatcctgtgttcatctttcatctgtgaccaatttcatattcatctatctcatttaaatgtgtcatcattttagagatcgtatcctggcagtgtgatgggcaagtggaccatcaattctggtgctactttttccttttttactcaggcaggttcctaggatttttctgggacaaatttctcttcctagagaaattcctaggggatttctaaaggatttttctaagggaaaaagggtgacatctttcaaaggtgtcatttattcccttgaaaggtgtttgaatcccagatcaacattttcagacatcctgatcttgggcaaattgcttaatctctctgtgcctgtttcctcttctgtaaaatggggctaataatagttccttcctcatagagttgttaggattaaaggagttactaatatggtaggaactatattagtgtttgtgaagtctactgaagtgtttgtgaaatgaataaattataaagaatgagtctcaagaaaaggtccttaatgagcaagcccaacctacttaaccaaaagcccaagtgtctggtgcctttctggtttgtggtgttaactcatggccttagcctggtgcttcactgtggctctgtggcccctggggttccacatggcctccctgtctttcatcagtgtgactgtacatctctccatctccccatagtccagcctgccctggacacattgaattgtatgaatggtattgcttttttttttttttttttgtgagacagagtcttactctgttgcccagactggagtgcagtggtgcgatctcggctcactgcaagctccgcctcccaagttcacgtcattttcctgcctcagcctcccgagtagctgggactacaggcacctgccaccacgcccagctaatttttttgtatttttagtagagatggggtttcaccgtgttagccaggatgatctcgatctcctgacctcatgatccacccgcctcagcctcccaaagtgttgggattacaggcgtgagtcaccgcgcccagctggtattgcttttctattccctttggacatacatgctacagtcccacaatgtagcatttccttggaaactccctttttttttttttttgagatggagtttcgctcttgttgcccaggctggagtacagtggtatgatcttggctcactgcagcctctgcctcctgggttcaagcgattctcctgcctctgcctcccaagtagctgggattacaggcacccaccaccatgcccagctaattttttgtatttttagtagagacaggatttcactatgttggccaggttggtctcaagctcctgacctcagatgatctaccagcctcggccttctgaagtgctgggattcaggtgtgagccactgtgcccagcagggatgcttcatctttctaagaattatcttggctttggactttattcataaatgttttatttctgttagtatgaacaatagactgccttaacaaagtttttttttaaacaaaatcgttcttgttggattttattcagcagcatctatcatgtagataaattcccaggtgtagcattacagcttctgactaatatagctgccattcagacaattaatgttcaaagagttttctaaagtgataaaaccaaagaaaagcatgtggaaaagcagaagcttagaaagttgtggtcactgaatgcactccctggtttttatttgtcagtgaaatctttatgcattcattgttaatattttaattccatggctttgtaggctgtgctgtgtctgaaggggtaacacctagggaaacatgaggccccttatgggaccccccaaatggaacaacttcactttctcttttatgtattgagccctgtgttaacatttcacttaagaagagcaccagtgctttaaaaaaaaaaaaaggtaaaatattaccattttgatagactgtaaagagttagattcctgttgaagtgttaaggaaatttaactttgtgaaacttttaaaataaagtttataaatgtagctaatctttgaaaaaccaatgcagtaacactgatttgtaaatgttgtggtcaatccctaggtgcattaaagtttcagtcacctgccgtgtgtgtgtgtgcccttttatgtttgccttcctagcattcctgtgttcactgtgcatgttcttgaaaatattttcacttgtcagaaaataaactggaaagtcattgaaaacccgta

SEQ ID NO: 151740 - DNA, 1584 bp, Homo sapiens
  Payload ID: 9863
  Gene Symbol: MARVELD2
  Gene Name: MARVEL domain containing 2
  ENST ID: ENST00000413223
  CDS Start-End: 19-1347
caggtgtgaaaatcacaaatgtcaaatgatggaagatccaggaatcgggacaggcgctacgatgaggtcccaagcgacctgccctatcaagataccaccataagaacccacccaactcttcatgacagtgagcgggcagtgagcgctgatcccttgccaccaccccctctcccattacagccaccattcggcccagacttctactcaagtgacacagaagaaccagctatagcgccagatctcaaaccagtaaggcgctttgtccctgactcctggaagaactttttcagagggaagaaaaaggaccccgaatgggataagccggtgtctgatatcaggtacatctccgatggagtggagtgttcaccaccagcctctccagcaagaccaaaccaccgttcgcccctcaactcctgcaaagatccctacggagggtcagaaggaacctttagttcccggaaagaggctgacgcagtgtttccccgggatccctatggatctctagaccgacacacacaaacagttcgaacatacagtgagaaggtggaggagtataacctgagatactcctacatgaagtcgtgggcaggcctgctgagaatactgggtgtggtggagctgcttttgggggccggtgtctttgcttgtgtcacagcttacattcacaaggacagtgagtggtacaacttgtttggatattcacaaccgtatggcatgggaggcgttggtggattgggcagtattgctttggtttgcctaaagttatggaggcatgaggcagctcggagacatagagaatatatggaacaacaggagataaatgagccatcattgtcatcgaaaaggaaaatgtgtgaaatggccaccagtggtgacagacaaagagactcagaagttaatttcaaggaactgagaacagcaaaaatgaaacctgaactactgagtggacacatccccccaggccacattcctaaacctatcgtgatgcccgactatgtggcaaaataccctgtgattcagacagatgatgagcgagaacgctataaagctgtgttccaagaccagttttcagagtacaaagagctgtctgcagaagttcaggctgtcctgaggaagtttgatgagctggatgcagtgatgagcagattgccacatcattcggaaagccgacaggaacatgagagaatttcaagaatccatgaagagtttaagaaaaaaaagaatgatcctacatttctggaaaaaaaagaacgctgtgattacctaaagaataaactttctcacataaagcaaagaattcaagaatatgataaagtaatgaattgggatgtacaaggttattcttaacgcttatttgaaaccactttatttttttattttattttatttttttgagatgaagtctcgctctgttacccaggctggaatgcagtggcacaatctcggctcactgcaacctccacctcccgggttcaagcaattctcctgttcaagcaattagcctccccacctcccaaagtgttgggattacaggcgtgagtcaccgcgcccagctggtattgcttttctattccctttggacat

SEQ ID NO: 151741 - DNA, 1563 bp, Homo sapiens
  Payload ID: 9863
  Gene Symbol: MARVELD2
  Gene Name: MARVEL domain containing 2
  ENST ID: ENST00000436532
  CDS Start-End: 19-1347
caggtgtgaaaatcacaaatgtcaaatgatggaagatccaggaatcgggacaggcgctacgatgaggtcccaagcgacctgccctatcaagataccaccataagaacccacccaactcttcatgacagtgagcgggcagtgagcgctgatcccttgccaccaccccctctcccattacagccaccattcggcccagacttctactcaagtgacacagaagaaccagctatagcgccagatctcaaaccagtaaggcgctttgtccctgactcctggaagaactttttcagagggaagaaaaaggaccccgaatgggataagccggtgtctgatatcaggtacatctccgatggagtggagtgttcaccaccagcctctccagcaagaccaaaccaccgttcgcccctcaactcctgcaaagatccctacggagggtcagaaggaacctttagttcccggaaagaggctgacgcagtgtttccccgggatccctatggatctctagaccgacacacacaaacagttcgaacatacagtgagaaggtggaggagtataacctgagatactcctacatgaagtcgtgggcaggcctgctgagaatactgggtgtggtggagctgcttttgggggccggtgtctttgcttgtgtcacagcttacattcacaaggacagtgagtggtacaacttgtttggatattcacaaccgtatggcatgggaggcgttggtggattgggcagtattgctttggtttgcctaaagttatggaggcatgaggcagctcggagacatagagaatatatggaacaacaggagataaatgagccatcattgtcatcgaaaaggaaaatgtgtgaaatggccaccagtggtgacagacaaagagactcagaagttaatttcaaggaactgagaacagcaaaaatgaaacctgaactactgagtggacacatccccccaggccacattcctaaacctatcgtgatgcccgactatgtggcaaaataccctgtgattcagacagatgatgagcgagaacgctataaagctgtgttccaagaccagttttcagagtacaaagagctgtctgcagaagttcaggctgtcctgaggaagtttgatgagctggatgcagtgatgagcagattgccacatcattcggaaagccgacaggaacatgagagaatttcaagaatccatgaagagtttaagaaaaaaaagaatgatcctacatttctggaaaaaaaagaacgctgtgattacctaaagaataaactttctcacataaagcaaagaattcaagaatatgataaagtaatgaattgggatgtacaaggttattcttaacgcttatttgaaaccactttatttttttattttattttatttttttgagatgaagtctcgctctgttacccaggctggaatgcagtggcacaatctcggctcactgcaacctccacctcccgggttcaagcaattctcctgttcaagcaattagcctccccagtagctgggattacaggcgtgcgctgccacaccccgctaatttttgtattttta

SEQ ID NO: 151742 - DNA, 576 bp, Homo sapiens
  Payload ID: 9863
  Gene Symbol: MARVELD2
  Gene Name: MARVEL domain containing 2
  ENST ID: ENST00000515844
  CDS Start-End: 141-576
cccaggtgtgctgcgacggacggctgcccgcgctcggcgctcagcctgccatagcccgcgggggaggccggagccagggatccggggaggcccgcgtcccgccaggtttcgctctgcggacgcaggtgtgaaaatcacaaatgtcaaatgatggaagatccaggaatcgggacaggcgctacgatgaggtcccaagcgacctgccctatcaagataccaccataagaacccacccaactcttcatgacagtgagcgggcagtgagcgctgatcccttgccaccaccccctctcccattacagccaccattcggcccagacttctactcaagtgacacagaagaaccagctatagcgccagatctcaaaccagtaaggcgctttgtccctgactcctggaagaactttttcagagggaagaaaaaggaccccgaatgggataagccggtgtctgatatcaggtacatctccgatggagtggagtgttcaccaccagcctctccagcaagaccaaaccaccgttcgcccctcaactcctgcaaagatccctacggagggtcagaaggaacctttagtt

SEQ ID NO: 151743 - DNA, 1908 bp, Homo sapiens
  Payload ID: 9863
  Gene Symbol: MARVELD2
  Gene Name: MARVEL domain containing 2
  ENST ID: ENST00000512803
  CDS Start-End: 359-1908
gcggggcggggcgcgcacctcggggcgatctcggtgctccttacctgggaggtctcccggcttagtttcggcctcgttgggtcggaatctccaaagacagtgggtttcagccagaaacgcgaagacgaacgcctagccggcgcgggcagaaccgaggacacaatgagatttgtgggaccgggcgcccagaggctggcgcgggggagaccccacagctaaaatgctcggtacccccgggcagtcgtgggttagttagaaccgcagagcctttcccgacccctcggaagcgcagaagtatccgaaatctacccgtttcttgggtccagcaaaacttttaagccaggtgtgaaaatcacaaatgtcaaatgatggaagatccaggaatcgggacaggcgctacgatgaggtcccaagcgacctgccctatcaagataccaccataagaacccacccaactcttcatgacagtgagcgggcagtgagcgctgatcccttgccaccaccccctctcccattacagccaccattcggcccagacttctactcaagtgacacagaagaaccagctatagcgccagatctcaaaccagtaaggcgctttgtccctgactcctggaagaactttttcagagggaagaaaaaggaccccgaatgggataagccggtgtctgatatcaggtacatctccgatggagtggagtgttcaccaccagcctctccagcaagaccaaaccaccgttcgcccctcaactcctgcaaagatccctacggagggtcagaaggaacctttagttcccggaaagaggctgacgcagtgtttccccgggatccctatggatctctagaccgacacacacaaacagttcgaacatacagtgagaaggtggaggagtataacctgagatactcctacatgaagtcgtgggcaggcctgctgagaatactgggtgtggtggagctgcttttgggggccggtgtctttgcttgtgtcacagcttacattcacaaggacagtgagtggtacaacttgtttggatattcacaaccgtatggcatgggaggcgttggtggattgggcagtatgtatgggggctattactacactggccctaagaccccttttgtactcgtggttgctggattagcttggatcaccaccattattattctggttcttggcatgtccatgtattaccggaccattcttctggactctaattggtggcccctaactgaatttggaattaacgttgccttgtttattttgtatatggccgcagccatagtctatgtgaatgataccaaccgaggtggcctctgctactatccgttatttaatacaccagtgaatgcagtgttctgccgggtagaaggaggacagatagctgcaatgatcttcctgtttgtcaccatgatagtttatctcattagtgctttggtttgcctaaagttatggaggcatgaggcagctcggagacatagagaatatatggaacaacaggagataaatgagccatcattgtcatcgaaaaggaaaatgtgtgaaatggccaccagtggtgacagacaaagagactcagaagttaatttcaaggaactgagaacagcaaaaatgaaacctgaactactgagtggacacatccccccaggccacattcctaaacctatcgtgatgcccgactatgtggcaaaataccctgtgattcagacagatgatgagcgagaacgctataaagctgtgttccaagaccagttttcagagtacaaagagctgtctgcagaagttcaggctgtcctgaggaagtttgatgagctggatgcagtgatgagcagattgccacatcattcggaaagccgacaggaacatgagagaatttcaagaatccatgaagagtttaagaaaaaaaa

SEQ ID NO: 151744 - DNA, 1563 bp, Homo sapiens
  Payload ID: 9863
  Gene Symbol: MARVELD2
  Gene Name: MARVEL domain containing 2
  ENST ID: ENST00000611064
  CDS Start-End: 19-1347
caggtgtgaaaatcacaaatgtcaaatgatggaagatccaggaatcgggacaggcgctacgatgaggtcccaagcgacctgccctatcaagataccaccataagaacccacccaattcttcatgacagtgagcgggcagtgagcgctgatcccttgccaccaccccctctcccattacagccaccattcggcccagacttctactcaagtgacacagaagaaccagctatagcgccagatctcaaaccagtaaggcgctttgtccctgactcctggaagaactttttcagagggaagaaaaaggaccccgaatgggataagccggtgtctgatatcaggtacatctccgatggagtggagtgttcaccaccagcctctccagcaagaccaaaccaccgttcgcccctcaactcctgcaaagatccctacggagggtcagaaggaacctttagttcccggaaagaggctgacgcagtgtttccccgggatccctatggatctctagaccgacacacacaaacagttcgaacatacagtgagaaggtggaggagtataacctgagatactcctacatgaagtcgtgggcaggcctgctgagaatactgggtgtggtggagctgcttttgggggccggtgtctttgcttgtgtcacagcttacattcacaaggacagtgagtggtacaacttgtttggatattcacaaccgtatggcatgggaggcgttggtggattgggcagtattgctttggtttgcctaaagttatggaggcatgaggcagctcggagacatagagaatatatggaacaacaggagataaatgagccatcattgtcatcgaaaaggaaaatgtgtgaaatggccaccagtggtgacagacaaagagactcagaagttaatttcaaggaactgagaacagcaaaaatgaaacctgaactactgagtggacacatccccccaggccacattcctaaacctatcgtgatgcccgactatgtggcaaaataccctgtgattcagacagatgatgagcgagaacgctataaagctgtgttccaagaccagttttcagagtacaaagagctgtctgcagaagttcaggctgtcctgaggaagtttgatgagctggatgcagtgatgagcagattgccacatcattcggaaagccgacaggaacatgagagaatttcaagaatccatgaagagtttaagaaaaaaaagaatgatcctacatttctggaaaaaaaagaacgctgtgattacctaaagaataaactttctcacataaagcaaagaattcaagaatatgataaagtaatgaattgggatgtacaaggttattcttaacgcttatttgaaaccactttatttttttattttattttatttttttgagatgaagtctcgctctgttacccaggctggaatgcagtggcacaatctcggctcactgcaacctccacctcccgggttcaagcaattctcctgttcaagcaattagcctccccagtagctgggattacaggcgtgcgctgccacaccccgctaatttttgtattttta

SEQ ID NO: 151745 - DNA, 4400 bp, Homo sapiens
  Payload ID: 9863
  Gene Symbol: MARVELD2
  Gene Name: MARVEL domain containing 2
  Uniprot ID: Q8N4S9
  ENST ID: ENST00000614617
  CDS Start-End: 60-1700
cagagtcctgggcagcgtgcgcgctcttcctggcggctgcgcaggtgtgaaaatcacaaatgtcaaatgatggaagatccaggaatcgggacaggcgctacgatgaggtcccaagcgacctgccctatcaagataccaccataagaacccacccaattcttcatgacagtgagcgggcagtgagcgctgatcccttgccaccaccccctctcccattacagccaccattcggcccagacttctactcaagtgacacagaagaaccagctatagcgccagatctcaaaccagtaaggcgctttgtccctgactcctggaagaactttttcagagggaagaaaaaggaccccgaatgggataagccggtgtctgatatcaggtacatctccgatggagtggagtgttcaccaccagcctctccagcaagaccaaaccaccgttcgcccctcaactcctgcaaagatccctacggagggtcagaaggaacctttagttcccggaaagaggctgacgcagtgtttccccgggatccctatggatctctagaccgacacacacaaacagttcgaacatacagtgagaaggtggaggagtataacctgagatactcctacatgaagtcgtgggcaggcctgctgagaatactgggtgtggtggagctgcttttgggggccggtgtctttgcttgtgtcacagcttacattcacaaggacagtgagtggtacaacttgtttggatattcacaaccgtatggcatgggaggcgttggtggattgggcagtatgtatgggggctattactacactggccctaagaccccttttgtactcgtggttgctggattagcttggatcaccaccattattattctggttcttggcatgtccatgtattaccggaccattcttctggactctaattggtggcccctaactgaatttggaattaacgttgccttgtttattttgtatatggccgcagccatagtctatgtgaatgataccaaccgaggtggcctctgctactatccgttatttaatacaccagtgaatgcagtgttctgccgggtagaaggaggacagatagctgcaatgatcttcctgtttgtcaccatgatagtttatctcattagtgctttggtttgcctaaagttatggaggcatgaggcagctcggagacatagagaatatatggaacaacaggagtgtgaaatggccaccagtggtgacagacaaagagactcagaagttaatttcaaggaactgagaacagcaaaaatgaaacctgaactactgagtggacacatccccccaggccacattcctaaacctatcgtgatgcccgactatgtggcaaaataccctgtgattcagacagatgatgagcgagaacgctataaagctgtgttccaagaccagttttcagagtacaaagagctgtctgcagaagttcaggctgtcctgaggaagtttgatgagctggatgcagtgatgagcagattgccacatcattcggaaagccgacaggaacatgagagaatttcaagaatccatgaagagtttaagaaaaaaaagaatgatcctacatttctggaaaaaaaagaacgctgtgattacctaaagaataaactttctcacataaagcaaagaattcaagaatatgataaagtaatgaattgggatgtacaaggttattcttaacgcttatttgaaaccactttatttttttattttattttatttttttgagatgaagtctcgctctgttacccaggctggaatgcagtggcacaatctcggctcactgcaacctccacctcccgggttcaagcaattctcctgttcaagcaattagcctccccagtagctgggattacaggcgtgcgctgccacaccccgctaatttttgtatttttagtagagacgaggtttcaccatgttggtcaggctgggaaactactttttttaaaaaatagcaagtttactatttatttactgcctttttaatgctagcctctgtggtagagaagcaagcgcttcccaaatcagcttccaattggtttaaccagtatgcaacattaaagattttactcagacatttttaaacgaattcaaatgttctaagggcctttactaagaatggaaaaaatcctgtgttcatctttcatctgtgaccaatttcatattcatctatctcatttaaatgtgtcatcattttagagatcgtatcctggcagtgtgatgggcaagtggaccatcaattctggtgctactttttccttttttactcaggcaggttcctaggatttttctgggacaaatttctcttcctagagaaattcctaggggatttctaaaggatttttctaagggaaaaagggtgacatctttcaaaggtgtcatttattcccttgaaaggtgtttgaatcccagatcaacattttcagacatcctgatcttgggcaaattgcttaatctctctgtgcctgtttcctcttctgtaaaatggggctaataatagttccttcctcatagagttgttaggattaaaggagttactaatatggtaggaactatattagtgtttgtgaagtctactgaagtgtttgtgaaatgaataaattataaagaatgagtctcaagaaaaggtccttaatgagcaagcccaacctacttaaccaaaagcccaagtgtctggtgcctttctggtttgtggtgttaactcatggccttagcctggtgcttcactgtggctctgtggcccctggggttccacatggcctccctgtctttcatcagtgtgactgtacatctctccatctccccatagtccagcctgccctggacacattgaattgtatgaatggtattgcttttttttttttttttttgtgagacagagtcttactctgttgcccagactggagtgcagtggtgcgatctcggctcactgcaagctccgcctcccaagttcacgtcattttcctgcctcagcctcccgagtagctgggactacaggcacctgccaccacgcccagctaatttttttgtatttttagtagagatggggtttcaccgtgttagccaggatgatctcgatctcctgacctcatgatccacccgcctcagcctcccaaagtgttgggattacaggcgtgagtcaccgcgcccagctggtattgcttttctattccctttggacatacatgctacagtcccacaatgtagcatttccttggaaactcccttttttttttttttttgagatggagtttcgctcttgttgcccaggctggagtacagtggtatgatcttggctcactgcagcctctgcctcctgggttcaagcgattctcctgcctctgcctcccaagtagctgggattacaggcacccaccaccatgcccagctaattttttgtatttttagtagagacaggatttcactatgttggccaggttggtctcaagctcctgacctcagatgatctaccagcctcggccttctgaagtgctgggattcaggtgtgagccactgtgcccagcagggatgcttcatctttctaagaattatcttggctttggactttattcataaatgttttatttctgttagtatgaacaatagactgccttaacaaagtttttttttaaacaaaatcgttcttgttggattttattcagcagcatctatcatgtagataaattcccaggtgtagcattacagcttctgactaatatagctgccattcagacaattaatgttcaaagagttttctaaagtgataaaaccaaagaaaagcatgtggaaaagcagaagcttagaaagttgtggtcactgaatgcactccctggtttttatttgtcagtgaaatctttatgcattcattgttaatattttaattccatggctttgtaggctgtgctgtgtctgaaggggtaacacctagggaaacatgaggccccttatgggaccccccaaatggaacaacttcactttctcttttatgtattgagccctgtgttaacatttcacttaagaagagcaccagtgctttaaaaaaaaaaaaaaaaaaaaaaaaaaaaaaaaaaaaggtaaaatattaccattttgatagactgtaaagagttagattcctgttgaagtgttaaggaaatttaactttgtgaaacttttaaaataaagtttataaatgtagctaatctttgaaaaaccaatgcagtaacactgatttgtaaatgttgtggtcaatccctaggtgcattaaagtttcagtcacctgccgtgtgtgtgtgtgcccttttatgtttgccttcctagcattcctgtgttcactgtgcatgttcttgaaaatattttcacttgtcagaaaataaactggaaagtcattgaaaacccgta

SEQ ID NO: 151746 - DNA, 2153 bp, Homo sapiens
  Payload ID: 9863
  Gene Symbol: MARVELD2
  Gene Name: MARVEL domain containing 2
  Uniprot ID: Q8N4S9
  ENST ID: ENST00000622835
  CDS Start-End: 75-1751
gcccgataccggtttcagagtcctgggcagcgtgcgcgctcttcctggcggctgcgcaggtgtgaaaatcacaaatgtcaaatgatggaagatccaggaatcgggacaggcgctacgatgaggtcccaagcgacctgccctatcaagataccaccataagaacccacccaattcttcatgacagtgagcgggcagtgagcgctgatcccttgccaccaccccctctcccattacagccaccattcggcccagacttctactcaagtgacacagaagaaccagctatagcgccagatctcaaaccagtaaggcgctttgtccctgactcctggaagaactttttcagagggaagaaaaaggaccccgaatgggataagccggtgtctgatatcaggtacatctccgatggagtggagtgttcaccaccagcctctccagcaagaccaaaccaccgttcgcccctcaactcctgcaaagatccctacggagggtcagaaggaacctttagttcccggaaagaggctgacgcagtgtttccccgggatccctatggatctctagaccgacacacacaaacagttcgaacatacagtgagaaggtggaggagtataacctgagatactcctacatgaagtcgtgggcaggcctgctgagaatactgggtgtggtggagctgcttttgggggccggtgtctttgcttgtgtcacagcttacattcacaaggacagtgagtggtacaacttgtttggatattcacaaccgtatggcatgggaggcgttggtggattgggcagtatgtatgggggctattactacactggccctaagaccccttttgtactcgtggttgctggattagcttggatcaccaccattattattctggttcttggcatgtccatgtattaccggaccattcttctggactctaattggtggcccctaactgaatttggaattaacgttgccttgtttattttgtatatggccgcagccatagtctatgtgaatgataccaaccgaggtggcctctgctactatccgttatttaatacaccagtgaatgcagtgttctgccgggtagaaggaggacagatagctgcaatgatcttcctgtttgtcaccatgatagtttatctcattagtgctttggtttgcctaaagttatggaggcatgaggcagctcggagacatagagaatatatggaacaacaggagataaatgagccatcattgtcatcgaaaaggaaaatgtgtgaaatggccaccagtggtgacagacaaagagactcagaagttaatttcaaggaactgagaacagcaaaaatgaaacctgaactactgagtggacacatccccccaggccacattcctaaacctatcgtgatgcccgactatgtggcaaaataccctgtgattcagacagatgatgagcgagaacgctataaagctgtgttccaagaccagttttcagagtacaaagagctgtctgcagaagttcaggctgtcctgaggaagtttgatgagctggatgcagtgatgagcagattgccacatcattcggaaagccgacaggaacatgagagaatttcaagaatccatgaagagtttaagaaaaaaaagaatgatcctacatttctggaaaaaaaagaacgctgtgattacctaaagaataaactttctcacataaagcaaagaattcaagaatatgataaagtaatgaattgggatgtacaaggttattcttaacgcttatttgaaaccactttatttttttattttattttatttttttgagatgaagtctcgctctgttacccaggctggaatgcagtggcacaatctcggctcactgcaacctccacctcccgggttcaagcaattctcctgttcaagcaattagcctccccagtagctgggattacaggcgtgcgctgccacaccccgctaatttttgtatttttagtagagacgaggtttcaccatgttggtcaggctgggaaactactttttttaaaaaatagcaagtttactatttatttactgcctttttaatgctagcctctgtggtagagaagcaagcgcttcccaaatcagcttccaattggtttaaccagtatgcaacattaaagattttactcagacattttt

SEQ ID NO: 151747 - DNA, 576 bp, Homo sapiens
  Payload ID: 9863
  Gene Symbol: MARVELD2
  Gene Name: MARVEL domain containing 2
  ENST ID: ENST00000611349
  CDS Start-End: 141-576
cccaggtgtgctgcgacggacggctgcccgcgctcggcgctcagcctgccatagcccgcgggggaggccggagccagggatccggggaggcccgcgtcccgccaggtttcgctctgcggacgcaggtgtgaaaatcacaaatgtcaaatgatggaagatccaggaatcgggacaggcgctacgatgaggtcccaagcgacctgccctatcaagataccaccataagaacccacccaattcttcatgacagtgagcgggcagtgagcgctgatcccttgccaccaccccctctcccattacagccaccattcggcccagacttctactcaagtgacacagaagaaccagctatagcgccagatctcaaaccagtaaggcgctttgtccctgactcctggaagaactttttcagagggaagaaaaaggaccccgaatgggataagccggtgtctgatatcaggtacatctccgatggagtggagtgttcaccaccagcctctccagcaagaccaaaccaccgttcgcccctcaactcctgcaaagatccctacggagggtcagaaggaacctttagtt

SEQ ID NO: 151748 - DNA, 1908 bp, Homo sapiens
  Payload ID: 9863
  Gene Symbol: MARVELD2
  Gene Name: MARVEL domain containing 2
  ENST ID: ENST00000622563
  CDS Start-End: 359-1908
gcggggcggggcgcgcacctcggggcgatctcggtgctccttacctgggaggtctcccggcttagtttcggcctcgttgggtcggaatctccaaagacagtgggtttcagccagaaacgcgaagacgaacgcctagccggcgcgggcagaaccgaggacacaatgagatttgtgggaccgggcgcccagaggctggcgcgggggagaccccacagctaaaatgctcggtacccccgggcagtcgtgggttagttagaaccgcagagcctttcccgacccctcggaagcgcagaagtatccgaaatctacccgtttcttgggtccagcaaaacttttaagccaggtgtgaaaatcacaaatgtcaaatgatggaagatccaggaatcgggacaggcgctacgatgaggtcccaagcgacctgccctatcaagataccaccataagaacccacccaattcttcatgacagtgagcgggcagtgagcgctgatcccttgccaccaccccctctcccattacagccaccattcggcccagacttctactcaagtgacacagaagaaccagctatagcgccagatctcaaaccagtaaggcgctttgtccctgactcctggaagaactttttcagagggaagaaaaaggaccccgaatgggataagccggtgtctgatatcaggtacatctccgatggagtggagtgttcaccaccagcctctccagcaagaccaaaccaccgttcgcccctcaactcctgcaaagatccctacggagggtcagaaggaacctttagttcccggaaagaggctgacgcagtgtttccccgggatccctatggatctctagaccgacacacacaaacagttcgaacatacagtgagaaggtggaggagtataacctgagatactcctacatgaagtcgtgggcaggcctgctgagaatactgggtgtggtggagctgcttttgggggccggtgtctttgcttgtgtcacagcttacattcacaaggacagtgagtggtacaacttgtttggatattcacaaccgtatggcatgggaggcgttggtggattgggcagtatgtatgggggctattactacactggccctaagaccccttttgtactcgtggttgctggattagcttggatcaccaccattattattctggttcttggcatgtccatgtattaccggaccattcttctggactctaattggtggcccctaactgaatttggaattaacgttgccttgtttattttgtatatggccgcagccatagtctatgtgaatgataccaaccgaggtggcctctgctactatccgttatttaatacaccagtgaatgcagtgttctgccgggtagaaggaggacagatagctgcaatgatcttcctgtttgtcaccatgatagtttatctcattagtgctttggtttgcctaaagttatggaggcatgaggcagctcggagacatagagaatatatggaacaacaggagataaatgagccatcattgtcatcgaaaaggaaaatgtgtgaaatggccaccagtggtgacagacaaagagactcagaagttaatttcaaggaactgagaacagcaaaaatgaaacctgaactactgagtggacacatccccccaggccacattcctaaacctatcgtgatgcccgactatgtggcaaaataccctgtgattcagacagatgatgagcgagaacgctataaagctgtgttccaagaccagttttcagagtacaaagagctgtctgcagaagttcaggctgtcctgaggaagtttgatgagctggatgcagtgatgagcagattgccacatcattcggaaagccgacaggaacatgagagaatttcaagaatccatgaagagtttaagaaaaaaaa

SEQ ID NO: 151749 - DNA, 1584 bp, Homo sapiens
  Payload ID: 9863
  Gene Symbol: MARVELD2
  Gene Name: MARVEL domain containing 2
  ENST ID: ENST00000612528
  CDS Start-End: 19-1347
caggtgtgaaaatcacaaatgtcaaatgatggaagatccaggaatcgggacaggcgctacgatgaggtcccaagcgacctgccctatcaagataccaccataagaacccacccaattcttcatgacagtgagcgggcagtgagcgctgatcccttgccaccaccccctctcccattacagccaccattcggcccagacttctactcaagtgacacagaagaaccagctatagcgccagatctcaaaccagtaaggcgctttgtccctgactcctggaagaactttttcagagggaagaaaaaggaccccgaatgggataagccggtgtctgatatcaggtacatctccgatggagtggagtgttcaccaccagcctctccagcaagaccaaaccaccgttcgcccctcaactcctgcaaagatccctacggagggtcagaaggaacctttagttcccggaaagaggctgacgcagtgtttccccgggatccctatggatctctagaccgacacacacaaacagttcgaacatacagtgagaaggtggaggagtataacctgagatactcctacatgaagtcgtgggcaggcctgctgagaatactgggtgtggtggagctgcttttgggggccggtgtctttgcttgtgtcacagcttacattcacaaggacagtgagtggtacaacttgtttggatattcacaaccgtatggcatgggaggcgttggtggattgggcagtattgctttggtttgcctaaagttatggaggcatgaggcagctcggagacatagagaatatatggaacaacaggagataaatgagccatcattgtcatcgaaaaggaaaatgtgtgaaatggccaccagtggtgacagacaaagagactcagaagttaatttcaaggaactgagaacagcaaaaatgaaacctgaactactgagtggacacatccccccaggccacattcctaaacctatcgtgatgcccgactatgtggcaaaataccctgtgattcagacagatgatgagcgagaacgctataaagctgtgttccaagaccagttttcagagtacaaagagctgtctgcagaagttcaggctgtcctgaggaagtttgatgagctggatgcagtgatgagcagattgccacatcattcggaaagccgacaggaacatgagagaatttcaagaatccatgaagagtttaagaaaaaaaagaatgatcctacatttctggaaaaaaaagaacgctgtgattacctaaagaataaactttctcacataaagcaaagaattcaagaatatgataaagtaatgaattgggatgtacaaggttattcttaacgcttatttgaaaccactttatttttttattttattttatttttttgagatgaagtctcgctctgttacccaggctggaatgcagtggcacaatctcggctcactgcaacctccacctcccgggttcaagcaattctcctgttcaagcaattagcctccccacctcccaaagtgttgggattacaggcgtgagtcaccgcgcccagctggtattgcttttctattccctttggacat

SEQ ID NO: 151750 - DNA, 2912 bp, Homo sapiens
  Payload ID: 9864
  Gene Symbol: MARVELD3
  Gene Name: MARVEL domain containing 3
  Uniprot ID: Q96A59
  ENST ID: ENST00000268485
  CDS Start-End: 45-1250
tgttgccctcaggtcgctcccgggcggggacacggaacccggccatggaagatccgtcgggggctcgcgagccccgggcccggccgagagagcgggacccgggacggcgcccccacccagaccaaggccgcacccacgatcgaccgcgggaccgacccggggacccgcgcaggaagcgaagcagcgacgggaaccggcgaagggacggggaccgggacccggagagagaccaggagagggacgggaaccgcgaccggaaccgggaccgggagagggagagagagagggaaagagacccggaccgaggcccccgccgggacacacacagggacgcgggccctcgcgcaggtgaacacggagtttgggaaaaaccgcgccaaagccggacgcgggacggagcccggggactgacctgggacgcagccgcgcctcctgggcccgcgccctgggaagccccggagccgccgcagccgcagaggaagggagaccccgggcgccgcagacccgaaagtgaacccccttcggagagatatctgccctcgacccccaggcctggacgagaggaggtggaatattaccagtcagaggcggaaggactcctggaatgccacaaatgcaaatacttgtgcactgggagagcctgctgccaaatgctggaggttctcctgaacttgctgatcctggcctgcagctctgtgtcttacagttccacagggggctacacgggcatcaccagcttggggggcatttactactatcagttcggaggggcttacagtggctttgatggtgctgacggggagaaggcccagcaactggatgtccagttctaccagctaaagctgcccatggtcactgtggcaatggcctgtagtggagccctcacagccctctgctgcctcttcgttgccatgggtgtcctgcgggtcccgtggcattgtccactgttgctggtgaccgaaggcttgttggacatgctcatcgcgggggggtacatcccggccttgtacttctacttccactacctctctgctgcctatggctctcctgtgtgtaaagagaggcaggcgctgtaccaaagcaaaggctacagcggtttcggctgcagtttccacggagcagatataggagctggaatctttgctgccctgggcattgtggtctttgccctgggggctgtcctggccataaagggctaccgaaaagttaggaagctaaaagagaagccagcagaaatgtttgaattttaagggtttctaaaacgctctgacagatgcaagtggtggtggaaggtagtctgagccactgcctttcccaagaatcccttgttgtggaagtttccagtgctggaaaagcagcgagccagcgttggtgtggtgggcggagctcccagtcgcatggagcggtgttcatggatgcaacagaccctggcttctggagtcctctgtgagtgagggaccaatcaaaattatttttcaaaaagcaaaaaaatggccggcctcggcggctcacacctgtaaccccagcactttgggaggctgaggtgggtggatcacttgaggtcaggagctcgagaccagcttggccaacatggtgagcccccgtctctactaaaatacaaaaaaattagccaggcgtggtggcgggcgcctgtaatcccagctacttgggaggctgaggcaggagaatcgcttgaatctgggaggcggagattgcagtgagccgagatcccgccactgcactccagcccaggtgacagagcgagactccatctcaaaaaaaaaaaaaagcaaaaaaactggaccccaagagccacaaggaaaaagcatgtactacaacagagtgcacctcttcattcagtaaagggaggtcaccaagagaatttgatgaaccttaccttcaaagttcctgggcacagtggctcacacctgtaatcccagagctttgggaggctgaggtaggaggattgcttgaacccaggagttcaagtttgcagtgcgctatgattgtcccactacactctagcctgagcaacagaccaagaccgtattgccaaaataccaaaaaaaaaaaaagttcatggagagccacatagacatgagaccacacttcagcctgaatttttctaaaacacagttgtctcaagcagattactccacacgtttttccacactgaactctccagtccttccacttccttaattctgcaaatggagggggtggggactcttgggaaactactcctgtaaaattgaagttggaggtaggcgtgggctgaggaaagaggaatcagattaattctctgggttgcaaagaggctattctgcaagccccttacagtggccctgaaagctcaataagtgttttgtacctcttgtaaatgtgccattgtgtgaagcattaaacccaacatctagaattcaggattcatccagaataaaaggatgtaaaatctttcccaacagaagagtgttacttttggtcagacaacttcatgggttcttactgcacattaaattatgacttatggaacattgcaatatattctcggtccttaagttatgacttatggaacattacaatatattctcggtccaagtgagtaagttctttgctttatgtgaatccaataaaaaatccaaagaattttaatttggagttgatgtcctctttacaatacatttataatattctcttaaatacagacaatttttcacatttaaaaggtgagttccatttgagtttagaaaaggaaatatatatatacatgcttgtatatgattggaaaatttcttgaagaataacatcagaaagtattaagttttgcttttgaagagaaggggacttttcatttatacatggcttgactgcacatgtattaattttagaaaaataaaaagtaaaaaagttga

SEQ ID NO: 151751 - DNA, 2214 bp, Homo sapiens
  Payload ID: 9864
  Gene Symbol: MARVELD3
  Gene Name: MARVEL domain containing 3
  Uniprot ID: Q96A59
  ENST ID: ENST00000299952
  CDS Start-End: 44-1276
gttgccctcaggtcgctcccgggcggggacacggaacccggccatggaagatccgtcgggggctcgcgagccccgggcccggccgagagagcgggacccgggacggcgcccccacccagaccaaggccgcacccacgatcgaccgcgggaccgacccggggacccgcgcaggaagcgaagcagcgacgggaaccggcgaagggacggggaccgggacccggagagagaccaggagagggacgggaaccgcgaccggaaccgggaccgggagagggagagagagagggaaagagacccggaccgaggcccccgccgggacacacacagggacgcgggccctcgcgcaggtgaacacggagtttgggaaaaaccgcgccaaagccggacgcgggacggagcccggggactgacctgggacgcagccgcgcctcctgggcccgcgccctgggaagccccggagccgccgcagccgcagaggaagggagaccccgggcgccgcagacccgaaagtgaacccccttcggagagatatctgccctcgacccccaggcctggacgagaggaggtggaatattaccagtcagaggcggaaggactcctggaatgccacaaatgcaaatacttgtgcactgggagaggtgtggtgcagatagtggaggtggtcttgaatgggatggttctcatatgcatcgtggcctcctactttgtccttgccggattcagtgccagcttttccagcggcggtggctttgggaacaactactactcaccgttcgagggcactgagctagagcaggttcggcagctggaccagcagtacacgatcctccgctcgcccctgatatacggtggcgtggctgtttctctgggtctgggggtcctcaccatgggtgttttactccaaggagccaagagtcgaacaatgttgtcagggaagtggctcctcacggaggccgccttcagcctcctagcggcagtgggctactgcacaggcattggtgtttacctccacgtggctctgcagatcaatagcaccgacacttgcaaaacaagagagaggctctatgcccgcaagggtctcacctggatggactgccagctggcaggcaccgacggagcagcagccacctttgcttgtcttctcgtgatcatgtacggcgccagcgtggtgctggccctgcgtagctaccgagaacagaagcgctacaaaggcagccgagaacagcccggaagttacagtgatgcaccggaatatctgtggtctggaactctttgagatcttccggaacctaaatgtgaacgcacattgtttctctcaaaaagacaggtcttttaaaactccgcattagacaactatggttttcacacacttgactttataaatgctctctttggactgaggcaaagttaaagaattgaggacgggcatggtggctcatgcctgtaatcccagcactttgggaggctgaggtgggcggatcgcttgaggtcagcagattgagtccagcctggctcacatagcgaaaccctgtctctactaaaaatacaaaaaatcgccgggcatggtggctcacgcctgtaatcccagcactttaggaggccaaggcaggcagatcacctgaggtcaggtgtttgaaaccagtctggcaaacatggtgaaaccccatctctactaaaaatacaaaaattagctgggcgtggtggcaggcacctgtaattccagctactctggaggctgaggcaggagaatctcttaaacccgggaggcagaggttgcagtgagccaagaccattgcactccagcctgggcaacaagagcgagactccgtctcaaaaaaatacaaaaaatcatctgggcttggtggtgaacgcctgtaatcccagttactcaggaggctaaaccacaagaatcacttgaacctgggaggcagaggttgcagtgagcaaactccactccacgtcactgcactccagcctgggtaacagagcgaggctctgtctcaaaaacaacaactacaacaaaaaagataggacagtagattttattagaccctgaagcatactggaggctttttcatttctgcattccctgacagtgctccatagagtaggtcttcaaaggtagatagtaatctcattaccctggactgttctcataatgtaacagatcactaacactgaatcttaaaaataaagttcttttagtaattttaa

SEQ ID NO: 151752 - DNA, 582 bp, Homo sapiens
  Payload ID: 9864
  Gene Symbol: MARVELD3
  Gene Name: MARVEL domain containing 3
  ENST ID: ENST00000567501
  CDS Start-End: 193-375
aacttgcactcacaggaaggcagctcgcagctacctggtgagacagctcccaggggcagacaaaccatcagcggtaccaatcacagcatctgtcacgtgtgaacccccttcggagagatatctgccctcgacccccaggcctggacgagaggaggtggaatattaccagtcagaggcggaaggactcctggaatgccacaaatgcaaatacttgtgcactgggagagcctgctgccaaatgctggaggttctcctgaacttgctgatcctggcctgcagctctgtgtcttacagttccacagggggctacacgggcatcaccagcttggggggcatttactactatcagttcggaggggcttacagtggctttgatggtgctgacggggagaaggcccagcaactggatgtccagttctaccagctaaagctgcccatggtcactgtggcaatggcctgtagtggagccctcacagccctctgctgcctcttcgttgccatgggtgtcctgcgggtcccgtggcattgtccactgttgctggtgaccgaaggcttgttggacatgctcatcgcgggggggta

SEQ ID NO: 151753 - DNA, 1351 bp, Homo sapiens
  Payload ID: 9864
  Gene Symbol: MARVELD3
  Gene Name: MARVEL domain containing 3
  Uniprot ID: Q96A59
  ENST ID: ENST00000565261
  CDS Start-End: 47-493
gttgttgccctcaggtcgctcccgggcggggacacggaacccggccatggaagatccgtcgggggctcgcgagccccgggcccggccgagagagcgggacccgggacggcgcccccacccagaccaaggccgcacccacgatcgaccgcgggaccgacccggggacccgcgcaggaagcgaagcagcgacgggaaccggcgaagggacggggaccgggacccggagagagaccaggagagggacgggaaccgcgaccggaaccgggaccgggagagggagagagagagggaaagagacccggaccgaggcccccgccgggacacacacagggacgcgggccctcgcgcagtgaacccccttcggagagatatctgccctcgacccccaggcctggacgagaggaggtggaatattaccagtcagaggcggaaggactcctggaatgccacaaatgcaaatacttgtgcactgggagaggtgtggtgcagatagtggaggtggtcttgaatgggatggttctcatatgcatcgtggcctcctactttgtccttgccggattcagtgccagcttttccagcggcggtggctttgggaacaactactactcaccgttcgagggcactgagctagagcaggttcggcagctggaccagcagtacacgatcctccgctcgcccctgatatacggtggcgtggctgtttctctgggtctgggggtcctcaccatgggtgttttactccaaggagccaagagtcgaacaatgttgtcagggaagtggctcctcacggaggccgccttcagcctcctagcggcagtgggctactgcacaggcattggtgtttacctccacgtggctctgcagatcaatagcaccgacacttgcaaaacaagagagaggctctatgcccgcaagggtctcacctggatggactgccagctggcaggcaccgacggagcagcagccacctttgcttgtcttctcgtgatcatgtacggcgccagcgtggtgctggccctgcgtagctaccgagaacagaagcgctacaaaggcagccgagaacagcccggaagttacagtgatgcaccggaatatctgtggtctggaactctttgagatcttccggaacctaaatgtgaacgcacattgtttctctcaaaaagacaggtcttttaaaactccgcattagacaactatggttttcacacacttgactttataaatgctctctttggactgaggcaaagttaaagaattgaggacgggcatggtggctcatgcctgtaatcccagcactttgggaggctgaggtgggcggatcgcttgaggtcagcagattgagtccagcctg

SEQ ID NO: 151754 - DNA, 850 bp, Homo sapiens
  Payload ID: 9864
  Gene Symbol: MARVELD3
  Gene Name: MARVEL domain containing 3
  ENST ID: ENST00000567566
  CDS Start-End: 70-729
ccacctgcccaagaaacttgttggttgttgccctcaggtcgctcccgggcggggacacggaacccggccatggaagatccgtcgggggctcgcgagccccgggcccggccgagagagcgggacccgggacggcgcccccacccagaccaaggccgcacccacgatcgaccgcgggaccgacccggggacccgcgcaggaagcgaagcagcgacgggaaccggcgaagggacggggaccgggacccggagagagaccaggagagggacgggaaccgcgaccggaaccgggaccgggagagggagagagagagggaaagagacccggaccgaggcccccgccgggacacacacagggacgcgggccctcgcgcaggtgaacacggagtttgggaaaaaccgcgccaaagccggacgcgggacggagcccggggactgacctgggacgcagccgcgcctcctgggcccgcgccctgggaagccccggagccgccgcagccgcagaggaagggagaccccgggcgccgcagacccgaaagtgaacccccttcggagagatatctgccctcgacccccaggcctggacgagaggaggtggaatattaccagtcagaggcggaaggactcctggaatgccacaaatgcaaatacttgtgcactgggagaggtgagccgttttgcaggctgtttgatcatttactgtcactggtggttctggaagggatggtctgagctggtgaagcaaaaatttaagcagattcccttgtgggttcctagcattttcatttctgtacttgtgaggttcttgttttcttaaaaaaaaaaaaaaaaaaaaaggaggaacgtctcaaaa

SEQ ID NO: 151755 - DNA, 1260 bp, Homo sapiens
  Payload ID: 9865
  Gene Symbol: MAS1L
  Gene Name: MAS1 proto-oncogene like, G protein-coupled receptor
  Uniprot ID: P35410
  ENST ID: ENST00000377127
  CDS Start-End: 55-1191
atggaccactgctcctgactgtgatgttgtggcccactcaggtcccagcaccccatggtctgggggaaaatttgctggttcagccagagggctggatggacagtgtttgctgagtcacagatatctctctcatgtagcctttgtctccacagtggtgaccaggaggcacagaacccaaacctggtatctcagctctgtggcgtctttcttcaaaatgagacgaatgaaaccatacatatgcagatgagcatggcagtgggacagcaggccctgcccttgaatatcattgcccccaaggctgtgctggtctccctctgtggggtcttattgaatggcactgtcttctggctgctttgctgtggggccacgaatccctacatggtatacatcctccacctggtcgctgctgacgtgatctatctttgctgctcggcagtggggttcttacaggtgactctgctaacttatcatggagtcgtgttttttatccctgatttcctggccatattgtctcccttctcctttgaggtgtgtctctgtctcctggtggccatcagcacagagcggtgtgtgtgtgtcctcttccccatctggtacagatgccaccgcccaaaatacacatctaatgttgtctgcaccctcatctggggcctgcctttttgcatcaacatagtaaaatcacttttcctaacttactggaaacatgtaaaggcatgtgtcatatttctaaagctttctgggctcttccatgctatcctttcacttgtgatgtgtgtgtcgagtctgactctactcattagattcctgtgctgctcccagcagcaaaaggccaccagggtctatgcggtggtgcagatctcggcccccatgttcctactctgggccctacccctgagcgtggcacccctcataacagatttcaaaatgtttgtcaccacctcctatttaatttccttgttcctcattataaacagcagcgccaaccctatcatttatttctttgtggggagcctcagaaagaaaaggctgaaggaatctctcagagtgattctccaacgggcgttagcagataagccagaggtggggaggaacaaaaaggcagctggcatcgacccaatggagcaaccacactctactcagcatgtggagaaccttcttcccagggagcacagggtcgatgtggaaacataatttcccacatctgagctggggaattgtacacatagtaacccagcctgttctgcatcataaggctgctgc

SEQ ID NO: 151756 - DNA, 1137 bp, Homo sapiens
  Payload ID: 9865
  Gene Symbol: MAS1L
  Gene Name: MAS1 proto-oncogene like, G protein-coupled receptor
  Uniprot ID: P35410
  ENST ID: ENST00000383549
  CDS Start-End: 1-1137
atggtctgggggaaaatttgctggttcagccagagggctggatggacagtgtttgctgagtcacagatatctctctcatgtagcctttgtctccacagtggtgaccaggaggcacagaacccaaacctggtatctcagctctgtggcgtctttcttcaaaatgagacgaatgaaaccatacatatgcagatgagcatggcagtgggacagcaggccctgcccttgaatatcattgcccccaaggctgtgctggtctccctctgtggggtcttattgaatggcactgtcttctggctgctttgctgtggggccacgaatccctacatggtatacatcctccacctggtcgctgctgacgtgatctatctttgctgctcggcagtggggttcttacaggtgactctgctaacttatcatggagtcgtgttttttatccctgatttcctggccatattgtctcccttctcctttgaggtgtgtctctgtctcctggtggccatcagcacagagcggtgtgtgtgtgtcctcttccccatctggtacagatgccaccgcccaaaatacacatctaatgttgtctgcaccctcatctggggcctgcctttttgcatcaacatagtaaaatcacttttcctaacttactggaaacatgtaaaggcatgtgtcatatttctaaagctttctgggctcttccatgctatcctttcacttgtgatgtgtgtgtcgagtctgactctactcattagattcctgtgctgctcccagcagcaaaaggccaccagggtctatgcggtggtgcagatctcggcccccatgttcctactctgggccctacccctgagcgtggcacccctcataacagatttcaaaatgtttgtcaccacctcctatttaatttccttgttcctcattataaacagcagcgccaaccctatcatttatttctttgtggggagcctcagaaagaaaaggctgaaggaatctctcagagtgattctccaacgggcgttagcagataagccagaggtggggaggaacaaaaaggcagctggcatcgacccaatggagcaaccacactctactcagcatgtggagaaccttcttcccagggagcacagggtcgatgtggaaacataa

SEQ ID NO: 151757 - DNA, 1137 bp, Homo sapiens; identical to SEQ ID NO: 151756
  Payload ID: 9865
  Gene Symbol: MAS1L
  Gene Name: MAS1 proto-oncogene like, G protein-coupled receptor
  Uniprot ID: P35410
  ENST ID: ENST00000383643
  CDS Start-End: 1-1137

SEQ ID NO: 151758 - DNA, 1137 bp, Homo sapiens; identical to SEQ ID NO: 151756
  Payload ID: 9865
  Gene Symbol: MAS1L
  Gene Name: MAS1 proto-oncogene like, G protein-coupled receptor
  Uniprot ID: P35410
  ENST ID: ENST00000451019
  CDS Start-End: 1-1137

SEQ ID NO: 151759 - DNA, 1137 bp, Homo sapiens; identical to SEQ ID NO: 151756
  Payload ID: 9865
  Gene Symbol: MAS1L
  Gene Name: MAS1 proto-oncogene like, G protein-coupled receptor
  Uniprot ID: P35410
  ENST ID: ENST00000449044
  CDS Start-End: 1-1137

SEQ ID NO: 151760 - DNA, 1137 bp, Homo sapiens; identical to SEQ ID NO: 151756
  Payload ID: 9865
  Gene Symbol: MAS1L
  Gene Name: MAS1 proto-oncogene like, G protein-coupled receptor
  Uniprot ID: P35410
  ENST ID: ENST00000420035
  CDS Start-End: 1-1137

SEQ ID NO: 151761 - DNA, 1137 bp, Homo sapiens; identical to SEQ ID NO: 151756
  Payload ID: 9865
  Gene Symbol: MAS1L
  Gene Name: MAS1 proto-oncogene like, G protein-coupled receptor
  Uniprot ID: P35410
  ENST ID: ENST00000415802
  CDS Start-End: 1-1137

SEQ ID NO: 151762 - DNA, 1137 bp, Homo sapiens; identical to SEQ ID NO: 151756
  Payload ID: 9865
  Gene Symbol: MAS1L
  Gene Name: MAS1 proto-oncogene like, G protein-coupled receptor
  Uniprot ID: P35410
  ENST ID: ENST00000418003
  CDS Start-End: 1-1137

SEQ ID NO: 151763 - DNA, 9841 bp, Homo sapiens
  Payload ID: 9866
  Gene Symbol: MAS1
  Gene Name: MAS1 proto-oncogene, G protein-coupled receptor
  Uniprot ID: P04201
  ENST ID: ENST00000252660
  CDS Start-End: 267-1244
ggatccagaagggtcattcaatcagttctcagtcttatcaggtctaagttcctttcttatcaggtcctaaaggcctaatcttatcattgtgacaaagataactgtagagtctgttaaacttttttttaataacatgaagattatgatttatagctgaatttctcccttttattccaattcaacaattttcatggctttttgtgtttgttttgttctggacatatttacagaaaattacctgaagagttccaacctgaggcctcctcatggatgggtcaaacgtgacatcatttgttgttgaggaacccacgaacatctcaactggcaggaacgcctcagtcgggaatgcacatcggcaaatccccatcgtgcactgggtcattatgagcatctccccagtggggtttgttgagaatgggattctcctctggttcctgtgcttccggatgagaagaaatcccttcactgtctacatcacccacctgtctatcgcagacatctcactgctcttctgtattttcatcttgtctatcgactatgctttagattatgagctttcttctggccattactacacaattgtcacattatcagtgacttttctgtttggctacaacacgggcctctatctgctgacggccattagtgtggagaggtgcctgtcagtcctttaccccatctggtaccgatgccatcgccccaagtaccagtcggcattggtctgtgcccttctgtgggctctttcttgcttggtgaccaccatggagtatgtcatgtgcatcgacagagaagaagagagtcactctcggaatgactgccgagcagtcatcatctttatagccatcctgagcttcctggtcttcacgcccctcatgctggtgtccagcaccatcttggtcgtgaagatccggaagaacacgtgggcttcccattcctccaagctttacatagtcatcatggtcaccatcattatattcctcatcttcgctatgcccatgagactcctttacctgctgtactatgagtattggtcgacctttgggaacctacaccacatttccctgctcttctccacaatcaacagtagcgccaaccctttcatttacttctttgtgggaagcagtaagaagaagagattcaaggagtccttaaaagttgttctgaccagggctttcaaagatgaaatgcaacctcggcgccagaaagacaattgtaatacggtcacagttgagactgtcgtctaagaactgtgagggaagttgtggataaaaatggtggaacacaggtcatttttagtttgtgcttggaatatgacttaagtatctcctaaatgtgatacagaagaacatctcatcccatatgcatgagatactaattaatgatgaaattgaactcttgtactgtatcttctggaaatgacctgtcatttctgtacttgacaaagactctatttctttcagctcttttggcagcatcttaccatgaaccataaaaatgacttttgcaggaagatttacagatgtgtacgggacaaggtaacaaaactatttgttggaacttgaggaggcagcttgatgtagcaggaagaacaagggtcgcttcctgtgtgacctcaggcaagttgttaaacctctcagagcctcattttctcactcataaaatggttgcggcaatagtctatacctccttggtctgctgtgaagatgaaatgagaagatgaggcttgtaaagcacctggcacattgtggatgttcaacaaatatcagtctctcctcactcccttcaatggtagacaagatataaatttttgttttgtaaagcacacacacacacacacacacacacacacacacacagctctatcatgtacagaagttattatgtgtttttacatgttgaatgtaaatttacgaaggtcttctttttgcttgcagcatgaaagcatttcatggcattacacctctattgaaaaacatcgcggatgttatgatctaacaagccatgtgctagtgcatcatttcaggttgtgaagaaatacatttggccaccagtagaggagtttctcatggctccccttccctctgtgggaatactagatgaaatgaaagtctgtgttttgaaatcctttgattgcataaacatttttacgaatggagttgaatttatgacttcctgggggtgactgggaccttcctcccccatgaagaggtgggttatttgtagccagagttctcacctgcagccaagtgcgggtctctgcacctgtctgcctcctctcctcctgaggctttttttttttttttcatcacacctggaaggaggctcagtggcaagggctaatgaaaatgtggtcacatcctggaggactctgatatttttgctcatgacagatccttgcatgacttcctcagaatctttactcagcactccagggggggctctgcctcttgcctgccatgagttgccctccagacactgcacgtcctgggttttagctgtgaagcccgtcgcatagctatgtttatttccttctgtcccttctaggagttccacaaaagggcaatatgtcacatgattctacaggttgtaaaatgttcaagtccatagaaatgagcccgatagtatttattttaaccatttgctctttaaaaggtcagagaggcagtgatgtaattgttctctgttgctgcttgtccttccccatcctcttcctttctcaaaagaaatgatgtggggcagcttcgctgggggagaggagtctgtcccctcgagcaaggaccccactgccagccaagcttggatgcaggaggcttttcagtgggtgacaacatctgattcagaaacaaggcagctttgctttcaggagcccagatggggtgtggagcaatgacatttagaatgatcttgtttttggttgaaaacagagcattttccctgggaaagaacagaatatggagatcagagcaactcccctctgtttcctgtcctctcctgtgtgtgctgtgtgctggcctctggggtagggaaagggggccaacctcgtctcatctctaaggggatcttagtctcaaagaggaccctaaagactatcagatacaaggaatttctacctaaggaaaatatggtgaactaataggaagcccctatttattgtttttctgcagataaagtggggaaatcgaatgtgataatgaatataaaaattattctaaccttttaaaatgatgccttaccaagaggtaggaggtaggattcagagtttggcagggttataaagactaatttctttctgtcttcccccaaacccattcccaaagtgaactgtaaggttaaaactataacaagaagatttaagtaaatttgcaaatatgtagagaatactaaatcatttgtatcctttaggcattcagacaatttgcctaagtcattgtaggttactaggtgccacttccgagaattccttggggatggggaggagattgtttggataatgcctgtcctaactgaacgggaagggtttgtagcattcctactacaaagattcatgcacagccttctctgcagaacaccatgatgtggacaaggcaaagacggggaagcggaagccgctgtctatgtcataggagaaagagacaccgcataactacaacaccaggctgcacacaagtttgtttgacaagtgttaggaacaaaattgtgtggcagaggtcaccacagcaggggctcttcctgccacccccatattgcatgcagcctcttctgttccctcccctgcccactggggtttctcctcagcactcatcatgccatatatcgatttgcttatttgctcgttctctgtctcttcacgctagactataagctccttgagggcagggacgtagctttgctcactgctgtagccccagcttatttgctgtgttggtcgaatccactgcacccctctctgggctgtttcctttgtacatataaatagactcaaattgcttccacctaaccagaagccattccttgccccacagccctttccagtttctatctcccctccctcccttccttccaaaccaccttctggaaaggctcttccacactcactgtcctgactcttgccacaattcacccctcaacatcctgccatttgtcttgcagcctgaccatcatagagagattggtccagataggaaggtgagtaacttccacagtgtcaaatctgatgggctgttttctacctatgccttttgtggcatttaatacccacagtcttcctgaaattatctcttttcttggattctagtttgctacatttttctccagctctctttttgaatcctatcttcctgattggaatcttctcacttctttcctccctcttctactgctcctcccttaaatggacacattttccataattcagtggctgggcctctgctctcctctttctgagaaatctccctggatcctgatccataatcacctgcttattaatgaacctcaaatagacatttgctgaccagaaccctttgctgggctccagtcctgtgtgtccaatcatctaatggactttttgacccaatgtcctgcaggtgcttgtaacccattcatttccccaccgtttcttttttcttttcttttcttttccttttttttttttttttttttttttgagacagagtcttgctctgttgccccagctggagtgcggtggcgtgatttcggctcactgcaacctccacctcccaggttcaagcaattctcctgcctcagcctcccaagtagctgggattacaggagtgagccactgcgccgggcctgcccctattcttttttcagtgaagtacaccgctggtcaccctgtcccccttgctatgctattccctttgcacagactgctctacctttttttaatctagcaaactccatttatccatctacgtccagctcaagcattagagactcaggagagcctctggaagctgagttcctggataaccgtgccataccttttctttcccagactttccacatctttcccttcctcactctcagcaaatgatggctggctcccctttacacaaggggaatagaagcaaccggaagaactcttccagacatccccgctgtcccctctgctgacctagctccatcttcttcatatcagcctctcccctgtgtgctcagggggaactcactatgcccctccctggctaaggtgataccctggctaagatgctccaaccccttcccctgttgcctgcccgatggcatttcgccagcaattctccctctctgtcctgcaccatcaatttcagtccaggataacggaggacagaattttcaggaatcaggatggaggagggttggtgaacagcaccactggccttgactagcctgctccctgccacacatactggttgtttctctggagacagcattgtatgcactgagatgagcaactggagagccaccagcagccatcccctctctttgtgcctcacagctccagtgactgatggagatggagatgggatcgttggctgccttcatggagttgtttaaggagcacttagaagatgctttacgggcatccctagaatttcaccattagaagagtagttctgttaggttgaaatttgtctttttactcaacctcttcttaaattaggaatcacttctggaaaggaaaacacatcaagccatacatactttttcctgtgctttttctcatggagaggagcagcacaagacaagacacccagctgttcaggctgctgaatgagatggtgaggagtgggtggtagaagtgaagaaaggaggaggtgggagcaatcaagtatttgcttgcttgattccacaaacaagaagcttcttttctctttaacctaacatttgactgtttaactttgcaaggttatatgggaaaaaaaatccttgatatgaaaacattagcaaatgtatcacttataaaatgggtaccatcaggcctccccctgcttagcaccagagtctctctcactgcctcatctacagttttgtggatcagtcttgtgatgcctgagagtcaatgtgcaaactgtcctcgaactttaattgatgatcttgacaaacattcaggattctgtgaaggaggtaagagaggtgtcacagaactgctaaaatacacttcaactattgataaaagagcatggagcagagttagaccggttagcagctgaatcagaggtaaataaacaaggatgatgatgagatgggagcttccaaaaagaagcgttttaatatcaaatgttgaagagaggctcttgggaaaactgctgaagtctttagatatttttgcaaaaattacccactttttgatgttcagcaaaagtaaccattaagtaaagacagaaaaattggctgggtacggtggctcatgcctgtaatcccagcactttgggaggctgaggtgagcagatcacctgaggtcaggagtttgagaccagcctggccaacatggtgaaaccccatctctgctgaaaatacaaaaattagctgggtgtggtggtgggcacctgtaatcccagctacttgggaggctgaggcaggagaattgcttgaacctgggaggcggaggttgcagtaagctgagatcgcaccactgctctccagcctgggtgatagagtgagactccgtctcaaaaaaaagaaaaattatgccaaaaaattaagtacttttgtggcttaaaagaacaatgtattgtcatttctcaaggctccatgggttgattgagttcagtttctcatttggcgtctcttgtagttgtagtgagttgttggctgaggcagaagccacctgaaggcttgactaggcagggcaatcgaggtggtacactcacaaggctggtcatttcctggggctcagctggaaaggtggaccagagttcctacacaaggccctttgatgtggtttgggtttcttacaacatggtgattgtgttctggaaggaagtctcctgagacttagcttttcctaaaggccaaaaatcagctattggggtctcatttgcttaaaattattggcatgttgttgaaattataatgagttttagtaaagcaaaattaaaacaattttcatgattttaatttcacttttttcatgattttctatgaaattttggtcctcattttaacaagattcctttttaacaatcttttactaaaaccagtcattcatggataaggagatcctcttacactaattatttaaatgtgtacatatacatgttaatacaaagggttgaattgttaaagcaaattcagagtgacttacagatcttacccaacatgaaactaatgattcaaatgataagaggcaagtgccaggcacaaatgaaacactcttttctggaggagaccaacagttttaattatttctggggtttttttggtcaaatttctcatgttgcttctagattgttttccaaatgtcatttagttttctatctgtactttttgtgattctctgaattctctgtcagacatttcggagatcttcaattcttctgggtccattgctacagctttgttatctcttttgatgttgtcgttttcccctgagttttcacagtccttgcacttcacgtcgatccccgtgcaattgagaagatagtcacctctgacagttttttaagggttcttggtggtgtcagagctttgctacttagtattggaacttaaactctggtctgttgtttcttcctgttctgagtgagacttgcggtgagcactggaacttaaacattgccctggaactatattgctgctctgtcaacatttcccagttcagggaagatgtaagtgggtatcagaacttaatcttgagctttttgttgtttccaggccaggggagggctctcgagtatacctaggctcgtggaaaatgcagccagggatttggacctccctgtggattgtgccagccagtcccttcaccatggtgtccccactgatcagagctcagagtgcaccagtacaccagttgctgcaatcagtgcttggctttttgtccccagttcaccccaggtcattcagctatcctggcattcccagtggttcctgtgggacggggccagagtgggtgtcccatgaagatgaccagatcagtggggagataaaatgctcacctgtaattctctcctgtcaccttggaaaccatggatctagagacattctctgagtgacactatgccagctgggagtggtggcacagtccgaattgattgtttctcttaccagttctggcttctttcaattctgtggacctagggggtttctcagcttctccccaaagttctggtgaattcagggtggtgttcttgtctttgaatagttggaatctatttctgtggggggaatggttccagagaatcttctattctgccatcttgttgagctctcccaaaatgtccccttctcctacattggcacacgctttggtttcacattgactgatgagttttgagcaacgtatacaaagaaacattgttctcaaaggaaactggtgaagtttgggggtgcctccattttgcacgttgttcattacacaagtagaatatacttatgtgactacccgtaccctttctccagcctccctgccccataaacctataaatcccaaatttatttataatagacaatcttgacagattaggtatatcctgctggaaataggactagttcactgagtataacgtttctacagagcagtctgattgaggtcttcagcatctttgcaaggtgccctggttgaggttattgttccgcaggcactcctgtggggaaggagtgatttgcaggcttcatgctgacattacctgtatggtacattttggccaacaccagcctgttaatgcctgaggcagaggcctctggaatgagaaaacaggactggaagcctgcctacttagtagcttggcaagtgtcaacaagttaatctctgtgactggtgacttagttggagttccacccaaagcagatcctgagacaaggatttagtgcaagtaattcatgtggccatcatccagaggagcatgggagaaagtggggaatttagacagggaaaggaggaagttagcaaagggtgagtgaaggagaacaagggcccaggacagtgaggccccacctcagaactgccctcctggaagggcgaaggagccgtggcgccgacccccacctcctgcccctcaatagggagcatcactccccgacgtcaactcccagctcttcctggcctgccctgtgctcaggccgagcatggcctaaagcagggaatatgtctaggcagagtgacacagggagccatgggcaggtacaggatctacctgcaagtgactacaggggtggcttcagggctgaccaatggcatctgctatcatggaattaaagtaacctaccccacgaagtagctgtgccaagtaagtgaaataatgcacaaggaaattctgtgtaaactttcaagcatcaagcaaatgttagttatttcttgaggacgttatgtaaagtgatataagccaggcccggaaggacaaagactgtatgattccactcatatgaggggcttagagttgtcagattcatagagacagaaggtagaatggtggtggccgggggctggagggaggagggagtggggagttagtgtttagtaggaactgaatttcagtttgaggagatgaaaatgttctggggatctattgcacaacaatggacatgtagctaaccccactgtactgtattcttaaaaatgtttcagatggtaaattttatgttatgtatattttaccacaataaagaagtgagttattgt

SEQ ID NO: 151764 - DNA, 966 bp, Homo sapiens
  Payload ID: 9867
  Gene Symbol: MRGPRD
  Gene Name: MAS-related GPR, member D
  Uniprot ID: Q8TDS7
  ENST ID: ENST00000309106
  CDS Start-End: 1-966
atgaaccagactttgaatagcagtgggaccgtggagtcagccctaaactattccagagggagcacagtgcacacggcctacctggtgctgagctccctggccatgttcacctgcctgtgcgggatggcaggcaacagcatggtgatctggctgctgggctttcgaatgcacaggaaccccttctgcatctatatcctcaacctggcggcagccgacctcctcttcctcttcagcatggcttccacgctcagcctggaaacccagcccctggtcaataccactgacaaggtccacgagctgatgaagagactgatgtactttgcctacacagtgggcctgagcctgctgacggccatcagcacccagcgctgtctctctgtcctcttccctatctggttcaagtgtcaccggcccaggcacctgtcagcctgggtgtgtggcctgctgtggacactctgtctcctgatgaacgggttgacctcttccttctgcagcaagttcttgaaattcaatgaagatcggtgcttcagggtggacatggtccaggccgccctcatcatgggggtcttaaccccagtgatgactctgtccagcctgaccctctttgtctgggtgcggaggagctcccagcagtggcggcggcagcccacacggctgttcgtggtggtcctggcctctgtcctggtgttcctcatctgttccctgcctctgagcatctactggtttgtgctctactggttgagcctgccgcccgagatgcaggtcctgtgcttcagcttgtcacgcctctcctcgtccgtaagcagcagcgccaaccccgtcatctacttcctggtgggcagccggaggagccacaggctgcccaccaggtccctggggactgtgctccaacaggcgcttcgcgaggagcccgagctggaaggtggggagacgcccaccgtgggcaccaatgagatgggggcttga

SEQ ID NO: 151765 - DNA, 1409 bp, Homo sapiens
  Payload ID: 9868
  Gene Symbol: MRGPRE
  Gene Name: MAS-related GPR, member E
  Uniprot ID: Q86SM8
  ENST ID: ENST00000389832
  CDS Start-End: 308-1246
aggttcagggtttctcttgctgtccacacctgggcgagagctgagcggaagagaaggggtcctcagagagacaccttcctgaccggccccattccagctggatgccatgtgactcggaggagctggtggacactgaacaggagccgcccagaggctctggggactggagccctcggccgcggccaggatagatccaaggcccagggtcagagcaggcagggctcggccagtcctctgccccaaacggggcatcaggagagagagcgagcagaacacactcctgcagcatcccctggccccccgccccatgatggagcccagagaagctggacagcacgtgggggccgccaacggcgcccaggaggatgtggccttcaacctcatcatcctgtccctcaccgaggggctcggcctcggtgggctgctggggaatggggcagtcctctggctgctcagctccaatgtctacagaaaccccttcgccatctacctcctggacgtggcctgcgcggatctcatcttccttggctgccacatggtggccatcgtccccgacttgctgcaaggccggctggacttcccgggcttcgtgcagaccagcctggcaacgctgcgcttcttctgctacatcgtgggcctgagtctcctggcggccgtcagcgtggagcagtgcctggccgccctcttcccagcctggtactcgtgccgccgcccacgccacctgaccacctgtgtgtgcgccctcacctgggccctctgcctgctgctgcacctgctgctcagcggcgcctgcacccagttcttcggggagcccagccgccacttgtgccggacgctgtggctggtggcagcggtgctgctggctctgctgtgttgcaccatgtgtggggccagccttatgctgctgctgcgggtggagcgaggcccccagcggcccccaccccggggcttccctgggctcatcctcctcaccgtcctcctcttcctcttctgcggcctgcccttcggcatctactggctgtcccggaacctgctctggtacatcccccactacttctaccacttcagcttcctcatggccgccgtgcactgcgcggccaagcccgtcgtctacttctgcctgggcagtgcccagggccgcaggctgcccctccggctggtcctccagcgagcgctgggagacgaggctgagctgggggccgtcagggagacctcccgccggggcctggtggacatagcagcctgagccctggggcccccgaccccagctgcagcccccgtgaggcaagagggtgacttggggaaggtggtggggtcagaggctggggccagccggacctggaggaggccttggtgggtgacccggtcatgtgctgtcaaagttgtgacccttggtctggagcatgagg

SEQ ID NO: 151766 - DNA, 2295 bp, Homo sapiens
  Payload ID: 9869
  Gene Symbol: MRGPRF
  Gene Name: MAS-related GPR, member F
  Uniprot ID: Q96AM1
  ENST ID: ENST00000309099
  CDS Start-End: 384-1415
gatgagttcccggtggggctctggggggggctcctgagcggggcattccttcctgaagcctcatccccgctcagccctgctcagcccctcctcctactcccctccccctccccctcctgccgggccaggaattgggtttggggcgggttctgcttccaaagccatctcttccagcaggagagggctctactctgagctcctattttccaaggctccgggccgcgctcggcgctggcctgctgccccggcgggtccgccggccggaggcgggagtcacaggaagagccctccacaaaaggaggcctcggcggatcaggacagctgcaggtgggtgtgcagactggtgagctgccagcaggggcccagacgcgccaggcctggagatggctggaaactgctcctgggaggcccatcccggcaacaggaacaagatgtgccctggcctgagcgaggccccggaactctacagccggggcttcctgaccatcgagcagatcgcgatgctgccgcctccggccgtcatgaactacatcttcctgctcctctgcctgtgtggcctggtgggcaacgggctggtcctctggtttttcggcttctccatcaagaggaaccccttctccatctacttcctgcacctggccagcgccgatgtgggctacctcttcagcaaggcggtgttctccatcctgaacacggggggcttcctgggcacgtttgccgactacatccgcagcgtgtgccgggtcctggggctctgcatgttccttaccggcgtgagcctcctgccggccgtcagcgccgagcgctgcgcctcggtcatcttccccgcctggtactggcgccggcggcccaagcgcctgtcggccgtggtgtgcgccctgctgtgggtcctgtccctcctggtcacctgcctgcacaactacttctgcgtgttcctgggccgcggggcccccggcgcggcctgcaggcacatggacatcttcctgggcatcctcctgttcctgctctgctgcccgctcatggtgctgccctgcctggccctcatcctgcacgtggagtgccgggcccgacggcgccagcgctctgccaagctcaaccacgtcatcctggccatggtctccgtcttcctggtgtcctccatctacttagggatcgactggttcctcttctgggtcttccagatcccggcccccttccccgagtacgtcactgacctgtgcatctgcatcaacagcagcgccaagcccatcgtctacttcctggccgggagggacaagtcgcagcggctgtgggagccgctcagggtggtcttccagcgggccctgcgggacggcgctgagctgggggaggccgggggcagcacgcccaacacagtcaccatggagatgcagtgtcccccggggaacgcctcctgagactccagcgcctggaggaggcaggggcaggaagcggcctccaagacccttcgccttgggacaggaatgggcacctgcttctgagtccatacaggagaagaaagatctgtttcctctcctcgggcctccttctccctgggctggggactccaggggtggctgggagactgggcagccaccagcaaacagaccctgtggcccctgcccggctcccccacccattctgctcccctagagacctcttgtacagaagttgcccccaggtggtggggcccctccttgccctaggctggttggtaaaagagaggaggtcaacacccagcctagccacctctgcctcttgggtcagccctccttgactgtgtcccagccagcaccaggccagcagcctcatccctgccattcagggctgttccagagattcgatcctcttaaggcattatcagtgagcaaatgtgaaggaaatggtgtctggaagaaagttctggttcacatgccttgtagctaagtctttctgcaaacaacctcccttccccccgtcgagtcatttggtgactttgatggggggatttctggttatgtcaaggctctggagacaggaagggcctttggccgccttgggtagttgacctgccttttctgactccgggacgagccagtcctaggctgcctccgggagcacttgaggtatcccgcaggccatgaggacccactgggcagctcctggacagcctcttggctccagcccccacccgaaagtggacactggctccgccctggccacctggggactggcactgtggtgcacagtggcccaatgtggccaacggaagttttataaaagacaaaatgtatatcaataaacattttataacttgca

SEQ ID NO: 151767 - DNA, 705 bp, Homo sapiens
  Payload ID: 9869
  Gene Symbol: MRGPRF
  Gene Name: MAS-related GPR, member F
  ENST ID: ENST00000320913
  CDS Start-End: 221-535
atctcttccagcaggagagggctctactctgagctcctattttccaaggctccgggccgcgctcggcgctggcctgctgccccggcgggtccgccggccggaggcgggagtcacaggaagagccctccacaaaaggaggcctcggcggatcaggacagctgcaggtgggtgtgcagactggtgagctgccagcaggggcccagacgcgccaggcctggagatggctggaaactgctcctgggaggcccatcccggcaacaggaacaaggtaagtgccacaggcggagggccctggtcttgcccagacgggtgtgggtgggaggggcagacccagcccagcatctcctcccccatcccccccttcctggccccactttccagctctggacccaccgtgggcagtgggctcctctgggctatgtggccgggcacaagttccctggaccctcctaccctcctgtcctcatcagtgaggcaagcaccaggactggacctcaaggtccctcgctgtgctgacactgtggtcgccttgtagcatccttgcaaggtcttgtttcatctcttccctgcagaggtggggcagtcagctacttactacagccaggcgggccaggaagccctgggacgctgactccaaggtggccctgatgtcatgtgctccatggagcctagggggtcctgggccaccccgagagtgttgcccca

SEQ ID NO: 151768 - DNA, 2282 bp, Homo sapiens
  Payload ID: 9869
  Gene Symbol: MRGPRF
  Gene Name: MAS-related GPR, member F
  Uniprot ID: Q96AM1
  ENST ID: ENST00000441623
  CDS Start-End: 368-1399
gggctcctgagcggggcattccttcctgaagcctcatccccgctcagccctgctcagcccctcctcctactcccctccccctccccctcctgccgggccaggaattgggtttggggcgggttctgcttccaaagccatctcttccagcaggagagggctctactctgagctcctattttccaaggctccgggccgcgctcggcgctggcctgctgccccggcgggtccgccggccggaggcgggagtcacaggaagagccctccacaaaaggaggcctcggcggatcaggacagctgcaggcttctgccaggtgggtgtgcagactggtgagctgccagcaggggcccagacgcgccaggcctggagatggctggaaactgctcctgggaggcccatcccggcaacaggaacaagatgtgccctggcctgagcgaggccccggaactctacagccggggcttcctgaccatcgagcagatcgcgatgctgccgcctccggccgtcatgaactacatcttcctgctcctctgcctgtgtggcctggtgggcaacgggctggtcctctggtttttcggcttctccatcaagaggaaccccttctccatctacttcctgcacctggccagcgccgatgtgggctacctcttcagcaaggcggtgttctccatcctgaacacggggggcttcctgggcacgtttgccgactacatccgcagcgtgtgccgggtcctggggctctgcatgttccttaccggcgtgagcctcctgccggccgtcagcgccgagcgctgcgcctcggtcatcttccccgcctggtactggcgccggcggcccaagcgcctgtcggccgtggtgtgcgccctgctgtgggtcctgtccctcctggtcacctgcctgcacaactacttctgcgtgttcctgggccgcggggcccccggcgcggcctgcaggcacatggacatcttcctgggcatcctcctgttcctgctctgctgcccgctcatggtgctgccctgcctggccctcatcctgcacgtggagtgccgggcccgacggcgccagcgctctgccaagctcaaccacgtcatcctggccatggtctccgtcttcctggtgtcctccatctacttagggatcgactggttcctcttctgggtcttccagatcccggcccccttccccgagtacgtcactgacctgtgcatctgcatcaacagcagcgccaagcccatcgtctacttcctggccgggagggacaagtcgcagcggctgtgggagccgctcagggtggtcttccagcgggccctgcgggacggcgctgagctgggggaggccgggggcagcacgcccaacacagtcaccatggagatgcagtgtcccccggggaacgcctcctgagactccagcgcctggaggaggcaggggcaggaagcggcctccaagacccttcgccttgggacaggaatgggcacctgcttctgagtccatacaggagaagaaagatctgtttcctctcctcgggcctccttctccctgggctggggactccaggggtggctgggagactgggcagccaccagcaaacagaccctgtggcccctgcccggctcccccacccattctgctcccctagagacctcttgtacagaagttgcccccaggtggtggggcccctccttgccctaggctggttggtaaaagagaggaggtcaacacccagcctagccacctctgcctcttgggtcagccctccttgactgtgtcccagccagcaccaggccagcagcctcatccctgccattcagggctgttccagagattcgatcctcttaaggcattatcagtgagcaaatgtgaaggaaatggtgtctggaagaaagttctggttcacatgccttgtagctaagtctttctgcaaacaacctcccttccccccgtcgagtcatttggtgactttgatggggggatttctggttatgtcaaggctctggagacaggaagggcctttggccgccttgggtagttgacctgccttttctgactccgggacgagccagtcctaggctgcctccgggagcacttgaggtatcccgcaggccatgaggacccactgggcagctcctggacagcctcttggctccagcccccacccgaaagtggacactggctccgccctggccacctggggactggcactgtggtgcacagtggcccaatgtggccaacggaagttttataaaagacaaaatgtatatcaataaacattttataacttgcagcc

SEQ ID NO: 151769 - DNA, 870 bp, Homo sapiens
  Payload ID: 9870
  Gene Symbol: MRGPRG
  Gene Name: MAS-related GPR, member G
  Uniprot ID: Q86SM5
  ENST ID: ENST00000332314
  CDS Start-End: 1-870
atgtttgggctgttcggcctctggagaaccttcgacagtgtggtcttctacctgacgctgatcgtgggcctcgggggaccggtaggtaacgggctggtgctctggaacctcggcttccgcatcaagaagggccccttctccatctacctgctgcacctggccgccgccgacttcctgttcctctcctgccgtgtgggcttctccgtggctcaggctgccctgggcgcccaggacacactctacttcgtgctcaccttcctgtggttcgcggtggggctctggctgctggcggccttcagcgtggagcgctgcctctccgacctcttccccgcctgctaccagggctgccggcccagacacgcctcggccgtcctctgcgccctggtgtggaccccgaccctgccggccgtgccgctgcccgccaacgcctgcggcctgctgcgcaacagcgcgtgccccctggtctgcccgcgctaccacgtggccagcgtcacctggttcctggtgctggcccgcgtcgcctggacggctggcgtggtcctctttgtctgggtgacctgctgctccactcgcccgcggcccaggctctacggcatcgtcctgggcgcgctgctcctgctcttcttctgtggcctgccctcggtcttctactggagcctgcagcccctgctgaacttcctgctgcccgtgttttccccgctggccacgctgctggcctgcgtcaacagcagctccaagcccctcatctactcggggttgggccgacagcccgggaagcgggagccgctgaggtcggtactgcggagggccctgggggagggcgccgagctgggtgccaggggacagtccctgcccatgggtctcctataa

SEQ ID NO: 151770 - DNA, 1190 bp, Homo sapiens
  Payload ID: 9871
  Gene Symbol: MRGPRX1
  Gene Name: MAS-related GPR, member X1
  Uniprot ID: Q96LB2
  ENST ID: ENST00000302797
  CDS Start-End: 219-1187
aggtcaggcttcagagtcagcaagaactggatttcaaactggatttgaggacccccaccttttgataggtgacttattctctgtgagtctctgatctgccctctttaaatgaggaagtaaatcccacatggcagggtggtggggagaatcagagatcatacagctggtgatcacaactggtttctgtttccagggtcaccagactagggtttctgagcatggatccaaccatctcaaccttggacacagaactgacaccaatcaacggaactgaggagactctttgctacaagcagaccttgagcctcacggtgctgacgtgcatcgtttcccttgtcgggctgacaggaaacgcagttgtgctctggctcctgggctgccgcatgcgcaggaacgccttctccatctacatcctcaacttggccgcagcagacttcctcttcctcagcggccgccttatatattccctgttaagcttcatcagtatcccccataccatctctaaaatcctctatcctgtgatgatgttttcctactttgcaggcctgagctttctgagtgccgtgagcaccgagcgctgcctgtccgtcctgtggcccatctggtaccgctgccaccgccccacacacctgtcagcggtggtgtgtgtcctgctctgggccctgtccctgctgcggagcatcctggagtggatgttatgtggcttcctgttcagtggtgctgattctgcttggtgtcaaacatcagatttcatcacagtcgcgtggctgatttttttatgtgtggttctctgtgggtccagcctggtcctgctgatcaggattctctgtggatcccggaagataccgctgaccaggctgtacgtgaccatcctgctcacagtactggtcttcctcctctgtggcctgccctttggcattcagtttttcctatttttatggatccacgtggacagggaagtcttattttgtcatgttcatctagtttctattttcctgtccgctcttaacagcagtgccaaccccatcatttacttcttcgtgggctcctttaggcagcgtcaaaataggcagaacctgaagctggttctccagagggctctgcaggacgcgtctgaggtggatgaaggtggagggcagcttcctgaggaaatcctggagctgtcgggaagcagattggagcagtgagga

SEQ ID NO: 151771 - DNA, 2036 bp, Homo sapiens
  Payload ID: 9872
  Gene Symbol: MRGPRX2
  Gene Name: MAS-related GPR, member X2
  Uniprot ID: Q96LB1
  ENST ID: ENST00000329773
  CDS Start-End: 89-1081
gtttgccagtcccaggaaagcacttctcaactcaccaactccagtagaaagaagggtgttaaggggcaccagtggaggttttctgagcatggatccaaccaccccggcctggggaacagaaagtacaacagtgaatggaaatgaccaagcccttcttctgctttgtggcaaggagaccctgatcccggtcttcctgatccttttcattgccctggtcgggctggtaggaaacgggtttgtgctctggctcctgggcttccgcatgcgcaggaacgccttctctgtctacgtcctcagcctggccggggccgacttcctcttcctctgcttccagattataaattgcctggtgtacctcagtaacttcttctgttccatctccatcaatttccctagcttcttcaccactgtgatgacctgtgcctaccttgcaggcctgagcatgctgagcaccgtcagcaccgagcgctgcctgtccgtcctgtggcccatctggtatcgctgccgccgccccagacacctgtcagcggtcgtgtgtgtcctgctctgggccctgtccctactgctgagcatcttggaagggaagttctgtggcttcttatttagtgatggtgactctggttggtgtcagacatttgatttcatcactgcagcgtggctgatttttttattcatggttctctgtgggtccagtctggccctgctggtcaggatcctctgtggctccaggggtctgccactgaccaggctgtacctgaccatcctgctcacagtgctggtgttcctcctctgcggcctgccctttggcattcagtggttcctaatattatggatctggaaggattctgatgtcttattttgtcatattcatccagtttcagttgtcctgtcatctcttaacagcagtgccaaccccatcatttacttcttcgtgggctcttttaggaagcagtggcggctgcagcagccgatcctcaagctggctctccagagggctctgcaggacattgctgaggtggatcacagtgaaggatgcttccgtcagggcaccccggagatgtcgagaagcagtctggtgtagagatggacagcctctacttccatcagatatatgtggctttgagaggcaactttgcccctgtctgtctgatttgctgaactttctcagtcctgattttaaaacagttaagagagtccttgtgaggattaagtgagacagtgcctatgaaacaaacactaagtgcagtgtctctggaactgccttactcacaggcttccaccacagccctatgagagctttgccaactctgcggtccatgactgttcccacttttaatgaatcctacctttcgcagaaggctgaaagcagggcagaaaagatctacatttctttggacactgcacttgatagggactcaaagaatgttatatttttaattaatttctttttctcttccgtacaatttctgtctcaacaaaattagaagaattaaatttaaaactagctccaaaagagcagtcgtctttcattttggcagaccttagaatatccccctagcttaataaatctttgttgaatggcttaatgaatgaataaactggttaatgtttaagttaaacctctgaaaagtctccatttaccagatttgagtcactaaatttattgctttcactacttttgaattttgcaaacatgaaattaagttttataattagataaatcaatgtcaacacatatttaaagtttgaggtacactgtcttcctgtggtttcctttcacatgccatcccttaaaatcccagctacacgccttcccattccttcccctttgcctttgttctaatcttccctctctgggggctctctaattcgtcctggaagtttccagtggtcttatagactccatgttcttggaggacaggctgtatgtcagatttaccttttattccgaagaactcggagcatttattttgttaattaaattgcacatatttttaaaagttacgtgttccacagaataaaatactaattgtaaa

SEQ ID NO: 151772 - DNA, 1639 bp, Homo sapiens
  Payload ID: 9873
  Gene Symbol: MRGPRX3
  Gene Name: MAS-related GPR, member X3
  Uniprot ID: Q96LB0
  ENST ID: ENST00000396275
  CDS Start-End: 362-1330
gcccagtctggaaagtgaggagcgtctttgcccggccgccatcccatctaggaagtgaggagcgcctcttcccggccgccatcccatctaggaagtgaggagcgtctctgcccggccgcccatcgtctgagatgtggggagtgcctttgccccgccgccccgtctgggatgtgaggagcgcctctgcccggtcgcgaccccgtctgggagctcctgtaggcatctcctgaattaagcaacacagaaaagtcctctgaagtcactgaatcccataaaggctctctacctttagcacaagggaggtcttcaccactggacaaagaaggaacgataaggggtcatcagactggggtttctgagcatggattcaaccatcccagtcttgggtacagaactgacaccaatcaacggacgtgaggagactccttgctacaagcagaccctgagcttcacggggctgacgtgcatcgtttcccttgtcgcgctgacaggaaacgcggttgtgctctggctcctgggctgccgcatgcgcaggaacgctgtctccatctacatcctcaacctggtcgcggccgacttcctcttccttagcggccacattatatgttcgccgttacgcctcatcaatatccgccatcccatctccaaaatcctcagtcctgtgatgacctttccctactttataggcctaagcatgctgagcgccatcagcaccgagcgctgcctgtccatcctgtggcccatctggtaccactgccgccgccccagatacctgtcatcagtcatgtgtgtcctgctctgggccctgtccctgctgcggagtatcctggagtggatgttctgtgacttcctgtttagtggtgctaattctgtttggtgtgaaacgtcagatttcattacaatcgcgtggctggtttttttatgtgtggttctctgtgggtccagcctggtcctgctggtcaggattctctgtggatcccggaagatgccgctgaccaggctgtacgtgaccatcctcctcacagtgctggtcttcctcctctgtggcctgccctttggcattcagtgggccctgttttccaggatccacctggattggaaagtcttattttgtcatgtgcatctagtttccattttcctgtccgctcttaacagcagtgccaaccccatcatttacttcttcgtgggctcctttaggcagcgtcaaaataggcagaacctgaagctggttctccagagggctctgcaggacacgcctgaggtggatgaaggtggagggtggcttcctcaggaaaccctggagctgtcgggaagcagattggagcagtgaggaagaacctctgccctgtcagacaggactttgagagcaatgctgccctgccacccttgacaattatatgcatttttcttagccttctgcctcagaaatgtctcagtggtccctcaaggtcttcgaatagatgtttatctaacctgacagttgcagttttcacccatggaaagcattagtctgacagtacaatgtttggattctccttgatattaccaatacattttccctgttatcttgcactgaatctttcctactgaacactttttctgcacttttcattgtaataaaaggagttgctgtccacaa

SEQ ID NO: 151773 - DNA, 991 bp, Homo sapiens
  Payload ID: 9873
  Gene Symbol: MRGPRX3
  Gene Name: MAS-related GPR, member X3
  ENST ID: ENST00000531264
  CDS Start-End: 254-991
aaatacctctggcctctgatttgcccatagtcctcatacaggaaataacaagactgtccagcatcttcgtaagcctggattgctcaccagctttcatttcagctcctgtaggcatctcctgaattaagcaacacagaaaagtcctctgaagtcactgaatcccataaaggctctctacctttagcacaagggaggtcttcaccactggacaaagaaggaacgataaggggtcatcagactggggtttctgagcatggattcaaccatcccagtcttgggtacagaactgacaccaatcaacggacgtgaggagactccttgctacaagcagaccctgagcttcacggggctgacgtgcatcgtttcccttgtcgcgctgacaggaaacgcggttgtgctctggctcctgggctgccgcatgcgcaggaacgctgtctccatctacatcctcaacctggtcgcggccgacttcctcttccttagcggccacattatatgttcgccgttacgcctcatcaatatccgccatcccatctccaaaatcctcagtcctgtgatgacctttccctactttataggcctaagcatgctgagcgccatcagcaccgagcgctgcctgtccatcctgtggcccatctggtaccactgccgccgccccagatacctgtcatcagtcatgtgtgtcctgctctgggccctgtccctgctgcggagtatcctggagtggatgttctgtgacttcctgtttagtggtgctaattctgtttggtgtgaaacgtcagatttcattacaatcgcgtggctggtttttttatgtgtggttctctgtgggtccagcctggtcctgctggtcaggattctctgtggatcccggaagatgccgctgaccaggctgtacgtgaccatcctcctcacagtgctggtcttcctcctctgtggcctgccctttggcattcagtgggccctgttttccaggatccacctggattgg

SEQ ID NO: 151774 - DNA, 1429 bp, Homo sapiens
  Payload ID: 9873
  Gene Symbol: MRGPRX3
  Gene Name: MAS-related GPR, member X3
  Uniprot ID: Q96LB0
  ENST ID: ENST00000621697
  CDS Start-End: 154-1122
agctcctgtaggcatctcctgaattaagcaacacagaaaagtcctctgaagtcactgaatcccataaaggctctctacctttagcacaagggaggtcttcaccactggacaaagaaggaacgataaggggtcatcagactggggtttctgagcatggattcaaccatcccagtcttgggtacagaactgacaccaatcaacggacgtgaggagactccttgctacaagcagaccctgagcttcacggggctgacgtgcatcgtttcccttgtcgcgctgacaggaaacgcggttgtgctctggctcctgggctgccgcatgcgcaggaacgctgtctccatctacatcctcaacctggtcgcggccgacttcctcttccttagcggccacattatatgttcgccgttacgcctcatcaatatccgccatcccatctccaaaatcctcagtcctgtgatgacctttccctactttataggcctaagcatgctgagcgccatcagcaccgagcgctgcctgtccatcctgtggcccatctggtaccactgccgccgccccagatacctgtcatcagtcatgtgtgtcctgctctgggccctgtccctgctgcggagtatcctggagtggatgttctgtgacttcctgtttagtggtgctaattctgtttggtgtgaaacgtcagatttcattacaatcgcgtggctggtttttttatgtgtggttctctgtgggtccagcctggtcctgctggtcaggattctctgtggatcccggaagatgccgctgaccaggctgtacgtgaccatcctcctcacagtgctggtcttcctcctctgtggcctgccctttggcattcagtgggccctgttttccaggatccacctggattggaaagtcttattttgtcatgtgcatctagtttccattttcctgtccgctcttaacagcagtgccaaccccatcatttacttcttcgtgggctcctttaggcagcgtcaaaataggcagaacctgaagctggttctccagagggctctgcaggacacgcctgaggtggatgaaggtggagggtggcttcctcaggaaaccctggagctgtcgggaagcagattggagcagtgaggaagaacctctgccctgtcagacaggactttgagagcaatgctgccctgccacccttgacaattatatgcatttttcttagccttctgcctcagaaatgtctcagtggtccctcaaggtcttcgaatagatgtttatctaacctgacagttgcagttttcacccatggaaagcattagtctgacagtacaatgtttggattctccttgatattaccaatacattttccctgttatcttgcactgaatctttcctactgaacactttttctgcacttttcattgtaataaaaggagttgctgtccac

SEQ ID NO: 151775 - DNA, 1444 bp, Homo sapiens
  Payload ID: 9874
  Gene Symbol: MRGPRX4
  Gene Name: MAS-related GPR, member X4
  Uniprot ID: Q96LA9
  ENST ID: ENST00000314254
  CDS Start-End: 421-1389
cttcctgtccatggatgaccagtcctagtcacgagtgtgtcacaaccacctctttgtgtatctgaattcctccacctgaaagaaaatttcagacccaggatagattaatcatcgggtccaaagccctggccggatgagtgggggtgttttgatcctaatgttattcccatgtcagcacagaacttgtgtggcagtagagagatgtcaggcttcagagtcaacaagaactggatttcaaactggatttgaggacccccacctttggtaagtgacttattatctgcgagcctctgtttctctcttctttaaatgaggacagtaaatcccatacggcagggtggtggggagaatcagagatgatacagctggtgatcacatctggtttgtgttcccaggggcaccagactagggtttctgagcatggatccaaccgtcccagtcttcggtacaaaactgacaccaatcaacggacgtgaggagactccttgctacaatcagaccctgagcttcacggtgctgacgtgcatcatttcccttgtcggactgacaggaaacgcggttgtgctctggctcctgggctaccgcatgcgcaggaacgctgtctccatctacatcctcaacctggccgcagcagacttcctcttcctcagcttccagattatacgtttgccattacgcctcatcaatatcagccatctcatccgcaaaatcctcgtttctgtgatgacctttccctactttacaggcctgagtatgctgagcgccatcagcaccgagcgctgcctgtctgttctgtggcccatctggtaccgctgccgccgccccacacacctgtcagcggtcgtgtgtgtcctgctctggggcctgtccctgctgtttagtatgctggagtggaggttctgtgacttcctgtttagtggtgctgattctagttggtgtgaaacgtcagatttcatcccagtcgcgtggctgatttttttatgtgtggttctctgtgtttccagcctggtcctgctggtcaggatcctctgtggatcccggaagatgccgctgaccaggctgtacgtgaccatcctgctcacagtgctggtcttcctcctctgcggcctgcccttcggcattctgggggccctaatttacaggatgcacctgaatttggaagtcttatattgtcatgtttatctggtttgcatgtccctgtcctctctaaacagtagtgccaaccccatcatttacttcttcgtgggctcctttaggcagcgtcaaaataggcagaacctgaagctggttctccagagggctctgcaggacaagcctgaggtggataaaggtgaagggcagcttcctgaggaaagcctggagctgtcgggaagcagattggggccatgagggagagcctctgccctgtcagtcagacgggactttgagagcaacactgtcctgc

SEQ ID NO: 151776 - DNA, 969 bp, Homo sapiens
  Payload ID: 9874
  Gene Symbol: MRGPRX4
  Gene Name: MAS-related GPR, member X4
  ENST ID: ENST00000618161
  CDS Start-End: 1-969
atggatccaaccgtcccagtcttcggtacaaaactgacaccaatcaacggacgtgaggagactccttgctacaatcagaccctgagcttcacggtgctgacgtgcatcatttcccttgtcggactgacaggaaacgcggttgtgctctggctcctgggctaccgcatgcgcaggaacgctgtctccatctacatcctcaacctggccgcagcagacttcctcttcctcagcttccagattatacgtttgccattacgcctcatcaatatcagccatctcatccgcaaaatcctcgtttctgtgatgacctttccctactttacaggcctgagtatgctgagcgccatcagcaccgagcgctgcctgtctgttctgtggcccatctggtaccgctgccgccgccccacacacctgtcagcggtcgtgtgtgtcctgctctggggcctgtccctgctgtttagtatgctggagtggaggttctgtgacttcctgtttagtggtgctgattctagttggtgtgaaacgtcagatttcatcccagtcgcgtggctgatttttttatgtgtggttctctgtgtttccagcctggtcctgctggtcaggatcctctgtggatcccggaagatgccgctgaccaggctgtacgtgaccatcctgctcacagtgctggtcttcctcctctgcggcctgcccttcggcattctgggggccctaatttacaggatgcacctgaatttggaagtcttatattgtcatgtgcaaccagtttcagatgtcctgtcctctcttaacagcagtgccaaccccatcatttacttcttcatgggctcctttaggcagcgtcaaaattggcagaacctgaagctggttctccagaaggctctgcaggacacacctgaggtggatgaaggtggagggcggcttcctcaggaaaccctggagatgtcgggaagcagattggagcagtga

SEQ ID NO: 151777 - DNA, 631 bp, Homo sapiens
  Payload ID: 9875
  Gene Symbol: MILR1
  Gene Name: mast cell immunoglobulin-like receptor 1
  ENST ID: ENST00000605096
  CDS Start-End: 1-269
gaaaagctatgagaaataatgtgcccagggaccgtggagacacagccatggaagttggaatctatgcaaatatccttgaaaaacaagcaaaggaggaatctgtgccagaagtgggatccaggccgtgtgtttccacagcccaagatgaggccaaacactcccaggagctacagtatgccacccccgtgttccaggaggtggcaccaagagagcaagaagcctgtgattcttataaatctggatatgtctattctgaactcaacttctgaaatttacagaaacaaactacatctcaggatggagtctcactctgttgcccaggctggagttcagtagcgcgatcttggctcacttcaatctccatcttcccagttcaagcgattctcatgcctcgacctcccgagtagctgggattacaggtgcccgctaccacgcccagctaatttttgtatttttagtagagatggggtttcactatggtggccaggctggtcttgaactcctgacctcagatgatctgcctgcctcggcctcccaaagtgctggaactacaagcctgagccaccgtgcccggccctgaatcgctttagtaaataaagggtctccaagaataaattcatccgaacatgca

SEQ ID NO: 151778 - DNA, 762 bp, Homo sapiens
  Payload ID: 9875
  Gene Symbol: MILR1
  Gene Name: mast cell immunoglobulin-like receptor 1
  Uniprot ID: Q7Z6M3
  ENST ID: ENST00000612535
  CDS Start-End: 1-762
atgtggagccatttgaacaggctcctcttctggagcatattttcttctgtcacttgtagaaaagctgtattggattgtgaggcaatgaaaacaaatgacccggtgacttccccagtgctgaacattatggtcattcaaacagaaacagaccgacatataacattacattgcctctcagtcaatggctcgctgcccatcaattacactttctttgaaaaccatgttgccatatcaccagctatttccaagtatgacagggagcctgctgaatttaacttaaccaagaagaatcctggagaagaggaagagtataggtgtgaagctaaaaacagattgcctaactatgcaacatacagtcaccctgtcaccatgccctcaacaggcggagacagctgtcctttctgtctgaagctactacttccagggttattactgttgctggtggtgataatcctaattctggctttttgggtactgcccaaatacaaaacaagaaaagctatgagaaataatgtgcccagggaccgtggagacacagccatggaagttggaatctatgcaaatatccttgaaaaacaagcaaaggaggaatctgtgccagaagtgggatccaggccgtgtgtttccacagcccaagatgaggccaaacactcccaggagctacagtatgccacccccgtgttccaggaggtggcaccaagagagcaagaagcctgtgattcttataaatctggatatgtctattctgaactcaacttctga

SEQ ID NO: 151779 - DNA, 599 bp, Homo sapiens
  Payload ID: 9875
  Gene Symbol: MILR1
  Gene Name: mast cell immunoglobulin-like receptor 1
  ENST ID: ENST00000617071
  CDS Start-End: 40-599
ctatgccttctgaccccgtcttggacttcaactgggagaatgtggagccatttgaacaggctcctcttctggagcatattttcttctgtcacttgtagaaaagctgtattggattgtgaggcaatgaaaacaaatgaattcccttctccatgtttggactcaaagactaaggtggttatgaagggtcaaaatgtatctatgttttgttcccataagaacaaatcactgcagatcacctattcattgtttcgacgtaagacacacctgggaacccaggatggaaaaggtgaacctgcgatttttaacctaagcatcacagaagcccatgaatcaggcccctacaaatgcaaagcccaagttaccagctgttcaaaatacagtcgtgacttcagcttcacgattgtcgacccggtgacttccccagtgctgaacattatggtcattcaaacagaaacagaccgacatataacattacattgcctctcagtcaatggctcgctgcccatcaattacactttctttgaaaaccatgttgccatatcaccagctatttccaagtatgacagggagcctgctgaatttaacttaaccaagaagaa

SEQ ID NO: 151780 - DNA, 1196 bp, Homo sapiens
  Payload ID: 9875
  Gene Symbol: MILR1
  Gene Name: mast cell immunoglobulin-like receptor 1
  Uniprot ID: Q7Z6M3
  ENST ID: ENST00000615220
  CDS Start-End: 133-1164
agtattatgcaaacctcatccaaaccctctgatttccttaacttggctaagaaaaagaggaagttctccgagttactcaccactgtggttctactatgccttctgaccccgtcttggacttcaactgggagaatgtggagccatttgaacaggctcctcttctggagcatattttcttctgtcacttgtagaaaagctgtattggattgtgaggcaatgaaaacaaatgaattcccttctccatgtttggactcaaagactaaggtggttatgaagggtcaaaatgtatctatgttttgttcccataagaacaaatcactgcagatcacctattcattgtttcgacgtaagacacacctgggaacccaggatggaaaaggtgaacctgcgatttttaacctaagcatcacagaagcccatgaatcaggcccctacaaatgcaaagcccaagttaccagctgttcaaaatacagtcgtgacttcagcttcacgattgtcgacccggtgacttccccagtgctgaacattatggtcattcaaacagaaacagaccgacatataacattacattgcctctcagtcaatggctcgctgcccatcaattacactttctttgaaaaccatgttgccatatcaccagctatttccaagtatgacagggagcctgctgaatttaacttaaccaagaagaatcctggagaagaggaagagtataggtgtgaagctaaaaacagattgcctaactatgcaacatacagtcaccctgtcaccatgccctcaacaggcggagacagctgtcctttctgtctgaagctactacttccagggttattactgttgctggtggtgataatcctaattctggctttttgggtactgcccaaatacaaaacaagaaaagctatgagaaataatgtgcccagggaccgtggagacacagccatggaagttggaatctatgcaaatatccttgaaaaacaagcaaaggaggaatctgtgccagaagtgggatccaggccgtgtgtttccacagcccaagatgaggccaaacactcccaggagctacagtatgccacccccgtgttccaggaggtggcaccaagagagcaagaagcctgtgattcttataaatctggatatgtctattctgaactcaacttctgaaatttacagaaacaaactacatctcagggtaa

SEQ ID NO: 151781 - DNA, 747 bp, Homo sapiens
  Payload ID: 9875
  Gene Symbol: MILR1
  Gene Name: mast cell immunoglobulin-like receptor 1
  Uniprot ID: Q7Z6M3
  ENST ID: ENST00000616498
  CDS Start-End: 1-747
atgtggagccatttgaacaggctcctcttctggagcatattttcttctgtcacttgtagaaaagctgtattggattgtgaggcaatgaaaacaaatgaattcccttctccatgtttggactcaaagactaaggtggttatgaagggtcaaaatgtatctatgttttgttcccataagaacaaatcactgcagatcacctattcattgtttcgacgtaagacacacctgggaacccaggatggaaaaggtgaacctgcgatttttaacctaagcatcacagaagcccatgaatcaggcccctacaaatgcaaagcccaagttaccagctgttcaaaatacagtcgtgacttcagcttcacgattgtcggcggagacagctgtcctttctgtctgaagctactacttccagggttattactgttgctggtggtgataatcctaattctggctttttgggtactgcccaaatacaaaacaagaaaagctatgagaaataatgtgcccagggaccgtggagacacagccatggaagttggaatctatgcaaatatccttgaaaaacaagcaaaggaggaatctgtgccagaagtgggatccaggccgtgtgtttccacagcccaagatgaggccaaacactcccaggagctacagtatgccacccccgtgttccaggaggtggcaccaagagagcaagaagcctgtgattcttataaatctggatatgtctattctgaactcaacttctga

SEQ ID NO: 151782 - DNA, 1447 bp, Homo sapiens
  Payload ID: 9875
  Gene Symbol: MILR1
  Gene Name: mast cell immunoglobulin-like receptor 1
  Uniprot ID: Q7Z6M3
  ENST ID: ENST00000619286
  CDS Start-End: 55-1086
accactgtggttctactatgccttctgaccccgtcttggacttcaactgggagaatgtggagccatttgaacaggctcctcttctggagcatattttcttctgtcacttgtagaaaagctgtattggattgtgaggcaatgaaaacaaatgaattcccttctccatgtttggactcaaagactaaggtggttatgaagggtcaaaatgtatctatgttttgttcccataagaacaaatcactgcagatcacctattcattgtttcgacgtaagacacacctgggaacccaggatggaaaaggtgaacctgcgatttttaacctaagcatcacagaagcccatgaatcaggcccctacaaatgcaaagcccaagttaccagctgttcaaaatacagtcgtgacttcagcttcacgattgtcgacccggtgacttccccagtgctgaacattatggtcattcaaacagaaacagaccgacatataacattacattgcctctcagtcaatggctcgctgcccatcaattacactttctttgaaaaccatgttgccatatcaccagctatttccaagtatgacagggagcctgctgaatttaacttaaccaagaagaatcctggagaagaggaagagtataggtgtgaagctaaaaacagattgcctaactatgcaacatacagtcaccctgtcaccatgccctcaacaggcggagacagctgtcctttctgtctgaagctactacttccagggttattactgttgctggtggtgataatcctaattctggctttttgggtactgcccaaatacaaaacaagaaaagctatgagaaataatgtgcccagggaccgtggagacacagccatggaagttggaatctatgcaaatatccttgaaaaacaagcaaaggaggaatctgtgccagaagtgggatccaggccgtgtgtttccacagcccaagatgaggccaaacactcccaggagctacagtatgccacccccgtgttccaggaggtggcaccaagagagcaagaagcctgtgattcttataaatctggatatgtctattctgaactcaacttctgaaatttacagaaacaaactacatctcaggatggagtctcactctgttgcccaggctggagttcagtagcgcgatcttggctcacttcaatctccatcttcccagttcaagcgattctcatgcctcgacctcccgagtagctgggattacaggtgcccgctaccacgcccagctaatttttgtatttttagtagagatggggtttcactatggtggccaggctggtcttgaactcctgacctcagatgatctgcctgcctcggcctcccaaagtgctggaactacaagcctgagccaccgtgcccggccctgaatcgctttagtaaataaagggtctccaagaataaattcatccgaacatgc

SEQ ID NO: 151783 - DNA, 587 bp, Homo sapiens
  Payload ID: 9875
  Gene Symbol: MILR1
  Gene Name: mast cell immunoglobulin-like receptor 1
  ENST ID: ENST00000620304
  CDS Start-End: 1-269
gaaaagctatgagaaataatgtgcccagggaccgtggagacacagccatggaagttggaatctatgcaaatatccttgaaaaacaagcaaaggaggaatctgtgccagaagtgggatccaggccgtgtgtttccacagcccaagatgaggccaaacactcccaggagctacagtatgccacccccgtgttccaggaggtggcaccaagagagcaagaagcctgtgattcttataaatctggatatgtctattctgaactcaacttctgaaatttacagaaacaaactacatctcagggtaagatgctttttatgaagctgatttccatgaacaaaaagcaaacttgaggctgaggcaggtggattacttgaggtcaggagttcgagaccagcctggccaacatggcaaaaaccccatctctactaaaaatacaaaaattagccaggtgtggtggtgtgtgtgtgtagtcccagctactcgggaggctgaggcaggagaatcacttgagcccgggaggcagaggttgcagtgagccaagatcgtgccactgcactacagcctgggcgacaagagcaagacttcatctc

SEQ ID NO: 151784 - DNA, 1730 bp, Homo sapiens
  Payload ID: 9876
  Gene Symbol: MCEMP1
  Gene Name: mast cell-expressed membrane protein 1
  Uniprot ID: Q8IX19
  ENST ID: ENST00000333598
  CDS Start-End: 455-1018
ggggtggagctgaggggtggagctgaggctggagggaggaaggtgtggggggacccaggggtcctgtctccaagcctggttgctcttacgcgaaaagttgggacactgaggtgtcacagcttctcttttgaaatggagaggaggtaggagggtgaggtccatccaggtagacacagacacacacagagaccacagcttcctgtaacatttccgagtgtcgaattccatctcccggtctagaggtttttcttcttggtccttcctgagacctcttggctcccaagagcctcttgatcggggcaggaatgagggtgccccagggtgcgagagtcgtggatccctgaaaagaggaggctgctccccctctttcttccccccacctccagatttcctcatctgcccacaccttccggtgggcggggacgtgtatggacaaatttgcgggctggggaccatggaagtggaggaaatctacaagcaccaggaagtcaagatgcaagcaccagccttcagggacaagaaacagggggtctcagccaagaatcaaggtgcccatgacccagactatgagaatatcaccttggccttcaaaaatcaggaccatgcaaagggtggtcattcacgacccacgagccaagtcccagcccagtgcaggccgccctcagactccacccaggtcccctgctggttgtacagagccatcctgagcctgtacatcctcctggccctggcctttgtcctctgcatcatcctgtcagccttcatcatggtgaagaatgctgagatgtccaaggagctgctgggctttaaaagggagctttggaatgtctcaaactccgtacaagcatgcgaagagagacagaagagaggctgggattccgttcagcagagcatcaccatggtcaggagcaagattgatagattagagacgacattagcaggcataaaaaacattgacacaaaggtacagaaaatcttggaggtgctgcagaaaatgccacagtcctcacctcaataaatgagaggacattgtggcagccaaagccacaacttggaagatggggctgcacctgccaacgaagacgggaaatgaccccccccccccagcctagtgtgaacctgcccctcgtcccacgtatagaaaaacctcgagtcatggtgaatgagtgtctcggagttgctcgtgtgtgtgtacacctgcgtgcgtgtgtgtgcgtgtgtgcgcgtgtgttcgtgtatgtgcgtgtgtgcgtgcgcgtgtgtgtgcattttgcaaagggtggacatttcagtgtatctcccagaaaggtgatgaatgaataggactgagagtcacagtgaatgtggcatgcatgcctgtgtcatgtgacatatgtgagtctcggcatgtcacggtgggtggctgtgtctgagcacctccagcagatgtcactctgagtgtgggtgttggtgacatgcattgcacgggcctgtctccctgtttgtgtaaacatactagagtatactgcggcgtgttttctgtctacccatgtcatggtgggggagatttatctccgtacatgtgggtgtcgccatgtgtgccctgtcactatctgtggctgggtgaacggctgtgtcattatgagtgtgccgagttatgccaccctgtgtgctcagggcacatgcacacagacatttatctctgcactcacattttgtgacttatgaagataaataaagtcaagggaaaa

SEQ ID NO: 151785 - DNA, 763 bp, Homo sapiens
  Payload ID: 9876
  Gene Symbol: MCEMP1
  Gene Name: mast cell-expressed membrane protein 1
  ENST ID: ENST00000597445
  CDS Start-End: 34-468
gtggaggaaatctacaagcaccaggaagtcaagatgcaagcaccagccttcagggacaagaaacagggggtctcagccaagaatcaagtcccagcccagtgcaggccgccctcagactccacccaggtcccctgctggttgtacagagccatcctgagcctgtacatcctcctggccctggcctttgtcctctgcatcatcctgtcagccttcatcatggtgaagaatgctgagatgtccaaggagctgctgggctttaaaagggagctttggaatgtctcaaactccgtacaagcatgcgaagagagacagaagagaggctgggattccgttcagcagagcatcaccatggtcaggagcaagattgatagattagagacgacattagcaggcataaaaaacattgacacaaaggtacagaaaatcttggaggtgctgcagaaaatgccacagtcctcacctcaataaatgagaggacattgtggcagccaaagccacaacttggaagatggggctgcacctgccaacgaagacgggaaatgaccccccccccccagcctagtgtgaacctgcccctcgtcccacgtatagaaaaacctcgagtcatggtgaatgagtgtctcggagttgctcgtgtgtgtgtacacctgcgtgcgtgtgtgtgcgtgtgtgcgcgtgtgttcgtgtatgtgcgtgtgtgcgtgcgcgtgtgtgtgcattttgcaaagggtggacatttcagtgtatctcccagaaaggtgat

SEQ ID NO: 151786 - DNA, 4607 bp, Homo sapiens
  Payload ID: 9877
  Gene Symbol: MAMLD1
  Gene Name: mastermind-like domain containing 1
  Uniprot ID: Q13495
  ENST ID: ENST00000262858
  CDS Start-End: 64-2388
ccctgtgtctaggtcgtttgggaaacgccttggagagtcaagaataaatttgcaggtcaaacaatggatgactggaaaagtcggcttgtaatcaagagcatgcttccccatttcgccatggtgggaaatcgtcaggagcccagaaagctccaggaatcgggaaagaagccctcgtggatggaggaagaagatttatcttttctctacaagagcagcccaggaagaaagcatcagggaactgttaagaggagacaagaagaagaccacttccagtttccagacatggctgatgggggctaccctaataaaattaagaggccttgccttgaagatgtcacccttgcaatgggcccaggtgctcatcctagtactgcttgtgcagaactgcaggtccctccattgacaataaatcctagccctgcggctatgggagtggctggccagtcattactgctggagaataaccctatgaatggcaacatcatgggctcaccatttgtagtaccacagactacagaagtgggactgaaagggcccactgttccttactatgagaaaatcaacagcgtgccggctgtagaccaggagcttcaagagctgctagaggagctcaccaaaattcaagacccttctccaaatgagctagatcttgagaagatactggggacgaagccagaagagccactggttttagatcatccccaggcaaccctaagcacaactcccaagccttcggttcagatgtcacacttggagagcctggcttccagcaaggagtttgcttctagttgcagccaagttactggcatgtcacttcagatcccatcctcctccacagggatcagctattcgattccttccaccagtaagcagatagtgtcaccgagttcttcaatggcacagtccaagagccaggtccaggccatgctccctgtcgctctgccccccttaccagtgcctcagtggcatcacgcccaccagctgaaggcgttggcagccagcaagcaggggtctgctacaaagcagcaagggcccacccccagttggtctggtctgcctcctccaggactctctccaccttaccgcccagtgccatcaccacacccaccaccgctgccactgccaccaccaccacccccattcagcccccagagcctcatggtgtcctgcatgtcgtccaataccttgtcgggtagcactctccgaggctctcccaatgccttactgtcaagcatgacgtccagcagcaatgctgccctggggcccgccatgccctatgctcctgagaagctccccagccctgctctcactcaacagccgcagttcggccctcagagctccattcttgccaacctcatgtcctctaccatcaaaacccctcaaggacacctgatgtctgctctgcctgccagcaaccctgggccgtccccaccctatcgcccagagaagctctctagcccaggcttgccacagcagtccttcaccccacagtgttccctgatccgaagcctcactcccaccagtaatcttctaagccagcaacagcagcagcagcagcagcagcagcaagcaaatgtgatctttaagcccataagcagcaactcatccaaaaccctgagcatgatcatgcagcaggggatggcaagctccagcccaggagccacggagccatttacttttggcaacaccaagcccttgtcccattttgtttctgagccgggtccccagaagatgccctccatgcctaccacctctaggcagccttccctgctccactacctgcagcagccgacaccaacgcaggcctcctcagccactgcctcctccacggccactgccaccttgcagctgcagcagcagcagcagcaacagcagcagcagcctgaccattcttcattccttctgcagcagatgatgcagcaaccccagcgttttcagcgatcagtggcctcagattccatgcctgctctgcccagacagggctgttgccatctgtttgcatggacttctgcagctagctcggtgaagccccagcatcaacacgggaactctttcactagcaggcaagatcctcagcctggagacgtgtcaccgtctaacattactcatgtagacaaagcctgcaagcttggggaagccaggcacccccaggtcagcctcgggcgacagcccccgtcctgccaggccctggggagtgagtccttcctgcccggcagctcctttgctcatgagctggcccgagtcacctcctcgtacagcacctcagaggcagcgccctggggcagctgggatccgaaggcctggaggcaggtgcccgctccactactgcctagctgcgacgccacagcaagaggaacagagatcaggtcttatggcaatgacccctgaacggcagaatgcatatatctcccaacagatgagtccatttgaagccgtccaagaacaagtcacctccaagtgtagccggatcaaggcaagccccccatctagcaagcacttgatgccacccagaactgggcttcttcagaacaatctgagtccaggaatgatcccactcaccaggcaccagagctgcgagggcatgggagtgatctcaccaactctggggaagcggcaaggaattttcacctccagcccccagtgtcccatcctctcacactcaggccagactcccctgggcagacttgactctgtctgccagcatatgcagagtcccaaggccaccccaccagaagtgcccctgcctgggttctgtcccagctccctgggcacccagtccttgagtccccaccagctcagacggcctagtgtgccaagaatgcccactgcgttcaacaatgctgcatgggtcacagcggcagcagctgtgaccacagcagtttcggggaaaacacccctcagccaagtggataatagcgttcagcagcactcaccttctggccaggcctgccttcagaggccatctgattgggaggcacaagtgcccgctgcgatgggaacacaagtgcccctggccaacaaccccagcttcagcctgctgggcagccagagcctcaggcagagcccggtacagggcccggtgcctgtagcaaacaccaccaagttcctccagcagggtatggccagctttagtcccctgagccccatacagggcatcgagccaccaagctatgtggctgctgctgccaccgctgctgctgcttctgccgttgctgccagccagttcccaggtccgttcgacagaacggatattccccctgagctgccacctgccgactttttgcgccagccccaacccccactaaatgatctgatttcgtcacctgactgcaatgaggtagatttcattgaagctctcttgaaaggctcctgtgtgagcccagatgaagactgggtgtgcaacttgaggctgatcgacgacattttggaacagcatgctgctgctcaaaatgccacagcccagaattctgggcaagtcacccaggatgctggggcactttaaatctgagcaggatgcccatagaaacccccatggtgacatcactctaggaagtggtgtcgatccatacccgcagttgtctcccgttacaatttgagtggtgttgtcagcccatgcttatccctctctctacctgtgacaaaatggaaagctggtgatttttcaagctacgtgtacatatttgaaaattttgtaaatggttttcctaaacattaatgacagaagtatttatacttcattttgtgactttgtaaataaagcgacggcttttgtttcagtagagttgtgtttactatgcattgttttgtgtttattatacaatgttacaaatatgcagaccgtgttgtttgctccagtgataccttgttaagctaggtggctgagtcgcttatggttttaatgcaatgagcaatgtggatatgaccaagagttgttgtgcaagttgacaaatgccaaatagaaaaccacttggccatttatttctatgttcactaaaaatcctattgccttgtgtgattcttaatctcttttgcgaacctttcagtctccgctagctctttcctaatgagctttacagcagaagccgttttatcgttaagtgccccacagagacactttaccaggaggctgggagagttctccagatttgggagaggcgcagagacagtgtgtgagccgagccctgtctcagcaatccacctggaggagctagagtatcctcctccctttaccattcagaccgagagaaaaagcccagcttgtgtgcaccctcgtggggttaaggcgagctgttcctggtttaaagcctttcagtatttgttttgatgtaaggctctgtggtttgggggggaacatctgtaaacattattagttgatttggggtttgtctttgatggtttctatctgcaattatcgtcatgtatatttaagtgtctgttatagaaaacccacacccactgtcctgtaaacttttctcagtgtccagactttctgtaatcacattttaattgccacctcgtatttcacctctacatttgaaatctggcgtctgtttcaagccagtgtgttttttcttcgttctgtaataaacagccaggagaaaagtgcc

SEQ ID NO: 151787 - DNA, 591 bp, Homo sapiens
  Payload ID: 9877
  Gene Symbol: MAMLD1
  Gene Name: mastermind-like domain containing 1
  ENST ID: ENST00000358892
  CDS Start-End: 183-591
aatcaagcctgggcaatggcgggcgcccctcccccagcctcgctgctgccttgcagtttgatctgactgctgtgctagcaatcagcgagactccgtgggcgtaggaccctccgagccagccctgtgtctaggtcgtttgggaaacgccttggagagtcaagaataaatttgcaggtcaaacaatggatgactggaaaagtcggcttgtaatcaagagcatgcttccccatttcgccatggtgggaaatcgtcaggagcccagaaagctccaggaatcgggaaagaagccctcgtggatggaggaagaagatttatcttttctctacaagagcagcccaggaagaaagcatcagggaactgttaagaggagacaagaagaagaccacttccagtttccagacatggctgatgggggctaccctaataaaattaagaggccttgccttgaagatgtcacccttgcaatgggcccaggtgctcatcctagtactgcttgtgcagaactgcaggtccctccattgacaataaatcctagccctgcggctatgggagtggctggccagtcattactgctggagaataaccctatga

SEQ ID NO: 151788 - DNA, 4854 bp, Homo sapiens
  Payload ID: 9877
  Gene Symbol: MAMLD1
  Gene Name: mastermind-like domain containing 1
  Uniprot ID: Q13495
  ENST ID: ENST00000370401
  CDS Start-End: 311-2635
ggcgcggagccgggcggtgggaatggagcgagcagattgaggccgccactgcagcgccgccagcatgaacttggccgcgagctgaagcggccggcggcgggcgggcgcgggggcaccggccgctagccagggggtgatctgcaacagggctgggttccttggcggccgcctgagtccaggctgcccgcgccggcggccgcccgcccctcggacactgcccccgccgccgccggagctctgcagcacgccctgtgtctaggtcgtttgggaaacgccttggagagtcaagaataaatttgcaggtcaaacaatggatgactggaaaagtcggcttgtaatcaagagcatgcttccccatttcgccatggtgggaaatcgtcaggagcccagaaagctccaggaatcgggaaagaagccctcgtggatggaggaagaagatttatcttttctctacaagagcagcccaggaagaaagcatcagggaactgttaagaggagacaagaagaagaccacttccagtttccagacatggctgatgggggctaccctaataaaattaagaggccttgccttgaagatgtcacccttgcaatgggcccaggtgctcatcctagtactgcttgtgcagaactgcaggtccctccattgacaataaatcctagccctgcggctatgggagtggctggccagtcattactgctggagaataaccctatgaatggcaacatcatgggctcaccatttgtagtaccacagactacagaagtgggactgaaagggcccactgttccttactatgagaaaatcaacagcgtgccggctgtagaccaggagcttcaagagctgctagaggagctcaccaaaattcaagacccttctccaaatgagctagatcttgagaagatactggggacgaagccagaagagccactggttttagatcatccccaggcaaccctaagcacaactcccaagccttcggttcagatgtcacacttggagagcctggcttccagcaaggagtttgcttctagttgcagccaagttactggcatgtcacttcagatcccatcctcctccacagggatcagctattcgattccttccaccagtaagcagatagtgtcaccgagttcttcaatggcacagtccaagagccaggtccaggccatgctccctgtcgctctgccccccttaccagtgcctcagtggcatcacgcccaccagctgaaggcgttggcagccagcaagcaggggtctgctacaaagcagcaagggcccacccccagttggtctggtctgcctcctccaggactctctccaccttaccgcccagtgccatcaccacacccaccaccgctgccactgccaccaccaccacccccattcagcccccagagcctcatggtgtcctgcatgtcgtccaataccttgtcgggtagcactctccgaggctctcccaatgccttactgtcaagcatgacgtccagcagcaatgctgccctggggcccgccatgccctatgctcctgagaagctccccagccctgctctcactcaacagccgcagttcggccctcagagctccattcttgccaacctcatgtcctctaccatcaaaacccctcaaggacacctgatgtctgctctgcctgccagcaaccctgggccgtccccaccctatcgcccagagaagctctctagcccaggcttgccacagcagtccttcaccccacagtgttccctgatccgaagcctcactcccaccagtaatcttctaagccagcaacagcagcagcagcagcagcagcagcaagcaaatgtgatctttaagcccataagcagcaactcatccaaaaccctgagcatgatcatgcagcaggggatggcaagctccagcccaggagccacggagccatttacttttggcaacaccaagcccttgtcccattttgtttctgagccgggtccccagaagatgccctccatgcctaccacctctaggcagccttccctgctccactacctgcagcagccgacaccaacgcaggcctcctcagccactgcctcctccacggccactgccaccttgcagctgcagcagcagcagcagcaacagcagcagcagcctgaccattcttcattccttctgcagcagatgatgcagcaaccccagcgttttcagcgatcagtggcctcagattccatgcctgctctgcccagacagggctgttgccatctgtttgcatggacttctgcagctagctcggtgaagccccagcatcaacacgggaactctttcactagcaggcaagatcctcagcctggagacgtgtcaccgtctaacattactcatgtagacaaagcctgcaagcttggggaagccaggcacccccaggtcagcctcgggcgacagcccccgtcctgccaggccctggggagtgagtccttcctgcccggcagctcctttgctcatgagctggcccgagtcacctcctcgtacagcacctcagaggcagcgccctggggcagctgggatccgaaggcctggaggcaggtgcccgctccactactgcctagctgcgacgccacagcaagaggaacagagatcaggtcttatggcaatgacccctgaacggcagaatgcatatatctcccaacagatgagtccatttgaagccgtccaagaacaagtcacctccaagtgtagccggatcaaggcaagccccccatctagcaagcacttgatgccacccagaactgggcttcttcagaacaatctgagtccaggaatgatcccactcaccaggcaccagagctgcgagggcatgggagtgatctcaccaactctggggaagcggcaaggaattttcacctccagcccccagtgtcccatcctctcacactcaggccagactcccctgggcagacttgactctgtctgccagcatatgcagagtcccaaggccaccccaccagaagtgcccctgcctgggttctgtcccagctccctgggcacccagtccttgagtccccaccagctcagacggcctagtgtgccaagaatgcccactgcgttcaacaatgctgcatgggtcacagcggcagcagctgtgaccacagcagtttcggggaaaacacccctcagccaagtggataatagcgttcagcagcactcaccttctggccaggcctgccttcagaggccatctgattgggaggcacaagtgcccgctgcgatgggaacacaagtgcccctggccaacaaccccagcttcagcctgctgggcagccagagcctcaggcagagcccggtacagggcccggtgcctgtagcaaacaccaccaagttcctccagcagggtatggccagctttagtcccctgagccccatacagggcatcgagccaccaagctatgtggctgctgctgccaccgctgctgctgcttctgccgttgctgccagccagttcccaggtccgttcgacagaacggatattccccctgagctgccacctgccgactttttgcgccagccccaacccccactaaatgatctgatttcgtcacctgactgcaatgaggtagatttcattgaagctctcttgaaaggctcctgtgtgagcccagatgaagactgggtgtgcaacttgaggctgatcgacgacattttggaacagcatgctgctgctcaaaatgccacagcccagaattctgggcaagtcacccaggatgctggggcactttaaatctgagcaggatgcccatagaaacccccatggtgacatcactctaggaagtggtgtcgatccatacccgcagttgtctcccgttacaatttgagtggtgttgtcagcccatgcttatccctctctctacctgtgacaaaatggaaagctggtgatttttcaagctacgtgtacatatttgaaaattttgtaaatggttttcctaaacattaatgacagaagtatttatacttcattttgtgactttgtaaataaagcgacggcttttgtttcagtagagttgtgtttactatgcattgttttgtgtttattatacaatgttacaaatatgcagaccgtgttgtttgctccagtgataccttgttaagctaggtggctgagtcgcttatggttttaatgcaatgagcaatgtggatatgaccaagagttgttgtgcaagttgacaaatgccaaatagaaaaccacttggccatttatttctatgttcactaaaaatcctattgccttgtgtgattcttaatctcttttgcgaacctttcagtctccgctagctctttcctaatgagctttacagcagaagccgttttatcgttaagtgccccacagagacactttaccaggaggctgggagagttctccagatttgggagaggcgcagagacagtgtgtgagccgagccctgtctcagcaatccacctggaggagctagagtatcctcctccctttaccattcagaccgagagaaaaagcccagcttgtgtgcaccctcgtggggttaaggcgagctgttcctggtttaaagcctttcagtatttgttttgatgtaaggctctgtggtttgggggggaacatctgtaaacattattagttgatttggggtttgtctttgatggtttctatctgcaattatcgtcatgtatatttaagtgtctgttatagaaaacccacacccactgtcctgtaaacttttctcagtgtccagactttctgtaatcacattttaattgccacctcgtatttcacctctacatttgaaatctggcgtctgtttcaagccagtgtgttttttcttcgttctgtaataaacagccaggagaaaagtgcc

SEQ ID NO: 151789 - DNA, 4532 bp, Homo sapiens
  Payload ID: 9877
  Gene Symbol: MAMLD1
  Gene Name: mastermind-like domain containing 1
  Uniprot ID: Q13495
  ENST ID: ENST00000426613
  CDS Start-End: 64-2313
ccctgtgtctaggtcgtttgggaaacgccttggagagtcaagaataaatttgcaggtcaaacaatggatgactggaaaagtcggcttgtaatcaagagcatgcttccccatttcgccatggtgggaaatcgtcaggagcccagaaagctccaggaatcgggaactgttaagaggagacaagaagaagaccacttccagtttccagacatggctgatgggggctaccctaataaaattaagaggccttgccttgaagatgtcacccttgcaatgggcccaggtgctcatcctagtactgcttgtgcagaactgcaggtccctccattgacaataaatcctagccctgcggctatgggagtggctggccagtcattactgctggagaataaccctatgaatggcaacatcatgggctcaccatttgtagtaccacagactacagaagtgggactgaaagggcccactgttccttactatgagaaaatcaacagcgtgccggctgtagaccaggagcttcaagagctgctagaggagctcaccaaaattcaagacccttctccaaatgagctagatcttgagaagatactggggacgaagccagaagagccactggttttagatcatccccaggcaaccctaagcacaactcccaagccttcggttcagatgtcacacttggagagcctggcttccagcaaggagtttgcttctagttgcagccaagttactggcatgtcacttcagatcccatcctcctccacagggatcagctattcgattccttccaccagtaagcagatagtgtcaccgagttcttcaatggcacagtccaagagccaggtccaggccatgctccctgtcgctctgccccccttaccagtgcctcagtggcatcacgcccaccagctgaaggcgttggcagccagcaagcaggggtctgctacaaagcagcaagggcccacccccagttggtctggtctgcctcctccaggactctctccaccttaccgcccagtgccatcaccacacccaccaccgctgccactgccaccaccaccacccccattcagcccccagagcctcatggtgtcctgcatgtcgtccaataccttgtcgggtagcactctccgaggctctcccaatgccttactgtcaagcatgacgtccagcagcaatgctgccctggggcccgccatgccctatgctcctgagaagctccccagccctgctctcactcaacagccgcagttcggccctcagagctccattcttgccaacctcatgtcctctaccatcaaaacccctcaaggacacctgatgtctgctctgcctgccagcaaccctgggccgtccccaccctatcgcccagagaagctctctagcccaggcttgccacagcagtccttcaccccacagtgttccctgatccgaagcctcactcccaccagtaatcttctaagccagcaacagcagcagcagcagcagcagcagcaagcaaatgtgatctttaagcccataagcagcaactcatccaaaaccctgagcatgatcatgcagcaggggatggcaagctccagcccaggagccacggagccatttacttttggcaacaccaagcccttgtcccattttgtttctgagccgggtccccagaagatgccctccatgcctaccacctctaggcagccttccctgctccactacctgcagcagccgacaccaacgcaggcctcctcagccactgcctcctccacggccactgccaccttgcagctgcagcagcagcagcagcaacagcagcagcagcctgaccattcttcattccttctgcagcagatgatgcagcaaccccagcgttttcagcgatcagtggcctcagattccatgcctgctctgcccagacagggctgttgccatctgtttgcatggacttctgcagctagctcggtgaagccccagcatcaacacgggaactctttcactagcaggcaagatcctcagcctggagacgtgtcaccgtctaacattactcatgtagacaaagcctgcaagcttggggaagccaggcacccccaggtcagcctcgggcgacagcccccgtcctgccaggccctggggagtgagtccttcctgcccggcagctcctttgctcatgagctggcccgagtcacctcctcgtacagcacctcagaggcagcgccctggggcagctgggatccgaaggcctggaggcaggtgcccgctccactactgcctagctgcgacgccacagcaagaggaacagagatcaggtcttatggcaatgacccctgaacggcagaatgcatatatctcccaacagatgagtccatttgaagccgtccaagaacaagtcacctccaagtgtagccggatcaaggcaagccccccatctagcaagcacttgatgccacccagaactgggcttcttcagaacaatctgagtccaggaatgatcccactcaccaggcaccagagctgcgagggcatgggagtgatctcaccaactctggggaagcggcaaggaattttcacctccagcccccagtgtcccatcctctcacactcaggccagactcccctgggcagacttgactctgtctgccagcatatgcagagtcccaaggccaccccaccagaagtgcccctgcctgggttctgtcccagctccctgggcacccagtccttgagtccccaccagctcagacggcctagtgtgccaagaatgcccactgcgttcaacaatgctgcatgggtcacagcggcagcagctgtgaccacagcagtttcggggaaaacacccctcagccaagtggataatagcgttcagcagcactcaccttctggccaggcctgccttcagaggccatctgattgggaggcacaagtgcccgctgcgatgggaacacaagtgcccctggccaacaaccccagcttcagcctgctgggcagccagagcctcaggcagagcccggtacagggcccggtgcctgtagcaaacaccaccaagttcctccagcagggtatggccagctttagtcccctgagccccatacagggcatcgagccaccaagctatgtggctgctgctgccaccgctgctgctgcttctgccgttgctgccagccagttcccaggtccgttcgacagaacggatattccccctgagctgccacctgccgactttttgcgccagccccaacccccactaaatgatctgatttcgtcacctgactgcaatgaggtagatttcattgaagctctcttgaaaggctcctgtgtgagcccagatgaagactgggtgtgcaacttgaggctgatcgacgacattttggaacagcatgctgctgctcaaaatgccacagcccagaattctgggcaagtcacccaggatgctggggcactttaaatctgagcaggatgcccatagaaacccccatggtgacatcactctaggaagtggtgtcgatccatacccgcagttgtctcccgttacaatttgagtggtgttgtcagcccatgcttatccctctctctacctgtgacaaaatggaaagctggtgatttttcaagctacgtgtacatatttgaaaattttgtaaatggttttcctaaacattaatgacagaagtatttatacttcattttgtgactttgtaaataaagcgacggcttttgtttcagtagagttgtgtttactatgcattgttttgtgtttattatacaatgttacaaatatgcagaccgtgttgtttgctccagtgataccttgttaagctaggtggctgagtcgcttatggttttaatgcaatgagcaatgtggatatgaccaagagttgttgtgcaagttgacaaatgccaaatagaaaaccacttggccatttatttctatgttcactaaaaatcctattgccttgtgtgattcttaatctcttttgcgaacctttcagtctccgctagctctttcctaatgagctttacagcagaagccgttttatcgttaagtgccccacagagacactttaccaggaggctgggagagttctccagatttgggagaggcgcagagacagtgtgtgagccgagccctgtctcagcaatccacctggaggagctagagtatcctcctccctttaccattcagaccgagagaaaaagcccagcttgtgtgcaccctcgtggggttaaggcgagctgttcctggtttaaagcctttcagtatttgttttgatgtaaggctctgtggtttgggggggaacatctgtaaacattattagttgatttggggtttgtctttgatggtttctatctgcaattatcgtcatgtatatttaagtgtctgttatagaaaacccacacccactgtcctgtaaacttttctcagtgtccagactttctgtaatcacattttaattgccacctcgtatttcacctctacatttgaaatctggcgtctgtttcaagccagtgtgttttttcttcgttctgtaataaacagccaggagaaaagtgcc

SEQ ID NO: 151790 - DNA, 3224 bp, Homo sapiens
  Payload ID: 9877
  Gene Symbol: MAMLD1
  Gene Name: mastermind-like domain containing 1
  Uniprot ID: Q13495
  ENST ID: ENST00000432680
  CDS Start-End: 176-3172
gatctgcaacagggctgggttccttggcggccgcctgagtccaggctgcccgcgccggcggccgcccgcccctcggacactgcccccgccgccgccggagctctgcagcacgccctgtgtctaggtcgtttgggaaacgccttggagagtcaagaataaatttgcaggtcaaacaatggatgactggaaaagtcggcttgtaatcaagagcatgcttccccatttcgccatggtgggaaatcgtcaggagcccagaaagctccaggaatcgggaactgttaagaggagacaagaagaagaccacttccagtttccagacatggctgatgggggctaccctaataaaattaagaggccttgccttgaagatgtcacccttgcaatgggcccaggtgctcatcctagtactgcttgtgcagaactgcaggtccctccattgacaataaatcctagccctgcggctatgggagtggctggccagtcattactgctggagaataaccctatgaatggcaacatcatgggctcaccatttgtagtaccacagactacagaagtgggactgaaagggcccactgttccttactatgagaaaatcaacagcgtgccggctgtagaccaggagcttcaagagctgctagaggagctcaccaaaattcaagacccttctccaaatgagctagatcttgagaagatactggggacgaagccagaagagccactggttttagatcatccccaggcaaccctaagcacaactcccaagccttcggttcagatgtcacacttggagagcctggcttccagcaaggagtttgcttctagttgcagccaagttactggcatgtcacttcagatcccatcctcctccacagggatcagctattcgattccttccaccagtaagcagatagtgtcaccgagttcttcaatggcacagtccaagagccaggtccaggccatgctccctgtcgctctgccccccttaccagtgcctcagtggcatcacgcccaccagctgaaggcgttggcagccagcaagcaggggtctgctacaaagcagcaagggcccacccccagttggtctggtctgcctcctccaggactctctccaccttaccgcccagtgccatcaccacacccaccaccgctgccactgccaccaccaccacccccattcagcccccagagcctcatggtgtcctgcatgtcgtccaataccttgtcgggtagcactctccgaggctctcccaatgccttactgtcaagcatgacgtccagcagcaatgctgccctggggcccgccatgccctatgctcctgagaagctccccagccctgctctcactcaacagccgcagttcggccctcagagctccattcttgccaacctcatgtcctctaccatcaaaacccctcaaggacacctgatgtctgctctgcctgccagcaaccctgggccgtccccaccctatcgcccagagaagctctctagcccaggcttgccacagcagtccttcaccccacagtgttccctgatccgaagcctcactcccaccagtaatcttctaagccagcaacagcagcagcagcagcagcagcagcaagcaaatgtgatctttaagcccataagcagcaactcatccaaaaccctgagcatgatcatgcagcaggggatggcaagctccagcccaggagccacggagccatttacttttggcaacaccaagcccttgtcccattttgtttctgagccgggtccccagaagatgccctccatgcctaccacctctaggcagccttccctgctccactacctgcagcagccgacaccaacgcaggcctcctcagccactgcctcctccacggccactgccaccttgcagctgcagcagcagcagcagcaacagcagcagcagcctgaccattcttcattccttctgcagcagatgatgcagcaaccccagcgttttcagcgatcagtggcctcagattccatgcctgctctgcccagacagcaagaggaacagagatcaggtcttatggcaatgacccctgaacggcagaatgcatatatctcccaacagatgagtccatttgaagccgtccaagaacaagtcacctccaagtgtagccggatcaaggcaagccccccatctagcaagcacttgatgccacccagaactgggcttcttcagaacaatctgagtccaggaatgatcccactcaccaggcaccagagctgcgagggcatgggagtgatctcaccaactctggggaagcggcaaggaattttcacctccagcccccagtgtcccatcctctcacactcaggccagactcccctgggcagacttgactctgtctgccagcatatgcagagtcccaaggccaccccaccagaagtgcccctgcctgggttctgtcccagctccctgggcacccagtccttgagtccccaccagctcagacggcctagtgtgccaagaatgcccactgcgttcaacaatgctgcatgggtcacagcggcagcagctgtgaccacagcagtttcggggaaaacacccctcagccaagtggataatagcgttcagcagcactcaccttctggccaggcctgccttcagaggccatctgattgggaggcacaagtgcccgctgcgatgggaacacaagtgcccctggccaacaaccccagcttcagcctgctgggcagccagagcctcaggcagagcccggtacagggcccggtgcctgtagcaaacaccaccaagttcctccagcagggtatggccagctttagtcccctgagccccatacagggcatcgagccaccaagctatgtggctgctgctgccaccgctgctgctgcttctgccgttgctgccagccagttcccaggtccgttcgacagaacggatattccccctgagctgccacctgccgactttttgcgccagccccaacccccactaaatgatctgatttcgtcacctgactgcaatgaggtagatttcattgaagctctcttgaaaggctcctgtgtgagcccagatgaagactgggtgtgcaacttgaggctgatcgacgacattttggaacagcatgctgctgctcaaaatgccacagcccagaattctgggcaagtcacccaggatgctggggcactttaaatctgagcaggatgcccatagaaacccccatggtgacatcactctaggaagt

SEQ ID NO: 151791 - DNA, 5723 bp, Homo sapiens
  Payload ID: 9878
  Gene Symbol: MAML1
  Gene Name: mastermind-like transcriptional coactivator 1
  Uniprot ID: Q92585
  ENST ID: ENST00000292599
  CDS Start-End: 264-3314
cggccgcggcggtagcgcggaaaacaatggggccggggcggtggggagaggccgaggcttgaggtaggcagcaagcgccggctgggggtcgggccgagcggggcaggaggaaaacccgccgccgcgcgcgagcccgctccgctgccctcgggggcatggcgcggccgtgaggcggagaggggtagccgcggggagcgaagcccgcagtgccagccggccccgagaggcccggccccgggcccggcccgtgcagcccgcggcccatggtgctgcccacctgccccatggcggagttcgcgctgccgcggcacagcgcggtcatggagcgccttcgccggcgcatcgagctgtgccggcgccaccacagcacctgcgaggcccgctacgaggccgtgtcgcccgagcgcctggagctggagcgccaacacaccttcgccctgcaccagcgctgcatccaggccaaggccaagcgcgccgggaagcacaggcagccgcccgccgccacggccccggcgcccgccgccccggccccgcgcctggacgccgctgacggccccgagcacggccgcccggccacgcatcttcatgatacagttaagaggaatcttgacagcgccacttcccctcagaatggcgatcaacagaatggctacggggacctctttcctgggcataagaagactcgccgggaggcccctctgggagttgccatctcttccaatggactgcctccagcctcccccctcggtcagtctgacaagccttctggagccgacgccctgcagtccagtgggaagcactctctggggctagactctctcaacaaaaagcgtctggctgactccagccttcacttgaatggaggcagtaaccccagtgagtcatttcctctgagcctgaataaagaactgaagcaggagcctgtcgaagacctgccttgcatgatcactgggactgtcggctccatatcgcaaagcaacctcatgccagacctcaaccttaacgagcaggagtggaaggagctcatcgaggagctgaacaggtcggtgcccgatgaagacatgaaggacctgtttaatgaggacttcgaggagaagaaggacccagagtcttctggctctgccacacaaacccccttggcacaggacattaatattaagacggaattctctccagcagcctttgagcaagaacagttaggctctccacaagtgagggccgggtctgcagggcagacctttctggggccttcctctgcccctgtgagtacagattcccccagcctagggggctcccaaaccttattccacacctctggtcagccccgggcggacaatcccagtccaaacctgatgccggcatcagcccaggcccagaacgcacaaagagcccttgcaggtgtggtattgcccagtcagggcccaggaggggcctcagagctgtcctctgcccaccagctccagcagatcgctgccaagcagaagcgcgagcagatgctccagaacccacagcaggccaccccggcaccagccccgggccagatgtccacatggcagcagacggggccctcccacagttccttagatgtcccttaccccatggagaagcctgccagcccttccagctacaagcaagacttcactaactccaaactgctcatgatgcctagtgtgaataagagttcccctcggcccggaggcccctacctccagcccagccatgtgaacctgctgagtcaccagccaccgagtaacttgaatcagaactccgcgaataaccaggggtctgtgctggactacggcaatacaaaacccctttctcattacaaagcggactgtgggcaaggcagcccggggtctggccagagcaagccagccctgatggcttatcttccccagcagctgtcccatataagtcacgagcagaactccctgtttctgatgaagccaaagccaggaaatatgcctttccgatcactggttccacctggccaggagcagaacccttccagtgtccctgtgcaagcccaggctaccagtgttgggacccagccgcctgccgtgtccgtggccagctcccacaacagctccccctatctcagcagccagcaacaggccgctgtaatgaagcagcatcagttgcttttggaccaacagaaacaaagggagcagcagcaaaagcatttacagcaacagcagttccttcagaggcaacagcaccttctcgcggaacaggagaagcaacagtttcagcgccatctgacccgcccaccaccccagtaccaagacccgacacaaggcagcttcccacagcaggttggacagttcacagggtcctctgctgccgtgcccggcatgaacaccttgggtccatccaactccagctgtcctcgagtgttccctcaggctgggaatctgatgccaatgggccctggacatgcttcagtttcctctctccccacaaactcaggccaacaggaccggggtgtggctcagttccctggctcccaaaacatgcctcagagcagcctctatggcatggcttctggcataacccagatagttgcccagcccccgccacaggccaccaatggacatgcccacattccacggcagaccaacgtgggccagaacacctccgtctcagctgcctatgggcagaactctctgggaagctctggcctctcccagcagcacaataaggggaccctgaaccctggtttaacaaagccaccggtcccaagggtgtcaccagccatgggaggccagaattcctcctggcagcatcagggaatgccgaacctcagtggccagaccccagggaacagcaacgtgagtcccttcactgcagcctccagtttccacatgcagcagcaggcccacctgaaaatgtctagcccgcaattctcccaggcagtgcccaacaggcccatggctcccatgagctcagcagctgccgtggggtccttgctacccccagtgagtgcacagcagaggaccagcgcccctgccccagcaccacccccaacagcccctcagcagggcttgcctggcctgagcccagcagggcctgagctgggggccttcagccagagccctgcctcacagatgggcggtcgggcggggctgcactgcacccaggcctaccctgtgcggaccgcgggccaggagctgccttttgcctatagcgggcagccaggtggcagtgggctctctagtgtggctggacacaccgatctgatcgactccctgctgaagaacaggacttcagaggagtggatgagtgatttggacgacctgttagggtctcagtaatggaaggatttgtagtgtttttagtgttcattcatcctatatttttattctcagattcaaagaaagagcaactactttggaccaaaagcccatggcctggggagctgggcaggtagagcccaagctccaggtgaggcctggccctgggcagggtctgtggctgcgcccctcaggccagcagttgaggtccatcgggctggccccagcccatctgctggcatcagtacctggtgttgggacagcaggatagggttctaaaggtggttttctatccaaacgaccaaaaaaccaacagtaacaccagtgaaaccccacactgtcgggcttataaaaatctgtgccatcatggtgattttatccaagactgctccacttaccccagtgctggggacaagtttctgttgaaactttagatagcagaattatttgcaatttgtagcatagaaaagatttttaaatttttttacaaaaggtttttaaacagattagggtaggtgatggtttaaatcaattaagtggcattggaaacctagggtttccttttgattaagagccttttttgtttctgctctttgtcagctttcaggggagaaggaggccactggaaaattatttccctaagtgcaggctgttgactgcgtatgccaaaaagggacaggaggcatgggatagcaggtctggtgacacagctagggtcttcctagcagctcctcctcctccctcccaaggcccccaggaatcccttcctcccatgtcctggcagcaggaccccaggctacatatggaaggtagagatgtgggggtcctgtatcctggagtattatgtctccccaccttctgcagttttctctgaacatgtatgttgcccatggtgggagcgtggtcactgtgcagttgtgcacagatgtctttcctttaccgttggcctttctgtctgcctctccttcctctctgcagcccaaatggaaaacaattatttactccattggagggaaaggaagagtcttagaattcctaagggaaccttagcataaaggttttggggaaggaggccgtaggccggcccggaggaagcaattccacttggtttgacaacttctgccactcccatgtcagatgacttgcacttcttaaagagattgctttataacactaagacatcctttctaaagattcaagtggacttgactaagctgagggtccacgaaatagaatatgacatgtgagctgtttttggaaaacgaagatggagagagcacttccccgtaacgaaagcaaagtggtaagcacagggtgagacccttttacacagaatggtggagagaaaagagaatgctgaaaagtggctcagatgcagagtgttctgtggagaaactgcagccccacttctgtttccctggagtctcccaatggatcattcaggagtgtcctatgtgagaattgagccaaggaaaatactcatgcaaccagcctgagtcgcggtgaggggacgagaggttgtacacacattggtagttattttgcaccagcagtgcctttctcactgggggtacttggaccctcagatcttcttttctaatagccatttgccaccccaagtggtatgtcggccatttctccttaaaacaccttccctacctttcccatgtactcagtttagctctcaaagaaggggtgaatcataaagccagtgaaaatttcaccctctgagggagttccccaatctgaaggggaagagggtgacctcagcggcttttctcccaaaaatcggctgaaggctggttgtggatccttgttcctctcctgaccccatctggctgctgccccgtctcccacccctgtccccggggctcgctggccctgcactccgccttagtcctggggccggcgacacagtgggggctcctcacttgctgcagtgtcatagcaataaaatgtgattcttggggtccccccagggagctgcccatggctttatttatgaacctggttttcgggagtcaggggaggagatgactttgcttctgtgcacagccccgtcttccaggagccacaactcagaagaaaagggtgctcagacttttgttatacacatttgctttgtgtaaataaatgtttacaattttatatgaaagatggaataagcgctagagcttccaactgtatattttttacttttatagattttaaaactatgatcctttatatgtgtgttttgggggagctatgataagttttatggcaaacggttggtattgttaactttttattgtcatcaaaagttcataaaagtcctattaatccccatattcttctactgcccttaactctggtatacaccaaaaagaaatctttactttccttgttttatcattataaaaataaagtattttgctagtatggaaacaa

SEQ ID NO: 151792 - DNA, 7106 bp, Homo sapiens
  Payload ID: 9879
  Gene Symbol: MAML2
  Gene Name: mastermind-like transcriptional coactivator 2
  Uniprot ID: Q8IZL2
  ENST ID: ENST00000524717
  CDS Start-End: 1286-4756
ctccctctcctatcggagcacaatgaaagcctgtgtatcgccgtgactccgggcgcgagccagtgtcagcaaagcggctaacaacagacgagaaagagaaaggaaaatacaagctactttttttttccatctataaagcggagcaaatacaggagatagaaccagattgcttattgcgagtccagaccctcagatccactggccggggatggaatgtacaaaagtggacagaaaagtggctggacatgactcggtgcaatttgctggaagtttgtaagtttgaccatcgtttgtaaattactctcggaagagtttgtctctcttgatactgtattagaatagagccgggggtgaggaatagaaacgtaagcgggaaagaaaaaaatgtgttgaaggatctctctcagtggctagcgacttaagattgcttttcatttaaggctaggaaaccttagagggagtgaggattttaccggtgattggattagctgaagaaaaaagcatggtccaaaagtccaattactgacattgttaacagttgaaaagctgtctccctcttttgggagaagacaacatcctacagtaccccaaagaggagaaaacaccggagcgaaaggaaagggaggaaaaattaaaagccaaaagacagtctcccttgatttttgcacattttgaacagtgacttaaacatcttctgaaacagcactgttttgttttgttttggttttttatttaacctgaggaaaagtcaaggctgctggttacatagacatggtagaaatgtgtttctctgcagaaacatccccataaagaattgtcggaaacaactaggtgagggggagtcctctctattaatacctctctcaataccttttgctgtgtgtttctgtctcttgctggacaatccctgaattcttgatctaacccccagatcgtgtgtttacaaagtacctagtggctcttgtcagcttggtggaggaaaaaaaatccaccaactctgtccaacttctccagagctgtcaaatgcaattagagtaagttaatcagggtttgtttccaacttatcctccccccagttggtttctattctttctccccaccctctttttactaactcccctcccccacaacttctccacggctcccccacaacctctgaagacctctattcatgtggccctgaacactgagctcacattgtcaaaaacagacttgcctgcaatagccagcagtagcctctttccacctcaccatcccagaggcagcaatcattgtgtccggtaagatgggggacacagcgcccccgcaggcccccgcaggagggctagggggggcctctggggcggggctccttggagggggctcagtcaccccgagagtgcacagtgctatcgtggagcgcctccgggctcggatcgctgtctgccgccaacaccacctgagctgtgaaggacgatatgaacgaggtagggccgagagctcagaccgggaaagagaaagcaccttgcagctcctgagccttgtacagcatggccagggggcaaggaaagctggcaaacacaccaaggccaccgccactgctgccaccactacagcccctccaccgccccctgctgcccctcctgcggcctcccaagcagcagcaacagcagccccaccgcccccaccagactatcaccatcaccaccagcagcacctgctgaacagtagcaataatggtggcagtggtgggataaacggagagcagcagccgcccgcttcaaccccaggggaccagaggaactcagccctgattgcgctccagggttccttgaaaagaaaacaggtagttaacctatctcctgccaacagcaagcgacccaatggctttgtggacaactcatttcttgatatcaaaagaattcgtgttggggagaatctctctgcaggacaaggtggcctccaaataaacaatggacaaagtcagattatgtcagggaccttgcctatgagccaagcacccctgcgaaagactaacactctgccatcccatacacattctcctggcaatggcctgtttaacatgggcttaaaggaggtaaagaaggagccaggagagactctgtcttgcagtaagcacatggatggccaaatgacccaagagaatatttttcctaataggtacggagacgaccctggagaacaactgatggatcctgagctgcaggaactgttcaatgaactgaccaacatatctgtgcctcccatgagtgaccttgaactggagaacatgatcaatgccaccataaagcaggatgacccatttaacattgacttgggtcagcaaagccagaggagcacacctaggccctccttacccatggagaaaatagtgatcaaaagtgaatactcaccgggcttgactcagggcccctcaggctctcctcagctgaggcccccatcagctggccccgcattctccatggccaactctgccctctccacttcgtctccaatcccttcagtccctcagagccaggctcagcctcagacaggctccggagcaagccgggccttgccaagctggcaggaagtatcccatgcccagcagctcaaacagatagctgctaatcgtcagcagcatgcccggatgcagcagcaccagcagcagcaccagcctaccaactggtcagccttgccctcttctgctggaccatcaccaggtccatttgggcaggagaaaatccccagcccttcttttggtcagcagacattcagcccacagagctcccccatgcctggggtagctggcggcagcggccagtcgaaagtaatggctaactacatgtacaaggccggcccctcagcccagggtgggcacctagatgtcctcatgcagcaaaagcctcaggatctcagtcgaagttttattaacaacccgcacccagccatggagccccgtcagggcaacaccaagcctttgtttcattttaactcagatcaagcgaaccagcagatgccttctgttttgccttcccagaacaagccttctctcctacactacacccaacagcaacagcagcaacagcagcagcagcagcagcagcagcagcagcagcagcagcaacagcagcagcagcagcaacagcaacagcaacagcaacagcagagttcaatttcagctcaacaacagcaacagcagcagagctcaatttcagcccaacagcagcagcagcagcaacaacagcagcagcagcagcaacaacaacagcaacaacagcagcagcagcagcagcaacaaccatcttctcagcctgcccaatctctaccaagccagcctttgctaaggtcacctttgccacttcagcaaaagctcctacttcagcaaatgcagaatcagcccattgcaggaatgggataccaagtctcccaacaacagagacaggatcaacactctgtggtaggccagaacacaggccccagtccaagtcctaacccctgctcaaatccaaacactggaagtggttacatgaactcccagcaatcactgttgaatcagcaattgatgggaaagaagcagactctacagaggcagatcatggagcagaaacagcaacttcttctccagcagcagatgctggctgacgcggagaaaattgctccacaagatcagataaaccgacatttgtcaaggccacctccagattataaagaccaaagaagaaatgtgggcaatatgcaaccaactgctcagtattctggtggctcatccacaataagcttaaactctaaccaggctttggcaaacccagtttcaacacacaccattttaactcccaattccagcctcctgtctacttctcacgggacaagaatgccatcattatctacagcagttcagaatatggggatgtatggaaatctgccttgtaatcaacctaacacatacagtgtcacttcaggaatgaatcaattgacccaacagagaaacccaaagcaattgttagcaaatcaaaacaaccctatgatgccacggccacctaccttagggccaagtaataataacaatgtagccacttttggagctggatctgttggtaattcacaacaattgagaccaaatttaacccatagtatggcaagcatgccaccacagagaacatcaaacgtaatgatcacatccaacacaactgcaccaaactgggcctctcaagaaggaacaagcaaacagcaagaagccctgacgtctgcaggagtccgcttccccacaggtacacctgcagcctataccccaaatcagtcactgcaacaggcagtaggtagccagcaattttcccagagggcagtggctcctcctaaccagttaacaccagcagtgcaaatgagacccatgaaccaaatgagccaaacactaaatgggcaaaccatgggtcccctcaggggtctgaatctcagacccaatcagctaagcacacagattttgcctaatttgaatcagtcaggaacagggttgaatcagtcgaggacgggcatcaaccagccaccatccctgacgcccagcaattttccttcacccaaccaaagttccagggcttttcaaggaactgaccacagcagtgacttagcttttgacttcctcagccaacaaaatgataacatgggccctgccctaaacagtgatgctgatttcattgattctttattgaagacagagcctggtaatgatgactggatgaaagacatcaatcttgatgaaatcttggggaacaattcctaaagaagaaagggaagacaatttacaaactccaagcactaaaaggcagtatattacagaaactctgtagaggctgaactgttgatgttcaggtggactacatgaagataacatgcttaaaaatggaaagcagaaagtaactgcagtgatgaacattttggtccaaattcttgttttaaatcttacacctgaaagtaaaatattgggatcacttttccctgtctaaactccaggatacagtatccaatttatccaaacagaactgtggtgtcaatgtgtaattaattgtgtaaaatagccttcccaagtttctttttccctggaaaataaaaaaggtaatagaacttgtagtttatttaaaccccatgtcatgaggaggtactagttccaagcaacaaactccttaatttgctctaatagataggtatggtttaatctttccattgtgtcttttcatttaattttcctgaagcttgcaggatagattgaaatgttataggtttgtttggagtaaccaaacagtatgcaaattaagaaaaagccagagaacctagaaaacatccagtggattacagaatttcttccccatattcactcctcacttttacaattttcccacaatcctctacttcagtgggatgctgtgtctagtgattaaacaaaaatatagagctgtgcaatttgattttggcttccacaacgaatatctgaatccattccaaatgaaattttagatataacaaagacttgtcctaatcatactgaaatattggtgcacacctctctgcattagatttcacttttttaaaaaacccagtggacattgctataaataagatttatttggctacaaataacctgggatgttgcttattatgattgatgcctgctggtttgttcccaagctgagtgaaattgaacctcgtcctccctactcattttgatgactgaggctggtttataagaaaaggaagtttggagaagaaaaccgagattagaaaatatcatgttttggttggagataagaaccagggatggcaagtaccagtgtgtacaaatgtatttcacggagtttgaaggaacgcataatcaagagggaaaacaatttgtccttcattggacgtattatttggatttgggtgagcaacaaaatggaatgtggtctgttaggagcattctgtttgttcttttgtccctgatgtgatgaatcattgccacatgctagatggactcttcatatccaggttttgtccctcagggctgagcactgtattaaagagtttttgttgagtcatttaaccttagtgtccacatccagatcagctgtaaaatggggaagacgtgtgctgatttggaatgaatgcaaaatatcactatcattttcctaattacagaggagcaaaggttatcttcagccctttcagttctatgctcacatattcaaatatcaaatgtaatttagctgaagttatttaataatcaagtctttcaatatctgttcaaagaaaaagaacacactttgaaaattctgcaaagctgtctcccagtctttaaaatgtctggaagcactctccttctttacaataccaacatcactggcccagaatcttccctgtgctagtttgtaaatataaataaattacttgttttgtaaacttttgtaaagaatattttggtagaaatacttcaaacatattctttgggttatatttatacatatgtgaaataaatatactatcaaaaggttatattttatacaaaaagtaaattgctaccttttgtatgctaatatgcaaagttttgtataatatgatggtttatttttagctctacacttaaaccataggtggttgagtgggaacttttgaaaactatcaagaggcttgttagacaaatttatattctgaaacctcaataagaaagcattccaggtttcaatccttgttttttgtcctgctcccaaattcttttttaaacccatagttcttgtgtcttatttgattcttctgctgtgcacattgtattggtccttgttgcatgtagtctactgtgtgttttccgattttataaggcagcatttctccatacaaaaagaaaaaaaatgatgtacatataaacgcttttgttgtatggctcctccatgttactgtatatatctgccagcacttcccagttacactcctgtgagtcagcttatttttaccctaacataaatagtatgttttgtagtagttatcaaatttaagagataaagcaatcagaatgtttggattttcttctatcttaatgtgaatttcataattaatgtctatttattcagctattcattaaaatacaggattctttgggaaaa

SEQ ID NO: 151793 - DNA, 3154 bp, Homo sapiens
  Payload ID: 9879
  Gene Symbol: MAML2
  Gene Name: mastermind-like transcriptional coactivator 2
  ENST ID: ENST00000618849
  CDS Start-End: 1-2961
cagctccagggttccttgaaaagaaaacaggtagttaacctatctcctgccaacagcaagcgacccaatggctttgtggacaactcatttcttgatatcaaaagaattcgtgttggggagaatctctctgcaggacaaggtggcctccaaataaacaatggacaaagtcagattatgtcagggaccttgcctatgagccaagcacccctgcgaaagactaacactctgccatcccatacacattctcctggcaatggcctgtttaacatgggcttaaaggaggtaaagaaggagccaggagagactctgtcttgcagtaagcacatggatggccaaatgacccaagagaatatttttcctaataggtacggagacgaccctggagaacaactgatggatcctgagctgcaggaactgttcaatgaactgaccaacatatctgtgcctcccatgagtgaccttgaactggagaacatgatcaatgccaccataaagcaggatgacccatttaacattgacttgggtcagcaaagccagaggagcacacctaggccctccttacccatggagaaaatagtgatcaaaagtgaatactcaccgggcttgactcagggcccctcaggctctcctcagctgaggcccccatcagctggccccgcattctccatggccaactctgccctctccacttcgtctccaatcccttcagtccctcagagccaggctcagcctcagacaggctccggagcaagccgggccttgccaagctggcaggaagtatcccatgcccagcagctcaaacagatagctgctaatcgtcagcagcatgcccggatgcagcagcaccagcagcagcaccagcctaccaactggtcagccttgccctcttctgctggaccatcaccaggtccatttgggcaggagaaaatccccagcccttcttttggtcagcagacattcagcccacagagctcccccatgcctggggtagctggcggcagcggccagtcgaaagtaatggctaactacatgtacaaggccggcccctcagcccagggtgggcacctagatgtcctcatgcagcaaaagcctcaggatctcagtcgaagttttattaacaacccgcacccagccatggagccccgtcagggcaacaccaagcctttgtttcattttaactcagatcaagcgaaccagcagatgccttctgttttgccttcccagaacaagccttctctcctacactacacccaacagcaacagcagcaacagcagcagcagcagcagcagcagcagcagcagcagcagcaacagcagcagcagcagcaacagcaacagcaacagcaacagcagagttcaatttcagctcaacaacagcaacagcagcagagctcaatttcagcccaacagcagcagcagcagcaacaacagcagcagcagcagcaacaacaacagcaacaacagcagcagcagcagcagcaacaaccatcttctcagcctgcccaatctctaccaagccagcctttgctaaggtcacctttgccacttcagcaaaagctcctacttcagcaaatgcagaatcagcccattgcaggaatgggataccaagtctcccaacaacagagacaggatcaacactctgtggtaggccagaacacaggccccagtccaagtcctaacccctgctcaaatccaaacactggaagtggttacatgaactcccagcaatcactgttgaatcagcaattgatgggaaagaagcagactctacagaggcagatcatggagcagaaacagcaacttcttctccagcagcagatgctggctgacgcggagaaaattgctccacaagatcagataaaccgacatttgtcaaggccacctccagattataaagaccaaagaagaaatgtgggcaatatgcaaccaactgctcagtattctggtggctcatccacaataagcttaaactctaaccaggctttggcaaacccagtttcaacacacaccattttaactcccaattccagcctcctgtctacttctcacgggacaagaatgccatcattatctacagcagttcagaatatggggatgtatggaaatctgccttgtaatcaacctaacacatacagtgtcacttcaggaatgaatcaattgacccaacagagaaacccaaagcaattgttagcaaatcaaaacaaccctatgatgccacggccacctaccttagggccaagtaataataacaatgtagccacttttggagctggatctgttggtaattcacaacaattgagaccaaatttaacccatagtatggcaagcatgccaccacagagaacatcaaacgtaatgatcacatccaacacaactgcaccaaactgggcctctcaagaaggaacaagcaaacagcaagaagccctgacgtctgcaggagtccgcttccccacaggtacacctgcagcctataccccaaatcagtcactgcaacaggcagtaggtagccagcaattttcccagagggcagtggctcctcctaaccagttaacaccagcagtgcaaatgagacccatgaaccaaatgagccaaacactaaatgggcaaaccatgggtcccctcaggggtctgaatctcagacccaatcagctaagcacacagattttgcctaatttgaatcagtcaggaacagggttgaatcagtcgaggacgggcatcaaccagccaccatccctgacgcccagcaattttccttcacccaaccaaagttccagggcttttcaaggaactgaccacagcagtgacttagcttttgacttcctcagccaacaaaatgataacatgggccctgccctaaacagtgatgctgatttcattgattctttattgaagacagagcctggtaatgatgactggatgaaagacatcaatcttgatgaaatcttggggaacaattcctaaagaagaaagggaagacaatttacaaactccaagcactaaaaggcagtatattacagaaactctgtagaggctgaactgttgatgttcaggtggactacatgaagataacatgcttaaaaatggaaagcagaaagtaactgcagtgatgaacattttggtccaaattcttgttttaaatcttacacctgaaagt

SEQ ID NO: 151794 - DNA, 831 bp, Homo sapiens
  Payload ID: 9880
  Gene Symbol: MAML3
  Gene Name: mastermind-like transcriptional coactivator 3
  ENST ID: ENST00000398940
  CDS Start-End: 1-831
atgtctccagcagaacagctcaaacagatggctgcacagcagcaacaaagggccaaactcatgcagcagaaacagcaacagcaacagcagcagcagcagcagcagcagcaacagcactcaaatcagacttcaaattggtctcccttaggacctccctctagtccatatggagcagcttttactgcagaaaaaccaaatagcccaatgatgtacccccaagcctttaacaaccaaaaccctatagtgcctccaatggcaaacaacctgcagaagacaacaatgaataactacctccctcagaatcacatgaatatgatcaatcagcagccaaataacttgggtacaaactccttaaacaaacagcacaatattctgacttatggcaacactaaacccctgacccacttcaatgcagacctgagtcagaggatgacaccaccagtggccaaccccaacaaaaaccccttgatgccgtatatccagcagcagcaacagcagcagcaacagcaacagcagcagcagcagcagcagcagccgccacctccacagctccaggcccccagggcacacctgagcgaagaccagaaacgcctgcttctcatgaagcagaaaggagtgatgaatcagcccatggcttacgctgcacttccatcccacggtcaggtaagtgtgaaagtgacacactcttcgagcagttcttgtggtgcatttgactgtcgatgtgtgatgttctacaagtccactgtagtggggtctaattgcctgcagaaaacctctttacatcctcaggtagtggccaggtttggagtgttctttttccatttctcctaa

SEQ ID NO: 151795 - DNA, 6844 bp, Homo sapiens
  Payload ID: 9880
  Gene Symbol: MAML3
  Gene Name: mastermind-like transcriptional coactivator 3
  Uniprot ID: Q96JK9
  ENST ID: ENST00000509479
  CDS Start-End: 858-4274
actccgctggcatggaggaggaggaggaggtggaggagcgagaggaggaggaggaggcggcggcggcggcggcggcgagcagttgatcattgtgatggtggcaggagcagcggcggcagcggcagcccagccgagcgttaggtgctgctctctgcgcggcgttttgcaaaggacttcaccgatctacttttgcagtcgcctcggactgtccatgtgtttacttcccccagcccgaggattcgatatctaggttcctgtgaaatgcaactgagcagccaaagtactttgagaacacggggcggcataaacaccaaaacttttttgtggaaggaaaatgcaataagcaagcttgccgttttccgatgcggtgtggagtgagtgtgtgtcgcgcgtgtccgcactggaggcatatgcttgtgtgtgtacatggggtgtgtttttcggtatgtagggagaaaatgcttgccaaccaccggaaatctcctggaatttattagaaaataatggattataaaaagaaggcaagcaaggagcggatctccccttgagttgcaacccgatttgctgctggctcagtttgttgtgattctttttgttgataggtgtctgatggtattccgataacgttccccccttttcttccccttgagcttttacagtttaaaaaaaggaaacaaaaaccaccccaaaatctccccccccgtttttttcgccccgtcgggatcgccgtttccatccatgtgcttgcgtctcccccgcgttccacttaaactattttaatccttggacccaaggaggaggctgataggggggtggataaaaaaagttcttccaaaatagtgtgcccggggagcaggatgggggatttcgcagcccccgctgctgccgcgaatggcagtagtatttgcatcaacagtagcctgaacagcagcctcggcggggccgggatcggtgtgaataatactcccaatagtactcccgctgctccgagtagcaatcacccggcagccggtggatgcggcggctccgggggccccggcggcggttcggcggccgttcccaagcacagcaccgtggtggagcggctccgccagcgcatcgagggctgccgtcggcaccacgtcaactgcgagaacaggtaccagcaggctcaggtggagcagctggagctggagcgccgggacaccgtgagcctctaccagcggaccctggagcagagggccaagaaatcgggcgccggcaccggcaaacagcagcacccgagcaaaccccagcaagatgcggaggctgcctcggcggagcagaggaaccacacgctgatcatgctacaagagactgtgaaaaggaagttggaaggagctcgatcaccacttaatggagaccagcagaatggtgcttgtgatgggaatttttctccgactagcaaacgaattcgaaaggacatttctgcggggatggaagccatcaacaatttgcccagtaacatgccactgccttcagcttctcctcttcaccaacttgacctgaaaccttctttgcccttgcagaacagtggaactcacactcctgggcttctagaagatctaagtaagaatggtaggctccctgagattaaacttcctgtcaacggttgcagtgacctggaggatagcttcaccatcttgcagagcaaagacctcaaacaagaacctctcgatgaccctacttgcatagacacatcagaaacatctctttcaaatcagaacaagctgttctcagacattaatctgaatgatcaggagtggcaagaattaatagatgaattggccaacacggttcctgaggatgacatacaggacctgttcaacgaagactttgaagagaagaaggagccagaattctcgcagccagcaactgagacccctctctcccaggagagtgcgagcgtgaagagcgacccctctcactctcccttcgcacatgtctccatgggatctccccaggcgaggccttcttcttctggtcctcccttttctactgtctccacggccactagtttaccttctgttgccagcactcccgcagctccaaaccctgcaagctcaccagcaaactgtgctgtccagtcccctcaaactccaaaccaagcccacactccaggccaagctccacctcggcctggaaatggttatctcctgaatccggcagcagtgacagtggccggttcagcgtcagggcctgtggctgtgcccagctctgacatgtctccagcagaacagctcaaacagatggctgcacagcagcaacaaagggccaaactcatgcagcagaaacagcaacagcaacagcagcagcagcagcagcagcagcagcagcagcagcagcagcagcagcagcagcagcaacagcactcaaatcagacttcaaattggtctcccttaggacctccctctagtccatatggagcagcttttactgcagaaaaaccaaatagcccaatgatgtacccccaagcctttaacaaccaaaaccctatagtgcctccaatggcaaacaacctgcagaagacaacaatgaataactacctccctcagaatcacatgaatatgatcaatcagcagccaaataacttgggtacaaactccttaaacaaacagcacaatattctgacttatggcaacactaaacccctgacccacttcaatgcagacctgagtcagaggatgacaccaccagtggccaaccccaacaaaaaccccttgatgccgtatatccagcagcagcaacagcagcagcaacagcaacagcagcagcagcagcagcagcagccgccacctccacagctccaggcccccagggcacacctgagcgaagaccagaaacgcctgcttctcatgaagcagaaaggagtgatgaatcagcccatggcttacgctgcacttccatcccacggtcaggagcagcatccagttggacttccccgaaccacaggccccatgcagtcctccgtgcccccaggctcaggtggcatggtctcaggagccagtcccgcaggccccggcttcctgggcagccagccccaagcagccatcatgaagcagatgctcattgatcagcgggcccagttgatagagcagcagaagcaacagttcctgcgggagcaaaggcagcagcagcagcagcagcagcagcagattttggcggaacagcagttgcagcaatcacatctaccccggcagcacctccagccacagcggaatccatacccagtgcagcaggtcaatcagtttcaaggttctccccaggatatagcagccgtaagaagccaagcagccctccagagcatgcgaacgtcacggctgatggcacagaacgcaggcatgatgggaataggaccctcccagaaccctgggacgatggccaccgcagctgcgcagtcggagatgggactggccccttatagcaccacgcctaccagccaaccaggaatgtacaatatgagcacaggcatgacccaaatgttgcagcatccaaaccaaagtggcatgagcatcacacataaccaagcccagggaccgaggcaacctgcctctgggcagggggttggaatggtgagtggctttggtcagagcatgctggtgaactcagccattacccagcaacatccacagatgaaagggccagtaggccaggccttgcctaggccccaagcccctccaaggctgcagagccttatgggaacagtccagcaaggagcacaaagctggcaacagaggagcttgcagggcatgcctgggaggactagtggagaattgggaccattcaacaatggcgccagctaccctcttcaagctgggcagccgagactgaccaagcagcacttcccacagggactgagccagtcagtcgtggatgctaacacgggcacagtgaggaccctcaacccagctgccatgggtcggcagatgatgccatcgctcccggggcagcaaggcaccagccaggcgaggccaatggtcatgtctggcctgagccagggagtcccaggcatgccagcgttcagccagcccccagcacagcagcagatacccagtggcagctttgctccaagcagccagagccaagcctatgagcggaatgcccctcaggacgtgtcatacaattacagtggcgacggagctgggggttccttccctggcctcccggacggtgcagaccttgtggactccatcatcaaaggcgggccaggggacgagtggatgcaggagcttgatgaattgtttggtaacccctaatcaagagaggccccaagatccacaactcgagtggttaaagcttaaaaagtgaaaaagaaacaggatgttgacccatccttgttttttgtttttttgacccacgtaaactgagcaaaactgcagctggctgacaatggaagatccaggtgccaatccacagccccaccaggcctcatttcacctgattttcacacagcaatcgagatgagacgccatgcagatcccggctgcgagagagggagacacccggaggagcaggtgggaagatgaagccggccagagcccctctgcccagcatgccctgtgatcgcctggcccagcaggagctgcttcagccgagagggactattacccaagagaggtatcctcagcccctcctgccccaggtcgggagacagcagctttggagacacaaaagagacagagcctcagccagggagagtgagtcccccagaagaggctgggtggttgcacaggccaggtgcacaggttggaaatgcactgaactctgggtgccgagagatgtaaggctttgagacatgctactgaatttggagggcaggcacgaagaacagtgagattgtcaaaaggagacaaccacagatcctacaggactgtctgtctcctgccccatgatgaccctcaggaattgcaaaggctctgctgtcacaaggagagcaggctgagtttggagcagggtccatccggcagtcctgggacggcttccctctgctggtgcccctggtggcagtccctccaggtggggctggagcctgctggcgcccaatacaaaacccatacatccaggtgggtcacatctacttctggcggccgcagggcagggaaacccctactggaccctgtgtgtctgccagcctggagcctttgtctccagccctgcctttattcctccttgcctccacaccagcctccccttgcttctccttacagactatccaagaagtgaagcttatgtctttagggagccttgggcagagtccacataaatgcaggaagaacttagacaatgcctgaaatgcaaaggcgacactggagtcttctttctctaacgtgtagcgttgaatgaatatctgcctggaaccaagagggctgctctgatgtttgggagtcggttttttgtgagccacatctgatatttctgatatccccaggaaggagtggcctggaggtcactggttcaggctccctttgggcgaaatcctgggagtgatgctctaaaaatccacctttcccatcatccctactcatcagaaagacaaatataaaatcccagagaggtggaggagctaaaaaagcaattgctccaccttacaaatttggatagaaaggagatgtagtttatttcatatgggcaaagtagtcctcttccaaagtcctgtacagttgttctctgcaattgacgcacatctgccctaagcgaaatctgtcagaaggaatcaacaaggctccttgcctcccctcccaatcccccttttggaggacttgtggcttcggtgtcgtcctaagtgagagtggcgtgtgcttttttcctgtcccctcctccctccgtgtcctagacgctggctgccttctgtgcactcccaggcagatcactacggaagagtcggagcctgtggggttggactggccacactcagtcctgagaaggcgagttgccatggaaagctgggggcagaggtgtttttggagaggaggcggcaggcaaacattgcctttgacttgctctccgcgtacccggggttgtagagctgctcaggaaggggcaggatgtaaggccagaggtgcctggtgggtgagaagcccaggcaggggctgggcgccctctccgaagaggtggcagcagggtgaccctgaactccccaaatggggagtgatgccactggggaaactgagtggatcaaagagatgaaaccaaaaaaaagcaaacaaacaaatgagaagacacaaaacataattaccttttcctgaaaggtacaggaaataaatatataagcaatgatgagaaactggaggtggctaatggaagtgagacagacaggggtggggggctccattatcttttaaaagcttcctccaaatgctcagtactgggaccaactaataggtagattttaatatggtggttttgttttggttttgtttttactacggtgctgatgtatatgtaatgtctaaaaaaagttatttgtacataagtttttacaatactgcagatatcactgggtctactatctgtaaaaaatatacatataaatatatatatactgtttgtttaaaatagagtatttttatttcattccttaactcatcatcacagcagtggtattgcacttcagatgacatctaattactaatttgtactgtatgacctctggcaacttgctccattttattcagatttttctagttttctgtttttactttgtacattgagcattgcttatttccttttaagaaatgtacagaacgctgaaatgtagaaatgaagtgatgttgacataccacttttaaagaaaacaaaaacaaaaataaaagattatctgaatcaa

SEQ ID NO: 151796 - DNA, 559 bp, Homo sapiens
  Payload ID: 9880
  Gene Symbol: MAML3
  Gene Name: mastermind-like transcriptional coactivator 3
  ENST ID: ENST00000502696
  CDS Start-End: 1-559
agagggccaagaaatcgggcgccggcaccggcaaacagcagcacccgagcaaaccccagcaagatgcggaggctgcctcggcggagcagaggaaccacacgctgatcatggagcagcatccagttggacttccccgaaccacaggccccatgcagtcctccgtgcccccaggctcaggtggcatggtctcaggagccagtcccgcaggccccggcttcctgggcagccagccccaagcagccatcatgaagcagatgctcattgatcagcgggcccagttgatagagcagcagaagcaacagttcctgcgggagcaaaggcagcagcagcagcagcagcagcagcagattttggcggaacagcagttgcagcaatcacatctaccccggcagcacctccagccacagcggaatccatacccagtgcagcaggtcaatcagtttcaaggttctccccaggatatagcagccgtaagaagccaagcagccctccagagcatgcgaacgtcacggctgatggcacagaacgcaggcatgatgggaataggaccctcccagaa

SEQ ID NO: 151797 - DNA, 2485 bp, Homo sapiens
  Payload ID: 9881
  Gene Symbol: MELK
  Gene Name: maternal embryonic leucine zipper kinase
  Uniprot ID: Q14680
  ENST ID: ENST00000298048
  CDS Start-End: 185-2140
gagatttgattcccttggcgggcggaagcggccacaacccggcgatcgaaaagattcttaggaacgccgtaccagccgcgtctctcaggacagcaggcccctgtccttctgtcgggcgccgctcagccgtgccctccgcccctcaggttctttttctaattccaaataaacttgcaagaggactatgaaagattatgatgaacttctcaaatattatgaattacatgaaactattgggacaggtggctttgcaaaggtcaaacttgcctgccatatccttactggagagatggtagctataaaaatcatggataaaaacacactagggagtgatttgccccggatcaaaacggagattgaggccttgaagaacctgagacatcagcatatatgtcaactctaccatgtgctagagacagccaacaaaatattcatggttcttgagtactgccctggaggagagctgtttgactatataatttcccaggatcgcctgtcagaagaggagacccgggttgtcttccgtcagatagtatctgctgttgcttatgtgcacagccagggctatgctcacagggacctcaagccagaaaatttgctgtttgatgaatatcataaattaaagctgattgactttggtctctgtgcaaaacccaagggtaacaaggattaccatctacagacatgctgtgggagtctggcttatgcagcacctgagttaatacaaggcaaatcatatcttggatcagaggcagatgtttggagcatgggcatactgttatatgttcttatgtgtggatttctaccatttgatgatgataatgtaatggctttatacaagaagattatgagaggaaaatatgatgttcccaagtggctctctcccagtagcattctgcttcttcaacaaatgctgcaggtggacccaaagaaacggatttctatgaaaaatctattgaaccatccctggatcatgcaagattacaactatcctgttgagtggcaaagcaagaatccttttattcacctcgatgatgattgcgtaacagaactttctgtacatcacagaaacaacaggcaaacaatggaggatttaatttcactgtggcagtatgatcacctcacggctacctatcttctgcttctagccaagaaggctcggggaaaaccagttcgtttaaggctttcttctttctcctgtggacaagccagtgctaccccattcacagacatcaagtcaaataattggagtctggaagatgtgaccgcaagtgataaaaattatgtggcgggattaatagactatgattggtgtgaagatgatttatcaacaggtgctgctactccccgaacatcacagtttaccaagtactggacagaatcaaatggggtggaatctaaatcattaactccagccttatgcagaacacctgcaaataaattaaagaacaaagaaaatgtatatactcctaagtctgctgtaaagaatgaagagtactttatgtttcctgagccaaagactccagttaataagaaccagcataagagagaaatactcactacgccaaatcgttacactacaccctcaaaagctagaaaccagtgcctgaaagaaactccaattaaaataccagtaaattcaacaggaacagacaagttaatgacaggtgtcattagccctgagaggcggtgccgctcagtggaattggatctcaaccaagcacatatggaggagactccaaaaagaaagggagccaaagtgtttgggagccttgaaagggggttggataaggttatcactgtgctcaccaggagcaaaaggaagggttctgccagagacgggcccagaagactaaagcttcactataacgtgactacaactagattagtgaatccagatcaactgttgaatgaaataatgtctattcttccaaagaagcatgttgactttgtacaaaagggttatacactgaagtgtcaaacacagtcagattttgggaaagtgacaatgcaatttgaattagaagtgtgccagcttcaaaaacccgatgtggtgggtatcaggaggcagcggcttaagggcgatgcctgggtttacaaaagattagtggaagacatcctatctagctgcaaggtataattgatggattcttccatcctgccggatgagtgtgggtgtgatacagcctacataaagactgttatgatcgctttgattttaaagttcattggaactaccaacttgtttctaaagagctatcttaagaccaatatctctttgtttttaaacaaaagatattattttgtgtatgaatctaaatcaagcccatctgtcattatgttactgtcttttttaatcatgtggttttgtatattaataattgttgactttcttagattcacttccatatgtgaatgtaagctcttaactatgtctctttgtaatgtgtaatttctttctgaaataaaaccatttgtgaatata

SEQ ID NO: 151798 - DNA, 2363 bp, Homo sapiens
  Payload ID: 9881
  Gene Symbol: MELK
  Gene Name: maternal embryonic leucine zipper kinase
  Uniprot ID: Q14680
  ENST ID: ENST00000541717
  CDS Start-End: 185-2017
gagatttgattcccttggcgggcggaagcggccacaacccggcgatcgaaaagattcttaggaacgccgtaccagccgcgtctctcaggacagcaggcccctgtccttctgtcgggcgccgctcagccgtgccctccgcccctcaggttctttttctaattccaaataaacttgcaagaggactatgaaagattatgatgaacttctcaaatattatgaattacatgaaactattgggacaggtggctttgcaaaggtcaaacttgcctgccatatccttactggagagatggtagctataaaaatcatggataaaaacacactagggagtgatttgccccggatcaaaacggagattgaggccttgaagaacctgagacatcagcatatatgtcaactctaccatgtgctagagacagccaacaaaatattcatggttcttgagtactgccctggaggagagctgtttgactatataatttcccaggatcgcctgtcagaagaggagacccgggttgtcttccgtcagatagtatctgctgttgcttatgtgcacagccagggctatgctcacagggacctcaagccagaaaatttgctgtttgatgaatatcataaattaaagctgattgactttggtctctgtgcaaaacccaagggtaacaaggattaccatctacagacatgctgtgggagtctggcttatgcagcacctgagttaatacaaggcaaatcatatcttggatcagaggcagatgtttggagcatgggcatactgttatatgttcttatgtgtggatttctaccatttgatgatgataatgtaatggctttatacaagaagattatgagaggaaaatatgatgttcccaagtggctctctcccagtagcattctgcttcttcaacaaatgctgcaggtggacccaaagaaacggatttctatgaaaaatctattgaaccatccctggatcatgcaagattacaactatcctgttgagtggcaaagcaagaatccttttattcacctcgatgatgattgcgtaacagaactttctgtacatcacagaaacaacaggcaaacaatggaggatttaatttcactgtggcagtatgatcacctcacggctacctatcttctgcttctagccaagaaggctcggggaaaaccagttcgtttaaggctttcttctttctcctgtggacaagccagtgctaccccattcacagacatcaagtttaccaagtactggacagaatcaaatggggtggaatctaaatcattaactccagccttatgcagaacacctgcaaataaattaaagaacaaagaaaatgtatatactcctaagtctgctgtaaagaatgaagagtactttatgtttcctgagccaaagactccagttaataagaaccagcataagagagaaatactcactacgccaaatcgttacactacaccctcaaaagctagaaaccagtgcctgaaagaaactccaattaaaataccagtaaattcaacaggaacagacaagttaatgacaggtgtcattagccctgagaggcggtgccgctcagtggaattggatctcaaccaagcacatatggaggagactccaaaaagaaagggagccaaagtgtttgggagccttgaaagggggttggataaggttatcactgtgctcaccaggagcaaaaggaagggttctgccagagacgggcccagaagactaaagcttcactataacgtgactacaactagattagtgaatccagatcaactgttgaatgaaataatgtctattcttccaaagaagcatgttgactttgtacaaaagggttatacactgaagtgtcaaacacagtcagattttgggaaagtgacaatgcaatttgaattagaagtgtgccagcttcaaaaacccgatgtggtgggtatcaggaggcagcggcttaagggcgatgcctgggtttacaaaagattagtggaagacatcctatctagctgcaaggtataattgatggattcttccatcctgccggatgagtgtgggtgtgatacagcctacataaagactgttatgatcgctttgattttaaagttcattggaactaccaacttgtttctaaagagctatcttaagaccaatatctctttgtttttaaacaaaagatattattttgtgtatgaatctaaatcaagcccatctgtcattatgttactgtcttttttaatcatgtggttttgtatattaataattgttgactttcttagattcacttccatatgtgaatgtaagctcttaactatgtctctttgtaatgtgtaatttctttctgaaataaaaccatttgtgaatatag

SEQ ID NO: 151799 - DNA, 2125 bp, Homo sapiens
  Payload ID: 9881
  Gene Symbol: MELK
  Gene Name: maternal embryonic leucine zipper kinase
  Uniprot ID: Q14680
  ENST ID: ENST00000536987
  CDS Start-End: 219-1781
acaacccggcgatcgaaaagattcttaggaacgccgtaccagccgcgtctctcaggacagcaggcccctgtccttctgtcgggcgccgctcagccgtgccctccgcccctcagagtgatttgccccggatcaaaacggagattgaggccttgaagaacctgagacatcagcatatatgtcaactctaccatgtgctagagacagccaacaaaatattcatggttcttgaggaaaatttgctgtttgatgaatatcataaattaaagctgattgactttggtctctgtgcaaaacccaagggtaacaaggattaccatctacagacatgctgtgggagtctggcttatgcagcacctgagttaatacaaggcaaatcatatcttggatcagaggcagatgtttggagcatgggcatactgttatatgttcttatgtgtggatttctaccatttgatgatgataatgtaatggctttatacaagaagattatgagaggaaaatatgatgttcccaagtggctctctcccagtagcattctgcttcttcaacaaatgctgcaggtggacccaaagaaacggatttctatgaaaaatctattgaaccatccctggatcatgcaagattacaactatcctgttgagtggcaaagcaagaatccttttattcacctcgatgatgattgcgtaacagaactttctgtacatcacagaaacaacaggcaaacaatggaggatttaatttcactgtggcagtatgatcacctcacggctacctatcttctgcttctagccaagaaggctcggggaaaaccagttcgtttaaggctttcttctttctcctgtggacaagccagtgctaccccattcacagacatcaagtcaaataattggagtctggaagatgtgaccgcaagtgataaaaattatgtggcgggattaatagactatgattggtgtgaagatgatttatcaacaggtgctgctactccccgaacatcacagtttaccaagtactggacagaatcaaatggggtggaatctaaatcattaactccagccttatgcagaacacctgcaaataaattaaagaacaaagaaaatgtatatactcctaagtctgctgtaaagaatgaagagtactttatgtttcctgagccaaagactccagttaataagaaccagcataagagagaaatactcactacgccaaatcgttacactacaccctcaaaagctagaaaccagtgcctgaaagaaactccaattaaaataccagtaaattcaacaggaacagacaagttaatgacaggtgtcattagccctgagaggcggtgccgctcagtggaattggatctcaaccaagcacatatggaggagactccaaaaagaaagggagccaaagtgtttgggagccttgaaagggggttggataaggttatcactgtgctcaccaggagcaaaaggaagggttctgccagagacgggcccagaagactaaagcttcactataacgtgactacaactagattagtgaatccagatcaactgttgaatgaaataatgtctattcttccaaagaagcatgttgactttgtacaaaagggttatacactgaagtgtcaaacacagtcagattttgggaaagtgacaatgcaatttgaattagaagtgtgccagcttcaaaaacccgatgtggtgggtatcaggaggcagcggcttaagggcgatgcctgggtttacaaaagattagtggaagacatcctatctagctgcaaggtataattgatggattcttccatcctgccggatgagtgtgggtgtgatacagcctacataaagactgttatgatcgctttgattttaaagttcattggaactaccaacttgtttctaaagagctatcttaagaccaatatctctttgtttttaaacaaaagatattattttgtgtatgaatctaaatcaagcccatctgtcattatgttactgtcttttttaatcatgtggttttgtatattaataattgttgactttcttagattcacttccatatgtgaatgtaagctcttaactatgtctctttgtaatgtgtaatttctttctgaaataaaaccatttgtgaatat

SEQ ID NO: 151800 - DNA, 2342 bp, Homo sapiens
  Payload ID: 9881
  Gene Symbol: MELK
  Gene Name: maternal embryonic leucine zipper kinase
  Uniprot ID: Q14680
  ENST ID: ENST00000536860
  CDS Start-End: 185-1996
gagatttgattcccttggcgggcggaagcggccacaacccggcgatcgaaaagattcttaggaacgccgtaccagccgcgtctctcaggacagcaggcccctgtccttctgtcgggcgccgctcagccgtgccctccgcccctcaggttctttttctaattccaaataaacttgcaagaggactatgaaagattatgatgaacttctcaaatattatgaattacatgaaactattgggacaggtggctttgcaaaggtcaaacttgcctgccatatccttactggagagatggtagctataaaaatcatggataaaaacacactagggagtgatttgccccggatcaaaacggagattgaggccttgaagaacctgagacatcagcatatatgtcaactctaccatgtgctagagacagccaacaaaatattcatggttcttgaggaaaatttgctgtttgatgaatatcataaattaaagctgattgactttggtctctgtgcaaaacccaagggtaacaaggattaccatctacagacatgctgtgggagtctggcttatgcagcacctgagttaatacaaggcaaatcatatcttggatcagaggcagatgtttggagcatgggcatactgttatatgttcttatgtgtggatttctaccatttgatgatgataatgtaatggctttatacaagaagattatgagaggaaaatatgatgttcccaagtggctctctcccagtagcattctgcttcttcaacaaatgctgcaggtggacccaaagaaacggatttctatgaaaaatctattgaaccatccctggatcatgcaagattacaactatcctgttgagtggcaaagcaagaatccttttattcacctcgatgatgattgcgtaacagaactttctgtacatcacagaaacaacaggcaaacaatggaggatttaatttcactgtggcagtatgatcacctcacggctacctatcttctgcttctagccaagaaggctcggggaaaaccagttcgtttaaggctttcttctttctcctgtggacaagccagtgctaccccattcacagacatcaagtcaaataattggagtctggaagatgtgaccgcaagtgataaaaattatgtggcgggattaatagactatgattggtgtgaagatgatttatcaacaggtgctgctactccccgaacatcacagtttaccaagtactggacagaatcaaatggggtggaatctaaatcattaactccagccttatgcagaacacctgcaaataaattaaagaacaaagaaaatgtatatactcctaagtctgctgtaaagaatgaagagtactttatgtttcctgagccaaagactccagttaataagaaccagcataagagagaaatactcactacgccaaatcgttacactacaccctcaaaagctagaaaccagtgcctgaaagaaactccaattaaaataccagtaaattcaacaggaacagacaagttaatgacaggtgtcattagccctgagaggcggtgccgctcagtggaattggatctcaaccaagcacatatggaggagactccaaaaagaaagggagccaaagtgtttgggagccttgaaagggggttggataaggttatcactgtgctcaccaggagcaaaaggaagggttctgccagagacgggcccagaagactaaagcttcactataacgtgactacaactagattagtgaatccagatcaactgttgaatgaaataatgtctattcttccaaagaagcatgttgactttgtacaaaagggttatacactgaagtgtcaaacacagtcagattttgggaaagtgacaatgcaatttgaattagaagtgtgccagcttcaaaaacccgatgtggtgggtatcaggaggcagcggcttaagggcgatgcctgggtttacaaaagattagtggaagacatcctatctagctgcaaggtataattgatggattcttccatcctgccggatgagtgtgggtgtgatacagcctacataaagactgttatgatcgctttgattttaaagttcattggaactaccaacttgtttctaaagagctatcttaagaccaatatctctttgtttttaaacaaaagatattattttgtgtatgaatctaaatcaagcccatctgtcattatgttactgtcttttttaatcatgtggttttgtatattaataattgttgactttcttagattcacttccatatgtgaatgtaagctcttaactatgtctctttgtaatgtgtaatttctttctgaaataaaaccatttgtgaatatag

SEQ ID NO: 151801 - DNA, 2400 bp, Homo sapiens
  Payload ID: 9881
  Gene Symbol: MELK
  Gene Name: maternal embryonic leucine zipper kinase
  Uniprot ID: Q14680
  ENST ID: ENST00000543751
  CDS Start-End: 195-2054
gagatttgattcccttggcgggcggaagcggccacaacccggcgatcgaaaagattcttaggaacgccgtaccagccgcgtctctcaggacagcaggcccctgtccttctgtcgggcgccgctcagccgtgccctccgcccctcaggttctttttctaattccaaataaacttgcaagaggactatgaaagattatgatgaacttctcaaatattatgaattacatgaaactattgggacagagtgatttgccccggatcaaaacggagattgaggccttgaagaacctgagacatcagcatatatgtcaactctaccatgtgctagagacagccaacaaaatattcatggttcttgagtactgccctggaggagagctgtttgactatataatttcccaggatcgcctgtcagaagaggagacccgggttgtcttccgtcagatagtatctgctgttgcttatgtgcacagccagggctatgctcacagggacctcaagccagaaaatttgctgtttgatgaatatcataaattaaagctgattgactttggtctctgtgcaaaacccaagggtaacaaggattaccatctacagacatgctgtgggagtctggcttatgcagcacctgagttaatacaaggcaaatcatatcttggatcagaggcagatgtttggagcatgggcatactgttatatgttcttatgtgtggatttctaccatttgatgatgataatgtaatggctttatacaagaagattatgagaggaaaatatgatgttcccaagtggctctctcccagtagcattctgcttcttcaacaaatgctgcaggtggacccaaagaaacggatttctatgaaaaatctattgaaccatccctggatcatgcaagattacaactatcctgttgagtggcaaagcaagaatccttttattcacctcgatgatgattgcgtaacagaactttctgtacatcacagaaacaacaggcaaacaatggaggatttaatttcactgtggcagtatgatcacctcacggctacctatcttctgcttctagccaagaaggctcggggaaaaccagttcgtttaaggctttcttctttctcctgtggacaagccagtgctaccccattcacagacatcaagtcaaataattggagtctggaagatgtgaccgcaagtgataaaaattatgtggcgggattaatagactatgattggtgtgaagatgatttatcaacaggtgctgctactccccgaacatcacagtttaccaagtactggacagaatcaaatggggtggaatctaaatcattaactccagccttatgcagaacacctgcaaataaattaaagaacaaagaaaatgtatatactcctaagtctgctgtaaagaatgaagagtactttatgtttcctgagccaaagactccagttaataagaaccagcataagagagaaatactcactacgccaaatcgttacactacaccctcaaaagctagaaaccagtgcctgaaagaaactccaattaaaataccagtaaattcaacaggaacagacaagttaatgacaggtgtcattagccctgagaggcggtgccgctcagtggaattggatctcaaccaagcacatatggaggagactccaaaaagaaagggagccaaagtgtttgggagccttgaaagggggttggataaggttatcactgtgctcaccaggagcaaaaggaagggttctgccagagacgggcccagaagactaaagcttcactataacgtgactacaactagattagtgaatccagatcaactgttgaatgaaataatgtctattcttccaaagaagcatgttgactttgtacaaaagggttatacactgaagtgtcaaacacagtcagattttgggaaagtgacaatgcaatttgaattagaagtgtgccagcttcaaaaacccgatgtggtgggtatcaggaggcagcggcttaagggcgatgcctgggtttacaaaagattagtggaagacatcctatctagctgcaaggtataattgatggattcttccatcctgccggatgagtgtgggtgtgatacagcctacataaagactgttatgatcgctttgattttaaagttcattggaactaccaacttgtttctaaagagctatcttaagaccaatatctctttgtttttaaacaaaagatattattttgtgtatgaatctaaatcaagcccatctgtcattatgttactgtcttttttaatcatgtggttttgtatattaataattgttgactttcttagattcacttccatatgtgaatgtaagctcttaactatgtctctttgtaatgtgtaatttctttctgaaataaaaccatttgtgaatatag

SEQ ID NO: 151802 - DNA, 2283 bp, Homo sapiens
  Payload ID: 9881
  Gene Symbol: MELK
  Gene Name: maternal embryonic leucine zipper kinase
  Uniprot ID: Q14680
  ENST ID: ENST00000536329
  CDS Start-End: 195-1937
gagatttgattcccttggcgggcggaagcggccacaacccggcgatcgaaaagattcttaggaacgccgtaccagccgcgtctctcaggacagcaggcccctgtccttctgtcgggcgccgctcagccgtgccctccgcccctcaggttctttttctaattccaaataaacttgcaagaggactatgaaagattatgatgaacttctcaaatattatgaattacatgaaactattgggacagtactgccctggaggagagctgtttgactatataatttcccaggatcgcctgtcagaagaggagacccgggttgtcttccgtcagatagtatctgctgttgcttatgtgcacagccagggctatgctcacagggacctcaagccagaaaatttgctgtttgatgaatatcataaattaaagctgattgactttggtctctgtgcaaaacccaagggtaacaaggattaccatctacagacatgctgtgggagtctggcttatgcagcacctgagttaatacaaggcaaatcatatcttggatcagaggcagatgtttggagcatgggcatactgttatatgttcttatgtgtggatttctaccatttgatgatgataatgtaatggctttatacaagaagattatgagaggaaaatatgatgttcccaagtggctctctcccagtagcattctgcttcttcaacaaatgctgcaggtggacccaaagaaacggatttctatgaaaaatctattgaaccatccctggatcatgcaagattacaactatcctgttgagtggcaaagcaagaatccttttattcacctcgatgatgattgcgtaacagaactttctgtacatcacagaaacaacaggcaaacaatggaggatttaatttcactgtggcagtatgatcacctcacggctacctatcttctgcttctagccaagaaggctcggggaaaaccagttcgtttaaggctttcttctttctcctgtggacaagccagtgctaccccattcacagacatcaagtcaaataattggagtctggaagatgtgaccgcaagtgataaaaattatgtggcgggattaatagactatgattggtgtgaagatgatttatcaacaggtgctgctactccccgaacatcacagtttaccaagtactggacagaatcaaatggggtggaatctaaatcattaactccagccttatgcagaacacctgcaaataaattaaagaacaaagaaaatgtatatactcctaagtctgctgtaaagaatgaagagtactttatgtttcctgagccaaagactccagttaataagaaccagcataagagagaaatactcactacgccaaatcgttacactacaccctcaaaagctagaaaccagtgcctgaaagaaactccaattaaaataccagtaaattcaacaggaacagacaagttaatgacaggtgtcattagccctgagaggcggtgccgctcagtggaattggatctcaaccaagcacatatggaggagactccaaaaagaaagggagccaaagtgtttgggagccttgaaagggggttggataaggttatcactgtgctcaccaggagcaaaaggaagggttctgccagagacgggcccagaagactaaagcttcactataacgtgactacaactagattagtgaatccagatcaactgttgaatgaaataatgtctattcttccaaagaagcatgttgactttgtacaaaagggttatacactgaagtgtcaaacacagtcagattttgggaaagtgacaatgcaatttgaattagaagtgtgccagcttcaaaaacccgatgtggtgggtatcaggaggcagcggcttaagggcgatgcctgggtttacaaaagattagtggaagacatcctatctagctgcaaggtataattgatggattcttccatcctgccggatgagtgtgggtgtgatacagcctacataaagactgttatgatcgctttgattttaaagttcattggaactaccaacttgtttctaaagagctatcttaagaccaatatctctttgtttttaaacaaaagatattattttgtgtatgaatctaaatcaagcccatctgtcattatgttactgtcttttttaatcatgtggttttgtatattaataattgttgactttcttagattcacttccatatgtgaatgtaagctcttaactatgtctctttgtaatgtgtaatttctttctgaaataaaaccatttgtgaatatag

SEQ ID NO: 151803 - DNA, 2236 bp, Homo sapiens
  Payload ID: 9881
  Gene Symbol: MELK
  Gene Name: maternal embryonic leucine zipper kinase
  Uniprot ID: Q14680
  ENST ID: ENST00000545008
  CDS Start-End: 150-1892
aacccggcgatcgaaaagattcttaggaacgccgtaccagccgcgtctctcaggacagcaggcccctgtccttctgtcgggcgccgctcagccgtgccctccgcccctcaggttctttttctaattccaaataaacttgcaagaggactatgaaagattatgatgaacttctcaaatattatgaattacatgaaactattgggacaggtggctttgcaaaggtcaaacttgcctgccatatccttactggagagatggtagctataaaaatcatggataaaaacacactagggagtgatttgccccggatcaaaacggagattgaggccttgaagaacctgagacatcagcatatatgtcaactctaccatgtgctagagacagccaacaaaatattcatggttcttgagggtaacaaggattaccatctacagacatgctgtgggagtctggcttatgcagcacctgagttaatacaaggcaaatcatatcttggatcagaggcagatgtttggagcatgggcatactgttatatgttcttatgtgtggatttctaccatttgatgatgataatgtaatggctttatacaagaagattatgagaggaaaatatgatgttcccaagtggctctctcccagtagcattctgcttcttcaacaaatgctgcaggtggacccaaagaaacggatttctatgaaaaatctattgaaccatccctggatcatgcaagattacaactatcctgttgagtggcaaagcaagaatccttttattcacctcgatgatgattgcgtaacagaactttctgtacatcacagaaacaacaggcaaacaatggaggatttaatttcactgtggcagtatgatcacctcacggctacctatcttctgcttctagccaagaaggctcggggaaaaccagttcgtttaaggctttcttctttctcctgtggacaagccagtgctaccccattcacagacatcaagtcaaataattggagtctggaagatgtgaccgcaagtgataaaaattatgtggcgggattaatagactatgattggtgtgaagatgatttatcaacaggtgctgctactccccgaacatcacagtttaccaagtactggacagaatcaaatggggtggaatctaaatcattaactccagccttatgcagaacacctgcaaataaattaaagaacaaagaaaatgtatatactcctaagtctgctgtaaagaatgaagagtactttatgtttcctgagccaaagactccagttaataagaaccagcataagagagaaatactcactacgccaaatcgttacactacaccctcaaaagctagaaaccagtgcctgaaagaaactccaattaaaataccagtaaattcaacaggaacagacaagttaatgacaggtgtcattagccctgagaggcggtgccgctcagtggaattggatctcaaccaagcacatatggaggagactccaaaaagaaagggagccaaagtgtttgggagccttgaaagggggttggataaggttatcactgtgctcaccaggagcaaaaggaagggttctgccagagacgggcccagaagactaaagcttcactataacgtgactacaactagattagtgaatccagatcaactgttgaatgaaataatgtctattcttccaaagaagcatgttgactttgtacaaaagggttatacactgaagtgtcaaacacagtcagattttgggaaagtgacaatgcaatttgaattagaagtgtgccagcttcaaaaacccgatgtggtgggtatcaggaggcagcggcttaagggcgatgcctgggtttacaaaagattagtggaagacatcctatctagctgcaaggtataattgatggattcttccatcctgccggatgagtgtgggtgtgatacagcctacataaagactgttatgatcgctttgattttaaagttcattggaactaccaacttgtttctaaagagctatcttaagaccaatatctctttgtttttaaacaaaagatattattttgtgtatgaatctaaatcaagcccatctgtcattatgttactgtcttttttaatcatgtggttttgtatattaataattgttgactttcttagattcacttccatatgtgaatgtaagctcttaactatgtctctttgtaatgtgtaatttctttctgaaataaaaccatttgtgaatat

SEQ ID NO: 151804 - DNA, 2263 bp, Homo sapiens
  Payload ID: 9881
  Gene Symbol: MELK
  Gene Name: maternal embryonic leucine zipper kinase
  ENST ID: ENST00000627766
  CDS Start-End: 347-844
agatttgattcccttggcgggcggaagcggccacaacccggcgatcgaaaagattcttaggaacgccgtaccagccgcgtctctcaggacagcaggcccctgtccttctgtcgggcgccgctcagccgtgccctccgcccctcaggttctttttctaattccaaataaacttgcaagaggactatgaaagattatgatgaacttctcaaatattatgaattacatgaaactattgggacagagtgatttgccccggatcaaaacggagattgaggccttgaagaacctgagacatcagcatatatgtcaactctaccatgtgctagagacagccaacaaaatattcatggttcttgagtactgccctggaggagagctgtttgactatataatttcccaggatcgcctgtcagaagaggagacccgggttgtcttccgtcagatagtatctgctgttgcttatgtgcacagccagggctatgctcacagggacctcaagccagaaaatttgctgtttgatgaatatcataaattaaagctgattgactttggtctctgtgcaaaacccaagggtaacaaggattaccatctacagacatgctgtgggagtctggcttatgcagcacctgagttaatacaaggcaaatcatatcttggatcagagatggagtttcactgtgtcgcccaggctggagtacagtggcgtgatctcggctcactgcaacctccgactcttggattcaagcgattctcctgcctcagccttccgagtagctgggactgcagatgtttggagcatgggcatactgttatatgttcttatgtgtggatttctaccatttgatgatgataatgtaatggctttatacaagaagattatgagaggaaaatatgatgttcccaagtggctctctcccagtagcattctgcttcttcaacaaatgctgcaggtggacccaaagaaacggatttctatgaaaaatctattgaaccatccctggatcatgcaagattacaactatcctgttgagtggcaaagcaagaatccttttattcacctcgatgatgattgcgtaacagaactttctgtacatcacagaaacaacaggcaaacaatggaggatttaatttcactgtggcagtatgatcacctcacggctacctatcttctgcttctagccaagaaggctcggggaaaaccagttcgtttaaggctttcttctttctcctgtggacaagccagtgctaccccattcacagacatcaagtcaaataattggagtctggaagatgtgaccgcaagtgataaaaattatgtggcgggattaatagactatgattggtgtgaagatgatttatcaacaggtgctgctactccccgaacatcacagtttaccaagtactggacagaatcaaatggggtggaatctaaatcattaactccagccttatgcagaacacctgcaaataaattaaagaacaaagaaaatgtatatactcctaagtctgctgtaaagaatgaagagtactttatgtttcctgagccaaagactccagttaataagaaccagcataagagagaaatactcactacgccaaatcgttacactacaccctcaaaagctagaaaccagtgcctgaaagaaactccaattaaaataccagtaaattcaacaggaacagacaagttaatgacaggtgtcattagccctgagaggcggtgccgctcagtggaattggatctcaaccaagcacatatggaggagactccaaaaagaaagggagccaaagtgtttgggagccttgaaagggggttggataaggttatcactgtgctcaccaggagcaaaaggaagggttctgccagagacgggcccagaagactaaagcttcactataacgtgactacaactagattagtgaatccagatcaactgttgaatgaaataatgtctattcttccaaagaagcatgttgactttgtacaaaagggttatacactgaagtgtcaaacacagtcagattttgggaaagtgacaatgcaatttgaattagaagtgtgccagcttcaaaaacccgatgtggtgggtatcaggaggcagcggcttaagggcgatgcctgggtttacaaaagattagtggaagacatcctatctagctgcaaggtataattgatggattcttccatcctgccggatgagtgtgggtgtgatacagcctacataaagactgttatgatcgctttgattttaaagttcattgg

SEQ ID NO: 151805 - DNA, 1966 bp, Homo sapiens
  Payload ID: 9881
  Gene Symbol: MELK
  Gene Name: maternal embryonic leucine zipper kinase
  ENST ID: ENST00000626154
  CDS Start-End: 184-573
gtaccagccgcgtctctcaggacagcaggcccctgtccttctgtcgggcgccgctcagccgtgccctccgcccctcagagtgatttgccccggatcaaaacggagattgaggccttgaagaacctgagacatcagcatatatgtcaactctaccatgtgctagagacagccaacaaaatattcatggttcttgagtactgccctggaggagagctgtttgactatataatttcccaggatcgcctgtcagaagaggagacccgggttgtcttccgtcagatagtatctgctgttgcttatgtgcacagccagggctatgctcacagggacctcaagccagaaaatttgctgtttgatgaatatcataaattaaagctgattgactttggtctctgtgcaaaacccaagggtaacaaggattaccatctacagacatgctgtgggagtctggcttatgcagcacctgagttaatacaaggcaaatcatatcttggatcagagatgtttggagcatgggcatactgttatatgttcttatgtgtggatttctaccatttgatgatgataatgtaatggctttatacaagaagattatgagaggaaaatatgatgttcccaagtggctctctcccagtagcattctgcttcttcaacaaatgctgcaggtggacccaaagaaacggatttctatgaaaaatctattgaaccatccctggatcatgcaagattacaactatcctgttgagtggcaaagcaagaatccttttattcacctcgatgatgattgcgtaacagaactttctgtacatcacagaaacaacaggcaaacaatggaggatttaatttcactgtggcagtatgatcacctcacggctacctatcttctgcttctagccaagaaggctcggggaaaaccagttcgtttaaggctttcttctttctcctgtggacaagccagtgctaccccattcacagacatcaagtcaaataattggagtctggaagatgtgaccgcaagtgataaaaattatgtggcgggattaatagactatgattggtgtgaagatgatttatcaacaggtgctgctactccccgaacatcacagtttaccaagtactggacagaatcaaatggggtggaatctaaatcattaactccagccttatgcagaacacctgcaaataaattaaagaacaaagaaaatgtatatactcctaagtctgctgtaaagaatgaagagtactttatgtttcctgagccaaagactccagttaataagaaccagcataagagagaaatactcactacgccaaatcgttacactacaccctcaaaagctagaaaccagtgcctgaaagaaactccaattaaaataccagtaaattcaacaggaacagacaagttaatgacaggtgtcattagccctgagaggcggtgccgctcagtggaattggatctcaaccaagcacatatggaggagactccaaaaagaaagggagccaaagtgtttgggagccttgaaagggggttggataaggttatcactgtgctcaccaggagcaaaaggaagggttctgccagagacgggcccagaagactaaagcttcactataacgtgactacaactagattagtgaatccagatcaactgttgaatgaaataatgtctattcttccaaagaagcatgttgactttgtacaaaagggttatacactgaagtgtcaaacacagtcagattttgggaaagtgacaatgcaatttgaattagaagtgtgccagcttcaaaaacccgatgtggtgggtatcaggaggcagcggcttaagggcgatgcctgggtttacaaaagattagtggaagacatcctatctagctgcaaggtataattgatggattcttccatcctgccggatgagtgtgggtgtgatacagcctacataaagactgttatgatcgctttgatttt

SEQ ID NO: 151806 - DNA, 918 bp, Homo sapiens
  Payload ID: 9881
  Gene Symbol: MELK
  Gene Name: maternal embryonic leucine zipper kinase
  ENST ID: ENST00000625974
  CDS Start-End: 209-682
gatcgaaaagattcttaggaacgccgtaccagccgcgtctctcaggacagcaggcccctgtccttctgtcgggcgccgctcagccgtgccctccgcccctcagagtgatttgccccggatcaaaacggagattgaggccttgaagaacctgagacatcagcatatatgtcaactctaccatgtgctagagacagccaacaaaatattcatggttcttgagtactgccctggaggagagctgtttgactatataatttcccaggatcgcctgtcagaagaggagacccgggttgtcttccgtcagatagtatctgctgttgcttatgtgcacagccagggctatgctcacagggacctcaagccagaaaatttgctgtttgatgaatatcataaattaaagctgattgactttggtctctgtgcaaaacccaagggtaacaaggattaccatctacagacatgctgtgggagtctggcttatgcagcacctgagttaatacaaggcaaatcatatcttggatcagaggctggagtacagtggcgtgatctcggctcactgcaacctccgactcttggattcaagcgattctcctgcctcagccttccgagtagctgggactgcagatgtttggagcatgggcatactgttatatgttcttatgtgtggatttctaccatttgatgatgataatgtaatggctttatacaagaagattatgagaggaaaatatgatgttcccaagtggctctctcccagtagcattctgcttcttcaacaaatgctgcaggtggacccaaagaaacggatttctatgaaaaatctattgaaccatccctggatcatgcaagattacaactatcctgttgagtggcaaagcaagaatccttttattcacctcgatgatgattgcgtaacag

SEQ ID NO: 151807 - DNA, 794 bp, Homo sapiens
  Payload ID: 9881
  Gene Symbol: MELK
  Gene Name: maternal embryonic leucine zipper kinase
  ENST ID: ENST00000495529
  CDS Start-End: 150-794
aacccggcgatcgaaaagattcttaggaacgccgtaccagccgcgtctctcaggacagcaggcccctgtccttctgtcgggcgccgctcagccgtgccctccgcccctcaggttctttttctaattccaaataaacttgcaagaggactatgaaagattatgatgaacttctcaaatattatgaattacatgaaactattgggacaggtggctttgcaaaggtcaaacttgcctgccatatccttactggagagatggtagctataaaaatcatggataaaaacacactagggagtgatttgccccggatcaaaacggagattgaggccttgaagaacctgagacatcagcatatatgtcaactctaccatgtgctagagacagccaacaaaatattcatggttcttgaggaaaatttgctgtttgatgaatatcataaattaaagctgattgactttggtctctgtgcaaaacccaagggtaacaaggattaccatctacagacatgctgtgggagtctggcttatgcagcacctgagttaatacaaggcaaatcatatcttggatcagaggcagatgtttggagcatgggcatactgttatatgttcttatgtgtggatttctaccatttgatgatgataatgtaatggctttatacaagaagattatgagaggaaaatatgatgttcccaagtggctctctcccagtagcattctgcttcttcaacaaatgctgcaggtggacccaaagaaacggatttctatgaaaaatctattgaaccatccctggatc

SEQ ID NO: 151808 - DNA, 3832 bp, Homo sapiens
  Payload ID: 9882
  Gene Symbol: MATN1
  Gene Name: matrilin 1, cartilage matrix protein
  Uniprot ID: P21941
  ENST ID: ENST00000373765
  CDS Start-End: 37-1527
acaaccgtgccggctgctgcccgtgctgccagaactatgagggtcctctctggcactagcctcatgctctgcagcctgctgctgctgctccaggccctgtgcagccctggcctcgccccccagtccagaggccatctctgccggacgcggcccacagacctggtgtttgttgtcgacagctctcgcagcgttcggcctgttgaatttgagaaagtgaaggtattcctgtcccaggtcatcgagtcgctggacgtggggcccaatgccacccgggtgggcatggtcaactatgccagcaccgtgaagcaggagttctcgctgcgggctcatgtctccaaggccgcactgctgcaggctgtgcgccgtatccagccgctgtccacaggcaccatgaccggcctggccatccagttcgctatcaccaaagccttcggcgatgcagagggtggtcgttccaggtcccctgacatcagcaaggtggtcatcgtggtgacagacgggaggccccaggacagcgtgcaggacgtgtctgcgcgggcccgggccagcggcgtcgagctgttcgccatcggagtgggcagcgtggacaaggccacgctgcggcagatcgccagcgagccgcaggacgaacacgtcgattacgtggagagctacagcgtcatcgagaagctgtccaggaagttccaggaggccttctgcgtggtgtcagacctgtgcgccacaggggaccatgactgtgagcaggtgtgcatcagctcccccggttcctacacctgcgcctgccacgagggcttcactctgaacagcgacggcaagacctgcaatgtctgcagtggtggtggtggcagctcggccactgacctggtcttcctcattgacggatccaagagtgtgaggccagagaactttgagctggtgaagaagttcatcagtcagatcgtggatacgctggacgtgtcagacaagctggcccaggtggggctggtgcagtactcaagctctgtgcgccaggagttccccctgggtcgcttccacaccaagaaggacatcaaggcggctgtgcggaatatgtcctacatggagaagggcacaatgactggggctgctctcaagtacctcattgacaattccttcactgtgtccagtggggctaggcccggggcccagaaggtgggcattgtcttcactgatggccggagccaggactacattaatgatgctgccaagaaggccaaagacctcggctttaagatgtttgctgtgggtgtgggcaatgccgtggaggatgagctgagggaaatagcctcagagcctgtggcagagcactacttctacacggctgacttcaagaccatcaaccagataggcaagaagttgcagaagaagatctgtgtggaggaagacccgtgtgcctgcgagtccctggtgaaattccaagccaaagtggaggggctgctgcaggccctgaccaggaaactggaagctgtgagtaagcggctggccatcctggagaacacagttgtctaaggctgcctgtcaccactgtggcctctccaagcgtcctgcacgtgtccgccgtagctttaccattttagtgagggaagccagcccgggggtgggagggggtgtgtctgggtgtgcctattgagagcgtgtaatggcgtttgggagctcgtgtgtgtatgtgtgcgtgtgtgtatgtgtgcatgtgtgtgtgtgtgtgtgtgtgtgcacgtgcgcctgagggtgggcatgagtcttgccagaatgtgagtgtgagagtgataatgcaggggtgagtgtgagagggactgcgtttgcatttttataatcaaaagcttaatatattcccatcttttttagttaaccctttcttgactctgagtgctgtgaatttctttactgatttctctattctccggtgagaaacaattaaatgtgatttaacgtaagcagtgaatggggctagaggcagtgtggttatttggggaccagggaaaaggatggatgaagatgtggtgggaggggatggttggaaggatggtaacagtggtggtgacagtgatgacagtgaccacaccaaaaccagctggtgtttgtcctgccttttcagttacatattcatttagttgacctcatttcacttccagtaaccttacccagaaaagactcaaattatccccattacaaatgggaaagctgagagtctaaatgatgaaatgacttgctcagcagtgggtcgctgagagacaggacttgaatctaggactgaagaacatcaaaagaaaaaggcttcagagaaaaagggcaatgacaccagataggactcatttgttcattcattcattcgttcactcattcgttcaggtatcatgtacttacagggcaatggcggtggggggggatggtgctgtatgagacagacgtagttcctgccctaagagacatacagttgagcagggtgctcatgtcacccccaccagccagagggaccagccagaggaaaagagagtgggtttaggtcgtaccaggggtttgtgcctcctcttgatacctgggagcccacggggtgagtgtgtgtgtgagatgatgggaagggctccagcctgggcctgggctgccctaggtgcctctcccctcccgcccccaacatgccctgttggagttctgtttgtttcctgtgcacaggcggcatcacccccaacccaaagtccccaacgcagatggcagcagccccacctcagagactgcacaagagaaagactcctggccccatgttcccttcctccagccctatgtggggtctgcaggtcacaccctgagatctcggccacctcccccaggcccctgttggaccagtgctgctccggaatctccatctctgtcctctcagagggggagctttggtgattttctgaacctattcttgtttaatggagcatttttagtgttactactagattcacacttgagagcatgtctaaaaggcttttacaagaagctcagaccacaccgaaagatcttcctcggaggcagttcaaagaggcagaataacaacacgaacggtacccaagagctacatcagtacaacagcacaaatacacaagcgcgacttaactggggcacagccaccctcgcccccatgacctgactccacctcctacacagttcaccaaaccctttctctctgtccgtccctggggcaggagtttttctgctgtccaaggaggctccttgacacagccacctgagaagttatgactctgctcattcttcctttcttctgagattatccactcccctctcctccccacacaggtggggagggggagaggcagccatgttgatatggactgagaaggctcagcagtgtgtccccaaggaggaggagagggtcattagcggacgccatggcctgggagctggcgggcagaagcaacagatgtccctgatgagtggagtcagagatggggtggaagccctgcctgggaataggacctcgttcttccctgcccggtgggtggagtagtggcaggaccttgtcaccaggctctgatgaaggcagggaccagcttcttgggatctttcaatcccaaactcttgcccttcactcatcgcagttctccccacggctactccaggtcctcttgaaatccgtcctctccatggacttcccacatccctctctgctctaggtttgattaacagaaggttgtaaatgaaaaccagcatctcccgagggcagccatggtctactgacagatggcaagttactttgtaacctgtaattttgtttttttgaattttgtataaataaacaggactaaactaa

SEQ ID NO: 151809 - DNA, 4106 bp, Homo sapiens
  Payload ID: 9883
  Gene Symbol: MATN2
  Gene Name: matrilin 2
  Uniprot ID: O00339
  ENST ID: ENST00000254898
  CDS Start-End: 232-3102
gcgagcgaagggagcgctctgggatgggacttggagcaagcggcggcggcggagacagaggcagaggcagaagctggggctccgtcctcgcctcccacgagcgatccccgaggagagccgcggccctcggcgaggcgaagaggccgacgaggaagacccgggtggctgcgcccctgcctcgcttcccaggcgccggcggctgcagccttgcccctcttgctcgccttgaaaatggaaaagatgctcgcaggctgctttctgctgatcctcggacagatcgtcctcctccctgccgaggccagggagcggtcacgtgggaggtccatctctaggggcagacacgctcggacccacccgcagacggcccttctggagagttcctgtgagaacaagcgggcagacctggttttcatcattgacagctctcgcagtgtcaacacccatgactatgcaaaggtcaaggagttcatcgtggacatcttgcaattcttggacattggtcctgatgtcacccgagtgggcctgctccaatatggcagcactgtcaagaatgagttctccctcaagaccttcaagaggaagtccgaggtggagcgtgctgtcaagaggatgcggcatctgtccacgggcaccatgactgggctggccatccagtatgccctgaacatcgcattctcagaagcagagggggcccggcccctgagggagaatgtgccacgggtcataatgatcgtgacagatgggagacctcaggactccgtggccgaggtggctgctaaggcacgggacacgggcatcctaatctttgccattggtgtgggccaggtagacttcaacaccttgaagtccattgggagtgagccccatgaggaccatgtcttccttgtggccaatttcagccagattgagacgctgacctccgtgttccagaagaagttgtgcacggcccatatgtgcagcaccctggagcataactgtgcccacttctgcatcaacatccctggctcatacgtctgcaggtgcaaacaaggctacattctcaactcggatcagacgacttgcagaatccaggatctgtgtgccatggaggaccacaactgtgagcagctctgtgtgaatgtgccgggctccttcgtctgccagtgctacagtggctacgccctggctgaggatgggaagaggtgtgtggctgtggactactgtgcctcagaaaaccacggatgtgaacatgagtgtgtaaatgctgatggctcctacctttgccagtgccatgaaggatttgctcttaacccagataaaaaaacgtgcacaaagatagactactgtgcctcatctaatcacggatgtcagcacgagtgtgttaacacagatgattcctattcctgccactgcctgaaaggctttaccctgaatccagataagaaaacctgcagaaggatcaactactgtgcactgaacaaaccgggctgtgagcatgagtgcgtcaacatggaggagagctactactgccgctgccaccgtggctacactctggaccccaatggcaaaacctgcagccgagtggaccactgtgcacagcaggaccatggctgtgagcagctgtgtctgaacacggaggattccttcgtctgccagtgctcagaaggcttcctcatcaacgaggacctcaagacctgctcccgggtggattactgcctgctgagtgaccatggttgtgaatactcctgtgtcaacatggacagatcctttgcctgtcagtgtcctgagggacacgtgctccgcagcgatgggaagacgtgtgcaaaattggactcttgtgctctgggggaccacggttgtgaacattcgtgtgtaagcagtgaagattcgtttgtgtgccagtgctttgaaggttatatactccgtgaagatggaaaaacctgcagaaggaaagatgtctgccaagctatagaccatggctgtgaacacatttgtgtgaacagtgatgactcatacacgtgcgagtgcttggagggattccggctcgctgaggatgggaaacgctgccgaaggaaggatgtctgcaaatcaacccaccatggctgcgaacacatttgtgttaataatgggaattcctacatctgcaaatgctcagagggatttgttctagctgaggacggaagacggtgcaagaaatgcactgaaggcccaattgacctggtctttgtgatcgatggatccaagagtcttggagaagagaattttgaggtcgtgaagcagtttgtcactggaattatagattccttgacaatttcccccaaagccgctcgagtggggctgctccagtattccacacaggtccacacagagttcactctgagaaacttcaactcagccaaagacatgaaaaaagccgtggcccacatgaaatacatgggaaagggctctatgactgggctggccctgaaacacatgtttgagagaagttttacccaaggagaaggggccaggcccctttccacaagggtgcccagagcagccattgtgttcaccgacggacgggctcaggatgacgtctccgagtgggccagtaaagccaaggccaatggtatcactatgtatgctgttggggtaggaaaagccattgaggaggaactacaagagattgcctctgagcccacaaacaagcatctcttctatgccgaagacttcagcacaatggatgagataagtgaaaaactcaagaaaggcatctgtgaagctctagaagactccgatggaagacaggactctccagcaggggaactgccaaaaacggtccaacagccaacagaatctgagccagtcaccataaatatccaagacctactttcctgttctaattttgcagtgcaacacagatatctgtttgaagaagacaatcttttacggtctacacaaaagctttcccattcaacaaaaccttcaggaagccctttggaagaaaaacacgatcaatgcaaatgtgaaaaccttataatgttccagaaccttgcaaacgaagaagtaagaaaattaacacagcgcttagaagaaatgacacagagaatggaagccctggaaaatcgcctgagatacagatgaagattagaaatcgcgacacatttgtagtcattgtatcacggattacaatgaacgcagtgcagagccccaaagctcaggctattgttaaatcaataatgttgtgaagtaaaacaatcagtactgagaaacctggtttgccacagaacaaagacaagaagtatacactaacttgtataaatttatctaggaaaaaaatccttcagaattctaagatgaatttaccaggtgagaatgaataagctatgcaaggtattttgtaatatactgtggacacaacttgcttctgcctcatcctgccttagtgtgcaatctcatttgactatacgataaagtttgcacagtcttacttctgtagaacactggccataggaaatgctgtttttttgtactggactttaccttgatatatgtatatggatgtatgcataaaatcataggacatatgtacttgtggaacaagttggattttttatacaatattaaaattcaccacttcagagaatggtattcagtgcaaaaattcttagtttaactttaaatggaagatatgtatgtatgagaaatggccaacatgcctatgaaaaaaatgctgaatctcatcagtaatcaggaaaatgcaggttaaaacaataccatttttcacccatcagcttagcaaaaatgagtatattttttaacaagtgttggtaaggatgtggaaatgtgaggttcttgtagtaagaatgcaaatggcactctttgtagagtaagtctgttgacatctcataaaactgaaaatgcacacaaccctgtaaatctagcaactgcactcagttgatttcagcccatacatacaaagagacctgcataagaatgttactaggctttgtaaaagcaaaaaataaggaacaacttaaacatcatcagaaggggaactgataaactctggtgtaatccataccacagaaatacaacaccgcatgtacaggaatgtgctacatctatacaaataaatggtcaaactc

SEQ ID NO: 151810 - DNA, 2731 bp, Homo sapiens
  Payload ID: 9883
  Gene Symbol: MATN2
  Gene Name: matrilin 2
  Uniprot ID: O00339
  ENST ID: ENST00000522025
  CDS Start-End: 211-2229
agctggggctccgtcctcgcctcccacgagcgatccccgaggagagccgcggccctcggcgaggcgaagaggccgacgaggaagacccgggtggagcataactgtgcccacttctgcatcaacatccctggctcatacgtctgcaggtgcaaacaaggctacattctcaactcggatcagacgacttgcagaatccaggatctgtgtgccatggaggaccacaactgtgagcagctctgtgtgaatgtgccgggctccttcgtctgccagtgctacagtggctacgccctggctgaggatgggaagaggtgtgtggctgtggactactgtgcctcagaaaaccacggatgtgaacatgagtgtgtaaatgctgatggctcctacctttgccagtgccatgaaggatttgctcttaacccagataaaaaaacgtgcacaaagatagactactgtgcctcatctaatcacggatgtcagcacgagtgtgttaacacagatgattcctattcctgccactgcctgaaaggctttaccctgaatccagataagaaaacctgcagaaggatcaactactgtgcactgaacaaaccgggctgtgagcatgagtgcgtcaacatggaggagagctactactgccgctgccaccgtggctacactctggaccccaatggcaaaacctgcagccgagtggaccactgtgcacagcaggaccatggctgtgagcagctgtgtctgaacacggaggattccttcgtctgccagtgctcagaaggcttcctcatcaacgaggacctcaagacctgctcccgggtggattactgcctgctgagtgaccatggttgtgaatactcctgtgtcaacatggacagatcctttgcctgtcagtgtcctgagggacacgtgctccgcagcgatgggaagacgtgtgcaaaattggactcttgtgctctgggggaccacggttgtgaacattcgtgtgtaagcagtgaagattcgtttgtgtgccagtgctttgaaggttatatactccgtgaagatggaaaaacctgcagaaggaaagatgtctgccaagctatagaccatggctgtgaacacatttgtgtgaacagtgatgactcatacacgtgcgagtgcttggagggattccggctcgctgaggatgggaaacgctgccgaaggaaggatgtctgcaaatcaacccaccatggctgcgaacacatttgtgttaataatgggaattcctacatctgcaaatgctcagagggatttgttctagctgaggacggaagacggtgcaagaaatgcactgaaggcccaattgacctggtctttgtgatcgatggatccaagagtcttggagaagagaattttgaggtcgtgaagcagtttgtcactggaattatagattccttgacaatttcccccaaagccgctcgagtggggctgctccagtattccacacaggtccacacagagttcactctgagaaacttcaactcagccaaagacatgaaaaaagccgtggcccacatgaaatacatgggaaagggctctatgactgggctggccctgaaacacatgtttgagagaagttttacccaaggagaaggggccaggcccctttccacaagggtgcccagagcagccattgtgttcaccgacggacgggctcaggatgacgtctccgagtgggccagtaaagccaaggccaatggtatcactatgtatgctgttggggtaggaaaagccattgaggaggaactacaagagattgcctctgagcccacaaacaagcatctcttctatgccgaagacttcagcacaatggatgagataagtgaaaaactcaagaaaggcatctgtgaagctctagaagactccgatggaagacaggactctccagcaggggaactgccaaaaacggtccaacagccaacagaatctgagccagtcaccataaatatccaagacctactttcctgttctaattttgcagtgcaacacagatatctgtttgaagaagacaatcttttacggtctacacaaaagctttcccattcaacaaaaccttcaggaagccctttggaagaaaaacacgatcaatgcaaatgtgaaaaccttataatgttccagaaccttgcaaacgaagaagtaagaaaattaacacagcgcttagaagaaatgacacagagaatggaagccctggaaaatcgcctgagatacagatgaagattagaaatcgcgacacatttgtagtcattgtatcacggattacaatgaacgcagtgcagagccccaaagctcaggctattgttaaatcaataatgttgtgaagtaaaacaatcagtactgagaaacctggtttgccacagaacaaagacaagaagtatacactaacttgtataaatttatctaggaaaaaaatccttcagaattctaagatgaatttaccaggtgagaatgaataagctatgcaaggtattttgtaatatactgtggacacaacttgcttctgcctcatcctgccttagtgtgcaatctcatttgactatacgataaagtttgcacagtcttacttctgtagaacactggccataggaaatgctgtttttttgtactggactttaccttgatatatgtatatggatgtatgcataaaatcataggacatatgtacttgtggaacaagttggattttttatacaatattaaaattcaccacttcagagaa

SEQ ID NO: 151811 - DNA, 600 bp, Homo sapiens
  Payload ID: 9883
  Gene Symbol: MATN2
  Gene Name: matrilin 2
  ENST ID: ENST00000519585
  CDS Start-End: 255-600
aggtgatggctggtgggttcagagtaattaagactgatggataactgcagagaggaaatctagttttcagggcaaacagatgcgtccaagagagagcccacacacgtggttggatgcagctggagatggagaattccagttcaaggaaaaggcctgggcagtatgtgtttggtggtggtcgttgaccctgaaaatagatggaatcttggagggagaaagcgagtgtggaaagtgaagtccaggatctgtgtgccatggaggaccacaactgtgagcagctctgtgtgaatgtgccgggctccttcgtctgccagtgctacagtggctacgccctggctgaggatgggaagaggtgtgtggctgtggactactgtgcctcagaaaaccacggatgtgaacatgagtgtgtaaatgctgatggctcctacctttgccagtgccatgaaggatttgctcttaacccagataaaaaaacgtgcacaaagatagactactgtgcctcatctaatcacggatgtcagcacgagtgtgttaacacagatgattcctattcctgccactgcctgaaaggctttaccctgaatccagataagaaaacct

SEQ ID NO: 151812 - DNA, 997 bp, Homo sapiens
  Payload ID: 9883
  Gene Symbol: MATN2
  Gene Name: matrilin 2
  ENST ID: ENST00000521952
  CDS Start-End: 1-467
gggtggattactgcctgctgagtgaccatggttgtgaatactcctgtgtcaacatggacagatcctttgcctgtcagtgtcctgagggacacgtgctccgcagcgatgggaagacgtgtgcaaaattggactcttgtgctctgggggaccacggttgtgaacattcgtgtgtaagcagtgaagattcgtttgtgtgccagtgctttgaaggttatatactccgtgaagatggaaaaacctgcagaaggaaagatgtctgccaagctatagaccatggctgtgaacacatttgtgtgaacagtgatgactcatacacgtgcgagtgcttggagggattccggctcgctgaggatgggaaacgctgccgaagtaagatgtctgcaaatcaacccaccatggctgcgaacacatttgtgttaataatgggaattcctacatctgcaaatgctcagagggatttgttctagctgaggacggaagacggtgcaagagtatcactatgtatgctgttggggtaggaaaagccattgaggaggaactacaagagattgcctctgagcccacaaacaagcatctcttctatgccgaagacttcagcacaatggatgagataagtgaaaaactcaagaaaggcatctgtgaagctctagaagactccgatggaagacaggactctccagcaggggaactgccaaaaacggtccaacagccaacagaatctgagccagtcaccataaatatccaagacctactttcctgttctaattttgcagtgcaacacagatatctgtttgaagaagacaatcttttacggtctacacaaaagctttcccattcaacaaaaccttcaggaagccctttggaagaaaaacacgatcaatgcaaatgtgaaaaccttataatgttccagaaccttgcaaacgaagaagtaagaaaattaacacagcgcttagaagaaatgacacagagaatggaagccctggaaaatcgcctgaga

SEQ ID NO: 151813 - DNA, 416 bp, Homo sapiens
  Payload ID: 9883
  Gene Symbol: MATN2
  Gene Name: matrilin 2
  ENST ID: ENST00000522135
  CDS Start-End: 1-395
tagaagactccgatggaagacaggactctccagcaggggaactgccaaaaacggtccaacagccaacagaatctgagccagtcaccataaatatccaagacctactttcctgttctaattttgcagtgcaacacagatatctgtttgaagaagacaatcttttacggtctacacaaaagctttcccattcaacaaaaccttcaggaagccctttggaagaaaaacacgatcaatgcaaatgtgaaaaccttataatgttccagaaccttgcaaacgaagaagtaagaaaattaacacagcgctatatccttttcttgcattatgcttctgtatggaatgcaaagaatattatcaaaacttcacacactctatgtaggttttatcaactgaagtaaatcccacgaagtcacaaagaa

SEQ ID NO: 151814 - DNA, 2663 bp, Homo sapiens
  Payload ID: 9883
  Gene Symbol: MATN2
  Gene Name: matrilin 2
  ENST ID: ENST00000518154
  CDS Start-End: 1-2161
ggccgaggtggctgctaaggcacgggacacgggcatcctaatctttgccattggtgtgggccaggtagacttcaacaccttgaagtccattgggagtgagccccatgaggaccatgtcttccttgtggccaatttcagccagattgagacgctgacctccgtgttccagaagaagttgtgcacggcccatatgtgcagcaccctggagcataactgtgcccacttctgcatcaacatccctggctcatacgtctgcaggtgcaaacaaggctacattctcaactcggatcagacgacttgcagaactgtggactactgtgcctcagaaaaccacggatgtgaacatgagtgtgtaaatgctgatggctcctacctttgccagtgccatgaaggatttgctcttaacccagataaaaaaacgtgcacaaagatagactactgtgcctcatctaatcacggatgtcagcacgagtgtgttaacacagatgattcctattcctgccactgcctgaaaggctttaccctgaatccagataagaaaacctgcagaaggatcaactactgtgcactgaacaaaccgggctgtgagcatgagtgcgtcaacatggaggagagctactactgccgctgccaccgtggctacactctggaccccaatggcaaaacctgcagccgagtggaccactgtgcacagcaggaccatggctgtgagcagctgtgtctgaacacggaggattccttcgtctgccagtgctcagaaggcttcctcatcaacgaggacctcaagacctgctcccgggtggattactgcctgctgagtgaccatggttgtgaatactcctgtgtcaacatggacagatcctttgcctgtcagtgtcctgagggacacgtgctccgcagcgatgggaagacgtgtgcaaaattggactcttgtgctctgggggaccacggttgtgaacattcgtgtgtaagcagtgaagattcgtttgtgtgccagtgctttgaaggttatatactccgtgaagatggaaaaacctgcagaaggaaagatgtctgccaagctatagaccatggctgtgaacacatttgtgtgaacagtgatgactcatacacgtgcgagtgcttggagggattccggctcgctgaggatgggaaacgctgccgaaggaaggatgtctgcaaatcaacccaccatggctgcgaacacatttgtgttaataatgggaattcctacatctgcaaatgctcagagggatttgttctagctgaggacggaagacggtgcaagaaatgcactgaaggcccaattgacctggtctttgtgatcgatggatccaagagtcttggagaagagaattttgaggtcgtgaagcagtttgtcactggaattatagattccttgacaatttcccccaaagccgctcgagtggggctgctccagtattccacacaggtccacacagagttcactctgagaaacttcaactcagccaaagacatgaaaaaagccgtggcccacatgaaatacatgggaaagggctctatgactgggctggccctgaaacacatgtttgagagaagttttacccaaggagaaggggccaggcccctttccacaagggtgcccagagcagccattgtgttcaccgacggacgggctcaggatgacgtctccgagtgggccagtaaagccaaggccaatggtatcactatgtatgctgttggggtaggaaaagccattgaggaggaactacaagagattgcctctgagcccacaaacaagcatctcttctatgccgaagacttcagcacaatggatgagataagtgaaaaactcaagaaaggcatctgtgaagctctagaagactccgatggaagacaggactctccagcaggggaactgccaaaaacggtccaacagccaacagtgcaacacagatatctgtttgaagaagacaatcttttacggtctacacaaaagctttcccattcaacaaaaccttcaggaagccctttggaagaaaaacacgatcaatgcaaatgtgaaaaccttataatgttccagaaccttgcaaacgaagaagtaagaaaattaacacagcgcttagaagaaatgacacagagaatggaagccctggaaaatcgcctgagatacagatgaagattagaaatcgcgacacatttgtagtcattgtatcacggattacaatgaacgcagtgcagagccccaaagctcaggctattgttaaatcaataatgttgtgaagtaaaacaatcagtactgagaaacctggtttgccacagaacaaagacaagaagtatacactaacttgtataaatttatctaggaaaaaaatccttcagaattctaagatgaatttaccaggtgagaatgaataagctatgcaaggtattttgtaatatactgtggacacaacttgcttctgcctcatcctgccttagtgtgcaatctcatttgactatacgataaagtttgcacagtcttacttctgtagaacactggccataggaaatgctgtttttttgtactggactttaccttgatatatgtatatggatgtatgcataaaatcataggacatatgtacttgtggaacaagttggattttttatacaatattaaaattcaccacttcagagaa

SEQ ID NO: 151815 - DNA, 586 bp, Homo sapiens
  Payload ID: 9883
  Gene Symbol: MATN2
  Gene Name: matrilin 2
  ENST ID: ENST00000522270
  CDS Start-End: 1-586
cagtgctacagtggctacgccctggctgaggatgggaagaggtgtgtggctgtggactactgtgcctcagaaaaccacggatgtgaacatgagtgtgtaaatgctgatggctcctacctttgccagtgccatgaaggatttgctcttaacccagataaaaaaacgtgcacaaagatagactactgtgcctcatctaatcacggatgtcagcacgagtgtgttaacacagatgattcctattcctgccactgcctgaaaggctttaccctgaatccagataagaaaacctgcagaagtctgcccttcttcccctcagggatcaactactgtgcactgaacaaaccgggctgtgagcatgagtgcgtcaacatggaggagagctactactgccgctgccaccgtggctacactctggaccccaatggcaaaacctgcagccgagtggaccactgtgcacagcaggaccatggctgtgagcagctgtgtctgaacacggaggattccttcgtctgccagtgctcagaaggcttcctcatcaacgaggacctcaagacctgctcccgggtggattactgcctgctgagtg

SEQ ID NO: 151816 - DNA, 548 bp, Homo sapiens
  Payload ID: 9883
  Gene Symbol: MATN2
  Gene Name: matrilin 2
  ENST ID: ENST00000517321
  CDS Start-End: 1-548
ggactcttgtgctctgggggaccacggttgtgaacattcgtgtgtaagcagtgaagattcgtttgtgtgccagtgctttgaaggttatatactccgtgaagatggaaaaacctgcagaaggaaagatgtctgccaagctatagaccatggctgtgaacacatttgtgtgaacagtgatgactcatacacgtgcgagtgcttggagggattccggctcgctgaggatgggaaacgctgccgaaaatgcactgaaggcccaattgacctggtctttgtgatcgatggatccaagagtcttggagaagagaattttgaggtcgtgaagcagtttgtcactggaattatagattccttgacaatttcccccaaagccgctcgagtggggctgctccagtattccacacaggtccacacagagttcactctgagaaacttcaactcagccaaagacatgaaaaaagccgtggcccacatgaaatacatgggaaagggctctatgactgggctggccctgaaacacatgtttgagagaagttttacccaaggag

SEQ ID NO: 151817 - DNA, 3554 bp, Homo sapiens
  Payload ID: 9883
  Gene Symbol: MATN2
  Gene Name: matrilin 2
  Uniprot ID: O00339
  ENST ID: ENST00000521689
  CDS Start-End: 475-3288
gatgcccgcctgggctcaggcacggacggagtggagccaggtggcagcaggcagggcgcgccgccagagtgcccagctcccggggctgcccacagggtggggccgccctcgccgccgctccctctccgcgccttccccatccccaaagaggacacccctccttccgcccggcccgctccccacccccgccgcggcaccgcctccccagccgcccgcccttgcccagcgcctcccaggcagccagcgagcgaagggagcgctctgggatgggacttggagcaagcggcggcggcggagacagaggcagaggcagaagctggggctccgtcctcgcctcccacgagcgatccccgaggagagccgcggccctcggcgaggcgaagaggccgacgaggaagacccgggtggctgcgcccctgcctcgcttcccaggcgccggcggctgcagccttgcccctcttgctcgccttgaaaatggaaaagatgctcgcaggctgctttctgctgatcctcggacagatcgtcctcctccctgccgaggccagggagcggtcacgtgggaggtccatctctaggggcagacacgctcggacccacccgcagacggcccttctggagagttcctgtgagaacaagcgggcagacctggttttcatcattgacagctctcgcagtgtcaacacccatgactatgcaaaggtcaaggagttcatcgtggacatcttgcaattcttggacattggtcctgatgtcacccgagtgggcctgctccaatatggcagcactgtcaagaatgagttctccctcaagaccttcaagaggaagtccgaggtggagcgtgctgtcaagaggatgcggcatctgtccacgggcaccatgactgggctggccatccagtatgccctgaacatcgcattctcagaagcagagggggcccggcccctgagggagaatgtgccacgggtcataatgatcgtgacagatgggagacctcaggactccgtggccgaggtggctgctaaggcacgggacacgggcatcctaatctttgccattggtgtgggccaggtagacttcaacaccttgaagtccattgggagtgagccccatgaggaccatgtcttccttgtggccaatttcagccagattgagacgctgacctccgtgttccagaagaagttgtgcacggcccatatgtgcagcaccctggagcataactgtgcccacttctgcatcaacatccctggctcatacgtctgcaggtgcaaacaaggctacattctcaactcggatcagacgacttgcagaatccaggatctgtgtgccatggaggaccacaactgtgagcagctctgtgtgaatgtgccgggctccttcgtctgccagtgctacagtggctacgccctggctgaggatgggaagaggtgtgtggctgtggactactgtgcctcagaaaaccacggatgtgaacatgagtgtgtaaatgctgatggctcctacctttgccagtgccatgaaggatttgctcttaacccagataaaaaaacgtgcacaaagatagactactgtgcctcatctaatcacggatgtcagcacgagtgtgttaacacagatgattcctattcctgccactgcctgaaaggctttaccctgaatccagataagaaaacctgcagaaggatcaactactgtgcactgaacaaaccgggctgtgagcatgagtgcgtcaacatggaggagagctactactgccgctgccaccgtggctacactctggaccccaatggcaaaacctgcagccgagtggaccactgtgcacagcaggaccatggctgtgagcagctgtgtctgaacacggaggattccttcgtctgccagtgctcagaaggcttcctcatcaacgaggacctcaagacctgctcccgggtggattactgcctgctgagtgaccatggttgtgaatactcctgtgtcaacatggacagatcctttgcctgtcagtgtcctgagggacacgtgctccgcagcgatgggaagacgtgtgcaaaattggactcttgtgctctgggggaccacggttgtgaacattcgtgtgtaagcagtgaagattcgtttgtgtgccagtgctttgaaggttatatactccgtgaagatggaaaaacctgcagaaggaaagatgtctgccaagctatagaccatggctgtgaacacatttgtgtgaacagtgatgactcatacacgtgcgagtgcttggagggattccggctcgctgaggatgggaaacgctgccgaaggaaggatgtctgcaaatcaacccaccatggctgcgaacacatttgtgttaataatgggaattcctacatctgcaaatgctcagagggatttgttctagctgaggacggaagacggtgcaagaaatgcactgaaggcccaattgacctggtctttgtgatcgatggatccaagagtcttggagaagagaattttgaggtcgtgaagcagtttgtcactggaattatagattccttgacaatttcccccaaagccgctcgagtggggctgctccagtattccacacaggtccacacagagttcactctgagaaacttcaactcagccaaagacatgaaaaaagccgtggcccacatgaaatacatgggaaagggctctatgactgggctggccctgaaacacatgtttgagagaagttttacccaaggagaaggggccaggcccctttccacaagggtgcccagagcagccattgtgttcaccgacggacgggctcaggatgacgtctccgagtgggccagtaaagccaaggccaatggtatcactatgtatgctgttggggtaggaaaagccattgaggaggaactacaagagattgcctctgagcccacaaacaagcatctcttctatgccgaagacttcagcacaatggatgagataagtgaaaaactcaagaaaggcatctgtgaagctctagaagactccgatggaagacaggactctccagcaggggaactgccaaaaacggtccaacagccaacagtgcaacacagatatctgtttgaagaagacaatcttttacggtctacacaaaagctttcccattcaacaaaaccttcaggaagccctttggaagaaaaacacgatcaatgcaaatgtgaaaaccttataatgttccagaaccttgcaaacgaagaagtaagaaaattaacacagcgcttagaagaaatgacacagagaatggaagccctggaaaatcgcctgagatacagatgaagattagaaatcgcgacacatttgtagtcattgtatcacggattacaatgaacgcagtgcagagccccaaagctcaggctattgttaaatcaataatgttgtgaagtaaaacaatcagtactgagaaacctggtttgccacagaacaaagacaagaagtatacactaacttgtataaatttatctaggaaaaaaatccttcagaattctaagatgaatttaccaggtgagaatgaataagctatgcaaggtattttgtaatatact

SEQ ID NO: 151818 - DNA, 3449 bp, Homo sapiens
  Payload ID: 9883
  Gene Symbol: MATN2
  Gene Name: matrilin 2
  Uniprot ID: O00339
  ENST ID: ENST00000524308
  CDS Start-End: 204-2951
acttggagcaagcggcggcggcggagacagaggcagaggcagaagctggggctccgtcctcgcctcccacgagcgatccccgaggagagccgcggccctcggcgaggcgaagaggccgacgaggaagacccgggtggctgcgcccctgcctcgcttcccaggcgccggcggctgcagccttgcccctcttgctcgccttgaaaatggaaaagatgctcgcaggctgctttctgctgatcctcggacagatcgtcctcctccctgccgaggccagggagcggtcacgtgggaggtccatctctaggggcagacacgctcggacccacccgcagacggcccttctggagagttcctgtgagaacaagcgggcagacctggttttcatcattgacagctctcgcagtgtcaacacccatgactatgcaaaggtcaaggagttcatcgtggacatcttgcaattcttggacattggtcctgatgtcacccgagtgggcctgctccaatatggcagcactgtcaagaatgagttctccctcaagaccttcaagaggaagtccgaggtggagcgtgctgtcaagaggatgcggcatctgtccacgggcaccatgactgggctggccatccagtatgccctgaacatcgcattctcagaagcagagggggcccggcccctgagggagaatgtgccacgggtcataatgatcgtgacagatgggagacctcaggactccgtggccgaggtggctgctaaggcacgggacacgggcatcctaatctttgccattggtgtgggccaggtagacttcaacaccttgaagtccattgggagtgagccccatgaggaccatgtcttccttgtggccaatttcagccagattgagacgctgacctccgtgttccagaagaagttgtgcacggcccatatgtgcagcaccctggagcataactgtgcccacttctgcatcaacatccctggctcatacgtctgcaggtgcaaacaaggctacattctcaactcggatcagacgacttgcagaatccaggatctgtgtgccatggaggaccacaactgtgagcagctctgtgtgaatgtgccgggctccttcgtctgccagtgctacagtggctacgccctggctgaggatgggaagaggtgtgtggctgtggactactgtgcctcagaaaaccacggatgtgaacatgagtgtgtaaatgctgatggctcctacctttgccagtgccatgaaggatttgctcttaacccagataaaaaaacgtgcacaaggatcaactactgtgcactgaacaaaccgggctgtgagcatgagtgcgtcaacatggaggagagctactactgccgctgccaccgtggctacactctggaccccaatggcaaaacctgcagccgagtggaccactgtgcacagcaggaccatggctgtgagcagctgtgtctgaacacggaggattccttcgtctgccagtgctcagaaggcttcctcatcaacgaggacctcaagacctgctcccgggtggattactgcctgctgagtgaccatggttgtgaatactcctgtgtcaacatggacagatcctttgcctgtcagtgtcctgagggacacgtgctccgcagcgatgggaagacgtgtgcaaaattggactcttgtgctctgggggaccacggttgtgaacattcgtgtgtaagcagtgaagattcgtttgtgtgccagtgctttgaaggttatatactccgtgaagatggaaaaacctgcagaaggaaagatgtctgccaagctatagaccatggctgtgaacacatttgtgtgaacagtgatgactcatacacgtgcgagtgcttggagggattccggctcgctgaggatgggaaacgctgccgaaggaaggatgtctgcaaatcaacccaccatggctgcgaacacatttgtgttaataatgggaattcctacatctgcaaatgctcagagggatttgttctagctgaggacggaagacggtgcaagaaatgcactgaaggcccaattgacctggtctttgtgatcgatggatccaagagtcttggagaagagaattttgaggtcgtgaagcagtttgtcactggaattatagattccttgacaatttcccccaaagccgctcgagtggggctgctccagtattccacacaggtccacacagagttcactctgagaaacttcaactcagccaaagacatgaaaaaagccgtggcccacatgaaatacatgggaaagggctctatgactgggctggccctgaaacacatgtttgagagaagttttacccaaggagaaggggccaggcccctttccacaagggtgcccagagcagccattgtgttcaccgacggacgggctcaggatgacgtctccgagtgggccagtaaagccaaggccaatggtatcactatgtatgctgttggggtaggaaaagccattgaggaggaactacaagagattgcctctgagcccacaaacaagcatctcttctatgccgaagacttcagcacaatggatgagataagtgaaaaactcaagaaaggcatctgtgaagctctagaagactccgatggaagacaggactctccagcaggggaactgccaaaaacggtccaacagccaacagaatctgagccagtcaccataaatatccaagacctactttcctgttctaattttgcagtgcaacacagatatctgtttgaagaagacaatcttttacggtctacacaaaagctttcccattcaacaaaaccttcaggaagccctttggaagaaaaacacgatcaatgcaaatgtgaaaaccttataatgttccagaaccttgcaaacgaagaagtaagaaaattaacacagcgcttagaagaaatgacacagagaatggaagccctggaaaatcgcctgagatacagatgaagattagaaatcgcgacacatttgtagtcattgtatcacggattacaatgaacgcagtgcagagccccaaagctcaggctattgttaaatcaataatgttgtgaagtaaaacaatcagtactgagaaacctggtttgccacagaacaaagacaagaagtatacactaacttgtataaatttatctaggaaaaaaatccttcagaattctaagatgaatttaccaggtgagaatgaataagctatgcaaggtattttgtaatatactgtggacacaacttgcttctgcctcatcctgccttagtgtgcaatctcatttgactatacgataaagtttgcacagtcttacttctgtagaacactggccataggaaatgctgtttttttgtactggactttaccttgatatatgtatatggatgtatgcataaaatcataggacatatgtacttgtggaacaagttggattttttatacaatattaaaattcaccacttcag

SEQ ID NO: 151819 - DNA, 640 bp, Homo sapiens
  Payload ID: 9883
  Gene Symbol: MATN2
  Gene Name: matrilin 2
  ENST ID: ENST00000519582
  CDS Start-End: 1-530
gttttacccaaggagaaggggccaggcccctttccacaagggtgcccagagcagccattgtgttcaccgacggacgggctcaggatgacgtctccgagtgggccagtaaagccaaggccaatggtatcactatgtatgctgttggggtaggaaaagccattgaggaggaactacaagagattgcctctgagcccacaaacaagcatctcttctatgccgaagacttcagcacaatggatgagataagtgaaaaactcaagaaaggcatctgtgaagctctagaagactccgatggaagacaggactctccagcaggggaactgccaaaaacggtccaacagccaacagtgcaacacagatatctgtttgaagaagacaatcttttacggtctacacaaaagctttcccattcaacaaaaccttcaggaagccctttggaagaaaaacacgatcaatgcaaatgtgaaaaccttataatgttccagaaccttgcaaacgaagaacagagatcttctctatcggcactctaaaaaatgaaacactccaccaagggaacagcaggatccaatgattcatttaaacaatattaaataaaaggaatgcttggggataataaagaaaagaggattcggtgctttta

SEQ ID NO: 151820 - DNA, 541 bp, Homo sapiens
  Payload ID: 9883
  Gene Symbol: MATN2
  Gene Name: matrilin 2
  ENST ID: ENST00000521041
  CDS Start-End: 1-541
gtccattgggagtgagccccatgaggaccatgtcttccttgtggccaatttcagccagattgagacgctgacctccgtgttccagaagaagttgtgcatccaggatctgtgtgccatggaggaccacaactgtgagcagctctgtgtgaatgtgccgggctccttcgtctgccagtgctacagtggctacgccctggctgaggatgggaagaggtgtgtggctgtggactactgtgcctcagaaaaccacggatgtgaacatgagtgtgtaaatgctgatggctcctacctttgccagtgccatgaaggatttgctcttaacccagataaaaaaacgtgcacaaagatagactactgtgcctcatctaatcacggatgtcagcacgagtgtgttaacacagatgattcctattcctgccactgcctgaaaggctttaccctgaatccagataagaaaacctgcagaaggatcaactactgtgcactgaacaaaccgggctgtgagcatgagtgcgtcaacatggaggagagctactactgc

SEQ ID NO: 151821 - DNA, 3495 bp, Homo sapiens
  Payload ID: 9883
  Gene Symbol: MATN2
  Gene Name: matrilin 2
  Uniprot ID: O00339
  ENST ID: ENST00000520016
  CDS Start-End: 125-2995
gaactctgaaaaggcggggcagcgggcctgcagctcctggagttcagggagacccggaaatctcaccctgccctcttcttgtgttgtgtttgtcacagccttgcccctcttgctcgccttgaaaatggaaaagatgctcgcaggctgctttctgctgatcctcggacagatcgtcctcctccctgccgaggccagggagcggtcacgtgggaggtccatctctaggggcagacacgctcggacccacccgcagacggcccttctggagagttcctgtgagaacaagcgggcagacctggttttcatcattgacagctctcgcagtgtcaacacccatgactatgcaaaggtcaaggagttcatcgtggacatcttgcaattcttggacattggtcctgatgtcacccgagtgggcctgctccaatatggcagcactgtcaagaatgagttctccctcaagaccttcaagaggaagtccgaggtggagcgtgctgtcaagaggatgcggcatctgtccacgggcaccatgactgggctggccatccagtatgccctgaacatcgcattctcagaagcagagggggcccggcccctgagggagaatgtgccacgggtcataatgatcgtgacagatgggagacctcaggactccgtggccgaggtggctgctaaggcacgggacacgggcatcctaatctttgccattggtgtgggccaggtagacttcaacaccttgaagtccattgggagtgagccccatgaggaccatgtcttccttgtggccaatttcagccagattgagacgctgacctccgtgttccagaagaagttgtgcacggcccatatgtgcagcaccctggagcataactgtgcccacttctgcatcaacatccctggctcatacgtctgcaggtgcaaacaaggctacattctcaactcggatcagacgacttgcagaatccaggatctgtgtgccatggaggaccacaactgtgagcagctctgtgtgaatgtgccgggctccttcgtctgccagtgctacagtggctacgccctggctgaggatgggaagaggtgtgtggctgtggactactgtgcctcagaaaaccacggatgtgaacatgagtgtgtaaatgctgatggctcctacctttgccagtgccatgaaggatttgctcttaacccagataaaaaaacgtgcacaaagatagactactgtgcctcatctaatcacggatgtcagcacgagtgtgttaacacagatgattcctattcctgccactgcctgaaaggctttaccctgaatccagataagaaaacctgcagaaggatcaactactgtgcactgaacaaaccgggctgtgagcatgagtgcgtcaacatggaggagagctactactgccgctgccaccgtggctacactctggaccccaatggcaaaacctgcagccgagtggaccactgtgcacagcaggaccatggctgtgagcagctgtgtctgaacacggaggattccttcgtctgccagtgctcagaaggcttcctcatcaacgaggacctcaagacctgctcccgggtggattactgcctgctgagtgaccatggttgtgaatactcctgtgtcaacatggacagatcctttgcctgtcagtgtcctgagggacacgtgctccgcagcgatgggaagacgtgtgcaaaattggactcttgtgctctgggggaccacggttgtgaacattcgtgtgtaagcagtgaagattcgtttgtgtgccagtgctttgaaggttatatactccgtgaagatggaaaaacctgcagaaggaaagatgtctgccaagctatagaccatggctgtgaacacatttgtgtgaacagtgatgactcatacacgtgcgagtgcttggagggattccggctcgctgaggatgggaaacgctgccgaaggaaggatgtctgcaaatcaacccaccatggctgcgaacacatttgtgttaataatgggaattcctacatctgcaaatgctcagagggatttgttctagctgaggacggaagacggtgcaagaaatgcactgaaggcccaattgacctggtctttgtgatcgatggatccaagagtcttggagaagagaattttgaggtcgtgaagcagtttgtcactggaattatagattccttgacaatttcccccaaagccgctcgagtggggctgctccagtattccacacaggtccacacagagttcactctgagaaacttcaactcagccaaagacatgaaaaaagccgtggcccacatgaaatacatgggaaagggctctatgactgggctggccctgaaacacatgtttgagagaagttttacccaaggagaaggggccaggcccctttccacaagggtgcccagagcagccattgtgttcaccgacggacgggctcaggatgacgtctccgagtgggccagtaaagccaaggccaatggtatcactatgtatgctgttggggtaggaaaagccattgaggaggaactacaagagattgcctctgagcccacaaacaagcatctcttctatgccgaagacttcagcacaatggatgagataagtgaaaaactcaagaaaggcatctgtgaagctctagaagactccgatggaagacaggactctccagcaggggaactgccaaaaacggtccaacagccaacagaatctgagccagtcaccataaatatccaagacctactttcctgttctaattttgcagtgcaacacagatatctgtttgaagaagacaatcttttacggtctacacaaaagctttcccattcaacaaaaccttcaggaagccctttggaagaaaaacacgatcaatgcaaatgtgaaaaccttataatgttccagaaccttgcaaacgaagaagtaagaaaattaacacagcgcttagaagaaatgacacagagaatggaagccctggaaaatcgcctgagatacagatgaagattagaaatcgcgacacatttgtagtcattgtatcacggattacaatgaacgcagtgcagagccccaaagctcaggctattgttaaatcaataatgttgtgaagtaaaacaatcagtactgagaaacctggtttgccacagaacaaagacaagaagtatacactaacttgtataaatttatctaggaaaaaaatccttcagaattctaagatgaatttaccaggtgagaatgaataagctatgcaaggtattttgtaatatactgtggacacaacttgcttctgcctcatcctgccttagtgtgcaatctcatttgactatacgataaagtttgcacagtcttacttctgtagaacactggccataggaaatgctgtttttttgtactggactttaccttgatatatgtatatggatgtatgcataaaatcataggacatatgtacttgtggaacaagttggattttttatacaatattaaaattcaccacttcagag

SEQ ID NO: 151822 - DNA, 2524 bp, Homo sapiens
  Payload ID: 9884
  Gene Symbol: MATN3
  Gene Name: matrilin 3
  Uniprot ID: O15232
  ENST ID: ENST00000407540
  CDS Start-End: 64-1524
aaatccgagcctcgcgtgggctcctggcccccgacggacaccaccaggcccacggagcccaccatgccgcgcccggcccccgcgcgccgcctcccgggactcctcctgctgctctggccgctgctgctgctgccctccgccgcccccgaccccgtggcccgcccgggcttccggaggctggagacccgaggtcccgggggcagccctggacgccgcccctctcctgcggctcccgacggcgcgcccgcttccgggaccagcgagcctggccgcgcccgcggtgcaggtgtttgcaagagcagacccttggacctggtgtttatcattgatagttctcgtagcgtacggcccctggaattcaccaaagtgaaaacttttgtctcccggataatcgacactctggacattgggccagccgacacgcgggtggcagtggtgaactatgctagcactgtgaagatcgagttccaactccaggcctacacagataagcagtccctgaagcaggccgtgggtcgaatcacacccttgtcaacaggcaccatgtcaggcctagccatccagacagcaatggacgaagccttcacagtggaggcaggggctcgagagccctcttctaacatccctaaggtggccatcattgttacagatgggaggccccaggaccaggtgaatgaggtggcggctcgggcccaagcatctggtattgagctctatgctgtgggcgtggaccgggcagacatggcgtccctcaagatgatggccagtgagcccctagaggagcatgttttctacgtggagacctatggggtcattgagaaactttcctctagattccaggaaaccttctgtgcgctggacccctgtgtgcttggaacacaccagtgccagcacgtctgcatcagtgatggggaaggcaagcaccactgtgagtgtagccaaggatacaccttgaatgccgacaagaaaacgtgttcagctcttgataggtgtgctcttaacacccacggatgtgagcacatctgtgtgaatgacagaagtggctcttatcattgtgagtgctatgaaggttataccttgaatgaagacaggaaaacttgttcagctcaagataaatgtgctttgggtacccatgggtgtcagcacatttgtgtgaatgacagaacagggtcccatcattgtgaatgctatgagggctacactctgaatgcagataaaaaaacatgttcagtccgtgacaagtgtgccctaggctctcatggttgccagcacatttgtgtgagtgatggggccgcatcctaccactgtgattgctatcctggctacaccttaaatgaggacaagaaaacatgttcagccactgaggaagcacgaagacttgtttccactgaagatgcttgtggatgtgaagctacactggcattccaggacaaggtcagctcgtatcttcaaagactgaacactaaacttgatgacattttggagaagttgaaaataaatgaatatggacaaatacatcgttaaattgctccaatttctcacctgaaaatgtggacagcttggtgtacttaatactcatgcattcttttgcacacctgttattgccaatgttcctgctaataatttgccattatctgtattaatgcttgaatattactggataaattgtatgaagatcttctgcagaatcagcatgattcttccaaggaaatacatatgcagatacttattaagagcaaactttagtgtctctaagttatgactgtgaaatgattggtaggaaatagaatgaaaagtttagtgtttctttatctactaattgagccatttaatttttaaatgtttatattagataaccatattcacaatggaaactttaggtctagtttcttttgatagtatttataatataaatcaatcttattactgagagtgcaaattgtacaaggtatttacacatacaacttcatataactgagatgaatgtaattttgaactgtttaacactttttgttttttgcttattttgttggagtattattgaagatgtgatcaatagattgtaatacacatatctaaaaatagttaacacagatcaagtgaacattacattgccatttttaattcattctggtctttgaaagaaatgtactactaaagagcactagttgtgaatttagggtgttaaactttttaccaagtacaaaaatcccaaattcactttattattttgcttcaggatccaagtgacaaagttatatatttataaaattgctataaatcgacaaaatctaatgttgtctttttaatgttagtgatccacctgcctcagcctcccaaagtgctgggattacaggcttgaaagtctaacttttttttacttatatatttgatacatataattcttttggctttgaaacttgcaactttgagaacaaaacagtcctttaaattttgcactgctcaattctgtttttcgtttgcattgtctttaatataataaaagttattacctttacatatt

SEQ ID NO: 151823 - DNA, 1443 bp, Homo sapiens
  Payload ID: 9884
  Gene Symbol: MATN3
  Gene Name: matrilin 3
  Uniprot ID: O15232
  ENST ID: ENST00000421259
  CDS Start-End: 35-1369
cccgacggacaccaccaggcccacggagcccaccatgccgcgcccggcccccgcgcgccgcctcccgggactcctcctgctgctctggccgctgctgctgctgccctccgccgcccccgaccccgtggcccgcccgggcttccggaggctggagacccgaggtcccgggggcagccctggacgccgcccctctcctgcggctcccgacggcgcgcccgcttccgggaccagcgagcctggccgcgcccgcggtgcaggtgtttgcaagagcagacccttggacctggtgtttatcattgatagttctcgtagcgtacggcccctggaattcaccaaagtgaaaacttttgtctcccggataatcgacactctggacattgggccagccgacacgcgggtggcagtggtgaactatgctagcactgtgaagatcgagttccaactccaggcctacacagataagcagtccctgaagcaggccgtgggtcgaatcacacccttgtcaacaggcaccatgtcaggcctagccatccagacagcaatggacgaagccttcacagtggaggcaggggctcgagagccctcttctaacatccctaaggtggccatcattgttacagatgggaggccccaggaccaggtgaatgaggtggcggctcgggcccaagcatctggtattgagctctatgctgtgggcgtggaccgggcagacatggcgtccctcaagatgatggccagtgagcccctagaggagcatgttttctacgtggagacctatggggtcattgagaaactttcctctagattccaggaaaccttctgtgctcttgataggtgtgctcttaacacccacggatgtgagcacatctgtgtgaatgacagaagtggctcttatcattgtgagtgctatgaaggttataccttgaatgaagacaggaaaacttgttcagctcaagataaatgtgctttgggtacccatgggtgtcagcacatttgtgtgaatgacagaacagggtcccatcattgtgaatgctatgagggctacactctgaatgcagataaaaaaacatgttcagtccgtgacaagtgtgccctaggctctcatggttgccagcacatttgtgtgagtgatggggccgcatcctaccactgtgattgctatcctggctacaccttaaatgaggacaagaaaacatgttcagccactgaggaagcacgaagacttgtttccactgaagatgcttgtggatgtgaagctacactggcattccaggacaaggtcagctcgtatcttcaaagactgaacactaaacttgatgacattttggagaagttgaaaataaatgaatatggacaaatacatcgttaaattgctccaatttctcacctgaaaatgtggacagcttggtgtacttaatactcatgcattcttttgcacacctg

SEQ ID NO: 151824 - DNA, 1657 bp, Homo sapiens
  Payload ID: 9885
  Gene Symbol: MATN4
  Gene Name: matrilin 4
  ENST ID: ENST00000353917
  CDS Start-End: 158-1657
ctgcctggcagtccccacctagggcacgctgccacgccgccgttacctggtccaagtgcccgggaggctccgcctgtcggcttcgctctgcagctgcatctctgatctgtcctgcaggctcaggctctgacacctccattctctgtccccaagcgccatgagaggccttctttgctggcccgtgttgctgctccttcttcagccctgggaaacccagctccagttgacaggtcccaggtgtcacactgggcccctggatctggtgttcgtgattgacagctcccgcagcgtgcgccctttcgagttcgagaccatgcggcagttcctcatgggcctcctccgaggcctgaacgtgggtcccaacgccacgcgcgttggcgtgatccagtattcgagtcaagtgcagagcgtcttccctctccgcgcgttctctcgccgcgaggacatggagcgcgccatccgcgacctggtgcctctggcgcaaggcaccatgacgggactggcaatccagtacgccatgaacgtggccttcagtgtggccgagggcgcgcgaccgccagaggagcgcgtgccgcgtgtcgctgtcatcgtgacagacgggcggccccaggaccgcgtggccgaggtggcggcacaggcgcgcgcccgcggcattgaaatttacgcggtgggggtgcagcgcgcggacgtgggctccctgcgcgccatggcatcgcccccgctagacgagcacgtcttcctcgtagagtccttcgacctcatccaggagttcggcctgcagttccagagccggctgtgtgtccgggacctttgcaatggcgtggaccatggctgtgagttccagtgtgtgagcgagggcctctcctaccgctgcctgtgccccgaggggcggcaacttcaggcagatggcaagagctgcaaccggtgccgggaaggccacgtggaccttgttctgctggttgatggctccaagagcgtgcgtccacaaaacttcgagctagtgaagcgcttcgtgaaccagattgtggacttcctagatgtgtcccccgagggcacgcgggtggggctggtgcagttctcgagccgcgtgcgcaccgagttccctctgggtcgctacggcaccgcagccgaggtgaagcaggcggtcctggccgtggagtacatggaacgcggcaccatgacagggctggcgttgcggcacatggtggagcacagcttctccgaggcgcagggtgcacggccccgtgcccttaacgtgcctcgtgttggcctggtcttcacggatggccgctcccaggatgacatctcggtgtgggcagcgcgcgccaaggaggaaggcatcgtcatgtacgccgtgggcgtgggcaaggcggtggaggcggagctgcgcgagatcgcctcggagccagcggaactgcacgtgtcctatgccccggacttcggcaccatgacgcacctgctggagaacctcagaggcagcatctgtccagaggagggcatcagcgcagggacagagcttcggagcccatgcgaatgcgaaagcctcgtggagttccagggccgcacgctgggggcgctcgagagcctgacgctgaacctggcccagctgacggcgcgcctggaggatctggagaaccagctggccaaccagaagtga

SEQ ID NO: 151825 - DNA, 2127 bp, Homo sapiens
  Payload ID: 9885
  Gene Symbol: MATN4
  Gene Name: matrilin 4
  Uniprot ID: O95460
  ENST ID: ENST00000360607
  CDS Start-End: 188-1810
aaatgcggccgttgcctctgtgtgctccagctgcctggcagtccccacctagggcacgctgccacgccgccgttacctggtccaagtgcccgggaggctccgcctgtcggcttcgctctgcagctgcatctctgatctgtcctgcaggctcaggctctgacacctccattctctgtccccaagcgccatgagaggccttctttgctggcccgtgttgctgctccttcttcagccctgggaaacccagctccagttgacaggtcccaggtgtcacactgggcccctggatctggtgttcgtgattgacagctcccgcagcgtgcgccctttcgagttcgagaccatgcggcagttcctcatgggcctcctccgaggcctgaacgtgggtcccaacgccacgcgcgttggcgtgatccagtattcgagtcaagtgcagagcgtcttccctctccgcgcgttctctcgccgcgaggacatggagcgcgccatccgcgacctggtgcctctggcgcaaggcaccatgacgggactggcaatccagtacgccatgaacgtggccttcagtgtggccgagggcgcgcgaccgccagaggagcgcgtgccgcgtgtcgctgtcatcgtgacagacgggcggccccaggaccgcgtggccgaggtggcggcacaggcgcgcgcccgcggcattgaaatttacgcggtgggggtgcagcgcgcggacgtgggctccctgcgcgccatggcatcgcccccgctagacgagcacgtcttcctcgtagagtccttcgacctcatccaggagttcggcctgcagttccagagccggctgtgtgccattgactactgcagctttgggaaccatagctgtcagcatgagtgtgttagcacccctggtgggccacggtgccactgcagagagggccatgacttgcagcctgatgggaggagctgtcaggtccgggacctttgcaatggcgtggaccatggctgtgagttccagtgtgtgagcgagggcctctcctaccgctgcctgtgccccgaggggcggcaacttcaggcagatggcaagagctgcaaccggtgccgggaaggccacgtggaccttgttctgctggttgatggctccaagagcgtgcgtccacaaaacttcgagctagtgaagcgcttcgtgaaccagattgtggacttcctagatgtgtcccccgagggcacgcgggtggggctggtgcagttctcgagccgcgtgcgcaccgagttccctctgggtcgctacggcaccgcagccgaggtgaagcaggcggtcctggccgtggagtacatggaacgcggcaccatgacagggctggcgttgcggcacatggtggagcacagcttctccgaggcgcagggtgcacggccccgtgcccttaacgtgcctcgtgttggcctggtcttcacggatggccgctcccaggatgacatctcggtgtgggcagcgcgcgccaaggaggaaggcatcgtcatgtacgccgtgggcgtgggcaaggcggtggaggcggagctgcgcgagatcgcctcggagccagcggaactgcacgtgtcctatgccccggacttcggcaccatgacgcacctgctggagaacctcagaggcagcatctgtccagaggagggcatcagcgcagggacagagcttcggagcccatgcgaatgcgaaagcctcgtggagttccagggccgcacgctgggggcgctcgagagcctgacgctgaacctggcccagctgacggcgcgcctggaggatctggagaaccagctggccaaccagaagtgagggccacggacggcccagacccgggctggggcgcggcaccacggacggtgccccttgcgcgccatcggtgcgccggggccaggcagaacctgggcccgtccggcttgggctgtcggggcggaggcgctggcgggcttccggcattgagctgagttggcctcgcccggaccattaggcggactgcggcgtcagggggatagcgggtggtgagggaaggggcacgtgctagaccggcacgccctcgccgcgtgctgcgctcagttctttgttggatttcttgtttgtgttcttaaaaaaataaaaaaaactgatttcca

SEQ ID NO: 151826 - DNA, 2200 bp, Homo sapiens
  Payload ID: 9885
  Gene Symbol: MATN4
  Gene Name: matrilin 4
  Uniprot ID: O95460
  ENST ID: ENST00000372754
  CDS Start-End: 10-1878
ccaagcgccatgagaggccttctttgctggcccgtgttgctgctccttcttcagccctgggaaacccagctccagttgacaggtcccaggtgtcacactgggcccctggatctggtgttcgtgattgacagctcccgcagcgtgcgccctttcgagttcgagaccatgcggcagttcctcatgggcctcctccgaggcctgaacgtgggtcccaacgccacgcgcgttggcgtgatccagtattcgagtcaagtgcagagcgtcttccctctccgcgcgttctctcgccgcgaggacatggagcgcgccatccgcgacctggtgcctctggcgcaaggcaccatgacgggactggcaatccagtacgccatgaacgtggccttcagtgtggccgagggcgcgcgaccgccagaggagcgcgtgccgcgtgtcgctgtcatcgtgacagacgggcggccccaggaccgcgtggccgaggtggcggcacaggcgcgcgcccgcggcattgaaatttacgcggtgggggtgcagcgcgcggacgtgggctccctgcgcgccatggcatcgcccccgctagacgagcacgtcttcctcgtagagtccttcgacctcatccaggagttcggcctgcagttccagagccggctgtgtgggaaggaccagtgtgctgaggggggacatggttgccagcaccaatgtgtcaatgcctgggccatgttccactgcacctgcaacccaggctacaagctagcagcagataacaagagctgtttggccattgatctgtgtgctgaagggacccatggatgtgagcaccactgcgtcaattccccaggctcctatttctgtcactgccaagttggctttgtactccagcaggaccagaggagctgcagggccattgactactgcagctttgggaaccatagctgtcagcatgagtgtgttagcacccctggtgggccacggtgccactgcagagagggccatgacttgcagcctgatgggaggagctgtcaggtccgggacctttgcaatggcgtggaccatggctgtgagttccagtgtgtgagcgagggcctctcctaccgctgcctgtgccccgaggggcggcaacttcaggcagatggcaagagctgcaaccggtgccgggaaggccacgtggaccttgttctgctggttgatggctccaagagcgtgcgtccacaaaacttcgagctagtgaagcgcttcgtgaaccagattgtggacttcctagatgtgtcccccgagggcacgcgggtggggctggtgcagttctcgagccgcgtgcgcaccgagttccctctgggtcgctacggcaccgcagccgaggtgaagcaggcggtcctggccgtggagtacatggaacgcggcaccatgacagggctggcgttgcggcacatggtggagcacagcttctccgaggcgcagggtgcacggccccgtgcccttaacgtgcctcgtgttggcctggtcttcacggatggccgctcccaggatgacatctcggtgtgggcagcgcgcgccaaggaggaaggcatcgtcatgtacgccgtgggcgtgggcaaggcggtggaggcggagctgcgcgagatcgcctcggagccagcggaactgcacgtgtcctatgccccggacttcggcaccatgacgcacctgctggagaacctcagaggcagcatctgtccagaggagggcatcagcgcagggacagagcttcggagcccatgcgaatgcgaaagcctcgtggagttccagggccgcacgctgggggcgctcgagagcctgacgctgaacctggcccagctgacggcgcgcctggaggatctggagaaccagctggccaaccagaagtgagggccacggacggcccagacccgggctggggcgcggcaccacggacggtgccccttgcgcgccatcggtgcgccggggccaggcagaacctgggcccgtccggcttgggctgtcggggcggaggcgctggcgggcttccggcattgagctgagttggcctcgcccggaccattaggcggactgcggcgtcagggggatagcgggtggtgagggaaggggcacgtgctagaccggcacgccctcgccgcgtgctgcgctcagttctttgttggatttcttgtttgtgttcttaaaaaaataaaaaaaactgatttccacgggg

SEQ ID NO: 151827 - DNA, 2077 bp, Homo sapiens
  Payload ID: 9885
  Gene Symbol: MATN4
  Gene Name: matrilin 4
  Uniprot ID: O95460
  ENST ID: ENST00000372756
  CDS Start-End: 10-1755
ccaagcgccatgagaggccttctttgctggcccgtgttgctgctccttcttcagccctgggaaacccagctccagttgacaggtcccaggtgtcacactgggcccctggatctggtgttcgtgattgacagctcccgcagcgtgcgccctttcgagttcgagaccatgcggcagttcctcatgggcctcctccgaggcctgaacgtgggtcccaacgccacgcgcgttggcgtgatccagtattcgagtcaagtgcagagcgtcttccctctccgcgcgttctctcgccgcgaggacatggagcgcgccatccgcgacctggtgcctctggcgcaaggcaccatgacgggactggcaatccagtacgccatgaacgtggccttcagtgtggccgagggcgcgcgaccgccagaggagcgcgtgccgcgtgtcgctgtcatcgtgacagacgggcggccccaggaccgcgtggccgaggtggcggcacaggcgcgcgcccgcggcattgaaatttacgcggtgggggtgcagcgcgcggacgtgggctccctgcgcgccatggcatcgcccccgctagacgagcacgtcttcctcgtagagtccttcgacctcatccaggagttcggcctgcagttccagagccggctgtgtgccattgatctgtgtgctgaagggacccatggatgtgagcaccactgcgtcaattccccaggctcctatttctgtcactgccaagttggctttgtactccagcaggaccagaggagctgcagggccattgactactgcagctttgggaaccatagctgtcagcatgagtgtgttagcacccctggtgggccacggtgccactgcagagagggccatgacttgcagcctgatgggaggagctgtcaggtccgggacctttgcaatggcgtggaccatggctgtgagttccagtgtgtgagcgagggcctctcctaccgctgcctgtgccccgaggggcggcaacttcaggcagatggcaagagctgcaaccggtgccgggaaggccacgtggaccttgttctgctggttgatggctccaagagcgtgcgtccacaaaacttcgagctagtgaagcgcttcgtgaaccagattgtggacttcctagatgtgtcccccgagggcacgcgggtggggctggtgcagttctcgagccgcgtgcgcaccgagttccctctgggtcgctacggcaccgcagccgaggtgaagcaggcggtcctggccgtggagtacatggaacgcggcaccatgacagggctggcgttgcggcacatggtggagcacagcttctccgaggcgcagggtgcacggccccgtgcccttaacgtgcctcgtgttggcctggtcttcacggatggccgctcccaggatgacatctcggtgtgggcagcgcgcgccaaggaggaaggcatcgtcatgtacgccgtgggcgtgggcaaggcggtggaggcggagctgcgcgagatcgcctcggagccagcggaactgcacgtgtcctatgccccggacttcggcaccatgacgcacctgctggagaacctcagaggcagcatctgtccagaggagggcatcagcgcagggacagagcttcggagcccatgcgaatgcgaaagcctcgtggagttccagggccgcacgctgggggcgctcgagagcctgacgctgaacctggcccagctgacggcgcgcctggaggatctggagaaccagctggccaaccagaagtgagggccacggacggcccagacccgggctggggcgcggcaccacggacggtgccccttgcgcgccatcggtgcgccggggccaggcagaacctgggcccgtccggcttgggctgtcggggcggaggcgctggcgggcttccggcattgagctgagttggcctcgcccggaccattaggcggactgcggcgtcagggggatagcgggtggtgagggaaggggcacgtgctagaccggcacgccctcgccgcgtgctgcgctcagttctttgttggatttcttgtttgtgttcttaaaaaaataaaaaaaactgatttccacgggg

SEQ ID NO: 151828 - DNA, 1991 bp, Homo sapiens
  Payload ID: 9885
  Gene Symbol: MATN4
  Gene Name: matrilin 4
  Uniprot ID: O95460
  ENST ID: ENST00000537548
  CDS Start-End: 246-1991
agtgtggctgccccggtctccccagtctcccgctgtagctgaattccagcctggcccgcagctagccctgtctgcagctccaagcgtgctgcctggcagtccccacctagggcacgctgccacgccgccgttacctggtccaagtgcccgggaggctccgcctgtcggcttcgctctgcagctgcatctctgatctgtcctgcaggctcaggctctgacacctccattctctgtccccaagcgccatgagaggccttctttgctggcccgtgttgctgctccttcttcagccctgggaaacccagctccagttgacaggtcccaggtgtcacactgggcccctggatctggtgttcgtgattgacagctcccgcagcgtgcgccctttcgagttcgagaccatgcggcagttcctcatgggcctcctccgaggcctgaacgtgggtcccaacgccacgcgcgttggcgtgatccagtattcgagtcaagtgcagagcgtcttccctctccgcgcgttctctcgccgcgaggacatggagcgcgccatccgcgacctggtgcctctggcgcaaggcaccatgacgggactggcaatccagtacgccatgaacgtggccttcagtgtggccgagggcgcgcgaccgccagaggagcgcgtgccgcgtgtcgctgtcatcgtgacagacgggcggccccaggaccgcgtggccgaggtggcggcacaggcgcgcgcccgcggcattgaaatttacgcggtgggggtgcagcgcgcggacgtgggctccctgcgcgccatggcatcgcccccgctagacgagcacgtcttcctcgtagagtccttcgacctcatccaggagttcggcctgcagttccagagccggctgtgtgccattgatctgtgtgctgaagggacccatggatgtgagcaccactgcgtcaattccccaggctcctatttctgtcactgccaagttggctttgtactccagcaggaccagaggagctgcagggccattgactactgcagctttgggaaccatagctgtcagcatgagtgtgttagcacccctggtgggccacggtgccactgcagagagggccatgacttgcagcctgatgggaggagctgtcaggtccgggacctttgcaatggcgtggaccatggctgtgagttccagtgtgtgagcgagggcctctcctaccgctgcctgtgccccgaggggcggcaacttcaggcagatggcaagagctgcaaccggtgccgggaaggccacgtggaccttgttctgctggttgatggctccaagagcgtgcgtccacaaaacttcgagctagtgaagcgcttcgtgaaccagattgtggacttcctagatgtgtcccccgagggcacgcgggtggggctggtgcagttctcgagccgcgtgcgcaccgagttccctctgggtcgctacggcaccgcagccgaggtgaagcaggcggtcctggccgtggagtacatggaacgcggcaccatgacagggctggcgttgcggcacatggtggagcacagcttctccgaggcgcagggtgcacggccccgtgcccttaacgtgcctcgtgttggcctggtcttcacggatggccgctcccaggatgacatctcggtgtgggcagcgcgcgccaaggaggaaggcatcgtcatgtacgccgtgggcgtgggcaaggcggtggaggcggagctgcgcgagatcgcctcggagccagcggaactgcacgtgtcctatgccccggacttcggcaccatgacgcacctgctggagaacctcagaggcagcatctgtccagaggagggcatcagcgcagggacagagcttcggagcccatgcgaatgcgaaagcctcgtggagttccagggccgcacgctgggggcgctcgagagcctgacgctgaacctggcccagctgacggcgcgcctggaggatctggagaaccagctggccaaccagaagtga

SEQ ID NO: 151829 - DNA, 4843 bp, Homo sapiens
  Payload ID: 9886
  Gene Symbol: MATR3
  Gene Name: matrin 3
  Uniprot ID: P43243
  ENST ID: ENST00000394805
  CDS Start-End: 336-2879
gtgggggcgagctctctcgcgagagtgggtttgttcttgggctgcagccgctgccgccgcttctcgccagcgccgttgctgcgggggattgtgggagtctccgcgtcccgctcgctgggagagaggtacctctccttttccctctccctttccctaagagttgtctgctggttctcagcttgaagaagattctgcagtccttattgatcctttttcttggcgttaccatttttgaagcaaagttaacctagctttctagtttgagctttctttttggccgtctttaaaaaaatttttttttttaatctataaaatagacaagagctagttctacaatgtccaagtcattccagcagtcatctctcagtagggactcacagggtcatgggcgtgacctgtctgcggcaggaataggccttcttgctgctgctacccagtctttaagtatgccagcatctcttggaaggatgaaccagggtactgcacgccttgctagtttaatgaatcttggaatgagttcttcattgaatcaacaaggagctcatagtgcactgtcttctgctagtacttcttcccataatttgcagtctatatttaacattggaagtagaggtccactccctttatcttctcaacaccgtggagatgcagaccaggccagtaacattttggccagctttggtctgtctgctagagacttagatgaactgagtcgttatccagaggacaagattactcctgagaatttgccccaaatccttctacagcttaaaaggaggagaactgaagaaggccctaccttgagttatggtagagatggcagatctgctacacgggagccaccatacagagtacctagggatgattgggaagaaaaaaggcactttagaagagatagttttgatgatcgtggtcctagtctcaacccagtgcttgattatgaccatggaagtcgttctcaagaatctggttattatgacagaatggattatgaagatgacagattaagagatggagaaaggtgtagggatgattctttttttggtgagacctcgcataactatcataaatttgacagtgagtatgagagaatgggacgtggtcctggccccttacaagagagatctctctttgagaaaaagagaggcgctcctccaagtagcaatattgaagacttccatggactcttaccgaagggttatccccatctgtgctctatatgtgatttgccagttcattctaataaggagtggagtcaacatatcaatggagcaagtcacagtcgtcgatgccagcttcttcttgaaatctacccagaatggaatcctgacaatgatacaggacacacaatgggtgatccattcatgttgcagcagtctacaaatccagcaccaggaattctgggacctccacctccctcatttcatcttgggggaccagcagttggaccaagaggaaatctgggtgctggaaatggaaacctgcaaggacctagacacatgcagaaaggcagagtggaaactagcagagttgttcacatcatggattttcaacgagggaaaaacttgagataccagctattacagctggtagaaccatttggagtcatttcaaatcatctgattctaaataaaattaatgaggcatttattgaaatggcaaccacagaggatgctcaggccgcagtggattattacacaaccacaccagcgttagtatttggcaagccagtgagagttcatttatcccagaagtataaaagaataaagaaacctgaaggaaagccagatcagaagtttgatcaaaagcaagagcttggacgtgtgatacatctcagcaatttgccgcattctggctattctgatagtgctgttctcaagcttgctgagccttatgggaaaataaagaattacatattgatgaggatgaaaagtcaggcttttattgagatggagacaagagaagatgcaatggcaatggttgaccattgtttgaaaaaagccctttggtttcaggggagatgtgtgaaggttgacctgtctgagaaatataaaaaactggttctgaggattccaaacagaggcattgatttactgaaaaaagataaatcccgaaaaagatcttactctccagatggcaaagaatctccaagtgataagaaatccaaaactgatggttcccagaagactgagagttcaaccgaaggtaaagaacaagaagagaagtccggtgaagatggtgagaaagacacaaaggatgaccagacagagcaggaacctaatatgcttcttgaatctgaagatgagctacttgtagatgaagaagaagcagcagcactgctagaaagtggcagttcagtgggagacgagaccgatcttgctaatttaggtgatgtggcttctgatgggaaaaaggaaccatcagataaagctgtgaaaaaagatggaagtgcttcagcagcagcaaagaaaaagcttaaaaaggtggacaagatcgaggaacttgatcaagaaaacgaagcagcgttggaaaatggaattaaaaatgaggaaaacacagaaccaggtgctgaatcttctgagaacgctgatgatcccaacaaagatacaagtgaaaacgcagatggtcaaagtgatgagaacaaggacgactatacaatcccagatgagtatagaattggaccatatcagcccaatgttcctgttggtatagactatgtgatacctaaaacagggttttactgtaagctgtgttcactcttttatacaaatgaagaagttgcaaagaatactcattgcagcagccttcctcattatcagaaattaaagaaatttctgaataaattggcagaagaacgcagacagaagaaggaaacttaagatgtgcaaggagatttaatgatttcaaagaaaataatggttctttgtttttaatgttaaccttttttaaatacaatactgatagttagaagaaaactattgtactcttttgttttagtggagaaataatagatgtctgttcatgtgttaagtgttatagcaaaaaaaatacacatatggttaagttaatgaatagtttttgttttatcagaatggcaacagacagaagtactttgtagagattgacttcctaagctacttaagacaacttgcaccactaagaaaaaaatgtagaaccatttggaaaaatgaaatttagtagttccaagtttcaaagaaatgtcaacattttattccattcaataaagaacaaaaccaatagtgtttttattactttcatctgaaacattccatgttttaatctgagccttgcagactttcatttggagtttgaacccgttttggttgcatttcatttttggagaacttaattaacgtgagattggcaattgaaatgcaggtgcagttttctgttaatgtcatgctgttgtttaggtaataagaaatattaagtaattggctttagattttgtaatttttttccctgagttcctgctagatttcgtattctagtagtcaatgtattttcagtgaaatgcaaaaatattcccgttatctttgaccagtattaatttttgagatcttactgcttgtcacttgaatcccgtgattgtcatacatctctggtataagcaacatttgatttttgaagtgtgtagaccatctcttcatattttcaagatgtaattttacatttctgcatttttaaaacagtttggccataatcctagatgcacgcttctaattcatgtacctgcacatgtgacctttgtgaacagaaatttgcatgtataatttgtgtttacttgtaactttctggttatatactgcttatatctgtggattcaagttactgaagtgaataccaataaaaagaaaaccctaggccatgttaattggttatacatgtttggaatgttaaccaacgtatttgtcagttgtggtttttattcgctcttaaactttgtgcatgctttaacaatttattacttttaaatctagagtgaattctaaagactgccgctaaagatctgagttttaaaaatgttgttgctggtggatttcttgttcctgttacataactaaaagtgaggccatttgtggtttttaaaaaccttatgaattaaaaatgctacaggtgaacaaacagaagcttatgtttagagatattgatgacttaacagtacaattggaagtaatacggatgagcaagaattagttctgcagcttttcaaaataattacgtagagactcttggtatattggattatctgttgtaaacaatttttttttcttccctgacacagggtctcactctgtcacccagactggagtgcagtggcacagttctctgcaacctcagcctttgggctcaaatgaccctcctacctcagtctcctgagtagctgggactacaggctcatgccactatacctggctagtttttggtttttttgtatagatggggctttgccatgttgcccaggttgatcttgaattcctgggcccaagtgatctgctcgcttcagcctcccaaagtgctgggactgtaggcatgagccaccatccctggccaagaaacaaagttttaatttcaaaaaaatctacaaaaacaggataggcattgtctttcaaatgttcagaccccagtttattaaaggatacttcaaatagttggctaaattttatgatctctcccgttgaaaagtaggtgatgattttaatgtgacatgcacaaaaaatccttgccagtttacttctgcaatttaattttagcctttactaattacccacttctgtttaattccaatttttaacagcaggtacataaagcattatgtgca

SEQ ID NO: 151830 - DNA, 770 bp, Homo sapiens
  Payload ID: 9886
  Gene Symbol: MATR3
  Gene Name: matrin 3
  ENST ID: ENST00000504023
  CDS Start-End: 538-770
agtcaagtcacctcacatcctttttctctttatcaaaatagtattagtccaggttcctccagagaggatcgtgtggtgtgggaccttccggtttccagacaaagggttttggagtaccgtggtgtagtcgccgcatcgttctttgcatttcgagctctgtgccatgttctgtgttcggcatttaccgtggatgaatatcccctaggtgtttatcctgctctgtggccctgttctgtggaatattcctattggatcagttacagttttttagccagatatttctagaacggttatggtggttctgaaatggctagtctttcgggcgcgctggaataatgtgaagaatcgttgatttcgtagagttgtctgctggttctcagcttgaagaagattctgcagtccttattgatcctttttcttggcgttaccatttttgaagcaaagttaacctagctttctagtttgagctttctttttggccgtctttaaaaaaatttttttttttaatctataaaatagacaagagctagttctacaatgtccaagtcattccagcagtcatctctcagtagggactcacagggtcatgggcgtgacctgtctgcggcaggaataggccttcttgctgctgctacccagtctttaagtatgccagcatctcttggaaggatgaaccagggtactgcacgccttgctagtttaatgaatcttggaatgagttcttcattgaatcaacaaggagctcatagtgcactgtcttctgctagtac

SEQ ID NO: 151831 - DNA, 1001 bp, Homo sapiens
  Payload ID: 9886
  Gene Symbol: MATR3
  Gene Name: matrin 3
  ENST ID: ENST00000515833
  CDS Start-End: 1-1001
gagaaaggtgtagggatgattctttttttggtgagacctcgcataactatcataaatttgacagtgagtatgagagaatgggacgtggtcctggccccttacaagagagatctctctttgagaaaaagagaggcgctcctccaagtagcaatattgaagacttccatggactcttaccgaagggttatccccatctgtgctctatatgtgatttgccagttcattctaataaggagtggagtcaacatatcaatggagcaagtcacagtcgtcgatgccagcttcttcttgaaatgggtgatccattcatgttgcagcagtctacaaatccagcaccaggaattctgggacctccacctccctcatttcatcttgggggaccagcagttggaccaagaggaaatctgggtgctggaaatggaaacctgcaaggacctagacacatgcagaaaggcagagtggaaactagcagagttgttcacatcatggattttcaacgagggaaaaacttgagataccagctattacagctggtagaaccatttggagtcatttcaaatcatctgattctaaataaaattaatgaggcatttattgaaatggcaaccacagaggatgctcaggccgcagtggattattacacaaccacaccagcgttagtatttggcaagccagtgagagttcatttatcccagaagtataaaagaataaagaaacctgaaggaaagccagatcagaagtttgatcaaaagcaagagcttggacgtgtgatacatctcagcaatttgccgcattctggctattctgatagtgctgttctcaagcttgctgagccttatgggaaaataaagaattacatattgatgaggatgaaaagtcaggcttttattgagatggagacaagagaagatgcaatggcaatggttgaccattgtttgaaaaaagccctttggtttcaggggagatgtgtgaaggttgacctgtctgagaaatataaaaaa

SEQ ID NO: 151832 - DNA, 561 bp, Homo sapiens
  Payload ID: 9886
  Gene Symbol: MATR3
  Gene Name: matrin 3
  ENST ID: ENST00000508689
  CDS Start-End: 327-561
gtatgtgagccgcctgatcggcggccgccatgttaggagcgcagtggcggcgcaaccagccttctagggcggcggaggtgagcggtccgggagggaaacacgcggccggccaagggcccagggtgcggcgggagattttgggtgaagagagttgtctgctggttctcagcttgaagaagattctgcagtccttattgatcctttttcttggcgttaccatttttgaagcaaagttaacctagctttctagtttgagctttctttttggccgtctttaaaaaaatttttttttttaatctataaaatagacaagagctagttctacaatgtccaagtcattccagcagtcatctctcagtagggactcacagggtcatgggcgtgacctgtctgcggcaggaataggccttcttgctgctgctacccagtctttaagtatgccagcatctcttggaaggatgaaccagggtactgcacgccttgctagtttaatgaatcttggaatgagttcttcattgaatcaacaaggagctcatagtgcactgtcttctgctagtactt

SEQ ID NO: 151833 - DNA, 696 bp, Homo sapiens
  Payload ID: 9886
  Gene Symbol: MATR3
  Gene Name: matrin 3
  ENST ID: ENST00000503340
  CDS Start-End: 435-696
gtggaacaagccgcctgcagtacagtgcgaggcgggtgatttgcacttgtttagtcaagtcacctcacatcctttttctctttatcaaaatagtattagtccaggttcctccagagaggatcgtgtggtgtgggaccttccggtttccagacaaagggttttggagtaccgtggtgtagtcgccgcatcgttctttgcatttcgagctctgtgccatgttctgtgttcggcatttaccgtggatgaatatcccctagagttgtctgctggttctcagcttgaagaagattctgcagtccttattgatcctttttcttggcgttaccatttttgaagcaaagttaacctagctttctagtttgagctttctttttggccgtctttaaaaaaatttttttttttaatctataaaatagacaagagctagttctacaatgtccaagtcattccagcagtcatctctcagtagggactcacagggtcatgggcgtgacctgtctgcggcaggaataggccttcttgctgctgctacccagtctttaagtatgccagcatctcttggaaggatgaaccagggtactgcacgccttgctagtttaatgaatcttggaatgagttcttcattgaatcaacaaggagctcatagtgcactgtcttctgctagtacttcttcccataatttgcagtctatattta

SEQ ID NO: 151834 - DNA, 447 bp, Homo sapiens
  Payload ID: 9886
  Gene Symbol: MATR3
  Gene Name: matrin 3
  ENST ID: ENST00000511249
  CDS Start-End: 83-447
tgtgggagtctccgcgtcccgctcgctgggagagaggtacctctccttttccctctccctttccctaagagttgttcacatcatggattttcaacgagggaaaaacttgagataccagctattacagctggtagaaccatttggagtcatttcaaatcatctgattctaaataaaattaatgaggcatttattgaaatggcaaccacagaggatgctcaggccgcagtggattattacacaaccacaccagcgttagtatttggcaagccagtgagagttcatttatcccagaagtataaaagaataaagaaacctgaaggaaagccagatcagaagtttgatcaaaagcaagagcttggacgtgtgatacatctcagcaatttgccgcattctggctattctgatagtgctgttctcaagcttgctgagccttatgggaaaataaa

SEQ ID NO: 151835 - DNA, 423 bp, Homo sapiens
  Payload ID: 9886
  Gene Symbol: MATR3
  Gene Name: matrin 3
  ENST ID: ENST00000504311
  CDS Start-End: 95-423
gccgttgctgcgggggattgtgggagtctccgcgtcccgctcgctgggagagagctacccagaatggaatcctgacaatgatacaggacacacaatgggtgatccattcatgttgcagcagtctacaaatccagcaccaggaattctgggacctccacctccctcatttcatcttgggggaccagcagttggaccaagaggaaatctgggtgctggaaatggaaacctgcaaggacctagacacatgcagaaaggcagagtggaaactagcagagttgttcacatcatggattttcaacgagggaaaaacttgagataccagctattacagctggtagaaccatttggagtcatttcaaatcatctgattctaaataaaattaatgaggcatttattgaaatggcaaccacagaggatgctca

SEQ ID NO: 151836 - DNA, 1530 bp, Homo sapiens
  Payload ID: 9886
  Gene Symbol: MATR3
  Gene Name: matrin 3
  ENST ID: ENST00000504045
  CDS Start-End: 231-1530
cgccgttgctgcgggggattgtgggagtctccgcgtcccgctcgctgggagagagttgtctgctggttctcagcttgaagaagattctgcagtccttattgatcctttttcttggcgttaccatttttgaagcaaagttaacctagctttctagtttgagctttctttttggccgtctttaaaaaaatttttttttttaatctataaaatagacaagagctagttctacaatgtccaagtcattccagcagtcatctctcagtagggactcacagggtcatgggcgtgacctgtctgcggcaggaataggccttcttgctgctgctacccagtctttaagtatgccagcatctcttggaaggatgaaccagggtactgcacgccttgctagtttaatgaatcttggaatgagttcttcattgaatcaacaaggagctcatagtgcactgtcttctgctagtacttcttcccataatttgcagtctatatttaacattggaagtagaggtccactccctttatcttctcaacaccgtggagatgcagaccaggccagtaacattttggccagctttggtctgtctgctagagacttagatgaactgagtcgttatccagaggacaagattactcctgagaatttgccccaaatccttctacagcttaaaaggaggagaactgaagaaggccctaccttgagttatggtagagatggcagatctgctacacgggagccaccatacagagtacctagggatgattgggaagaaaaaaggcactttagaagagatagttttgatgatcgtggtcctagtctcaacccagtgcttgattatgaccatggaagtcgttctcaagaatctggttattatgacagaatggattatgaagatgacagattaagagatggagaaaggtgtagggatgattctttttttggtgagacctcgcataactatcataaatttgacagtgagtatgagagaatgggacgtggtcctggccccttacaagagagatctctctttgagaaaaagagaggcgctcctccaagtagcaatattgaagacttccatggactcttaccgaagggttatccccatctgtgctctatatgtgatttgccagttcattctaataaggagtggagtcaacatatcaatggagcaagtcacagtcgtcgatgccagcttcttcttgaaatctacccagaatggaatcctgacaatgatacaggacacacaatgggtgatccattcatgttgcagcagtctacaaatccagcaccaggaattctgggacctccacctccctcatttcatcttgggggaccagcagttggaccaagaggaaatctgggtgctggaaatggaaacctgcaaggacctagacacatgcagaaaggcagagtggaaactagcagagttgttcacatcatggattttcaacgagggaaaaacttgagataccagctattacagctggtagaaccatttggagtcatttcaaatcatctgattctaaataaaa

SEQ ID NO: 151837 - DNA, 2518 bp, Homo sapiens
  Payload ID: 9886
  Gene Symbol: MATR3
  Gene Name: matrin 3
  Uniprot ID: P43243
  ENST ID: ENST00000503811
  CDS Start-End: 232-1911
gcgtcccgctcgctgggagagaggtacctctccttttccctctccctttccctaaggtaggcgtgaagcgggtaagagtcggggtcgggtggctgggggttctccgtgtccgccgggaggggacaacgacggcgacaggggctgcggggagccggcggcgcgcctttcttgctcgctcccgctctgcctccctccgcgttgcgtatgtgagccgcctgatcggcggccgccatgttaggagcgcagtggcggcgcaaccagccttctagggcggcggaggagtggagtcaacatatcaatggagcaagtcacagtcgtcgatgccagcttcttcttgaaatctacccagaatggaatcctgacaatgatacaggacacacaatgggtgatccattcatgttgcagcagtctacaaatccagcaccaggaattctgggacctccacctccctcatttcatcttgggggaccagcagttggaccaagaggaaatctgggtgctggaaatggaaacctgcaaggacctagacacatgcagaaaggcagagtggaaactagcagagttgttcacatcatggattttcaacgagggaaaaacttgagataccagctattacagctggtagaaccatttggagtcatttcaaatcatctgattctaaataaaattaatgaggcatttattgaaatggcaaccacagaggatgctcaggccgcagtggattattacacaaccacaccagcgttagtatttggcaagccagtgagagttcatttatcccagaagtataaaagaataaagaaacctgaaggaaagccagatcagaagtttgatcaaaagcaagagcttggacgtgtgatacatctcagcaatttgccgcattctggctattctgatagtgctgttctcaagcttgctgagccttatgggaaaataaagaattacatattgatgaggatgaaaagtcaggcttttattgagatggagacaagagaagatgcaatggcaatggttgaccattgtttgaaaaaagccctttggtttcaggggagatgtgtgaaggttgacctgtctgagaaatataaaaaactggttctgaggattccaaacagaggcattgatttactgaaaaaagataaatcccgaaaaagatcttactctccagatggcaaagaatctccaagtgataagaaatccaaaactgatggttcccagaagactgagagttcaaccgaaggtaaagaacaagaagagaagtccggtgaagatggtgagaaagacacaaaggatgaccagacagagcaggaacctaatatgcttcttgaatctgaagatgagctacttgtagatgaagaagaagcagcagcactgctagaaagtggcagttcagtgggagacgagaccgatcttgctaatttaggtgatgtggcttctgatgggaaaaaggaaccatcagataaagctgtgaaaaaagatggaagtgcttcagcagcagcaaagaaaaagcttaaaaaggtggacaagatcgaggaacttgatcaagaaaacgaagcagcgttggaaaatggaattaaaaatgaggaaaacacagaaccaggtgctgaatcttctgagaacgctgatgatcccaacaaagatacaagtgaaaacgcagatggtcaaagtgatgagaacaaggacgactatacaatcccagatgagtatagaattggaccatatcagcccaatgttcctgttggtatagactatgtgatacctaaaacagggttttactgtaagctgtgttcactcttttatacaaatgaagaagttgcaaagaatactcattgcagcagccttcctcattatcagaaattaaagaaatttctgaataaattggcagaagaacgcagacagaagaaggaaacttaagatgtgcaaggagatttaatgatttcaaagaaaataatggttctttgtttttaatgttaaccttttttaaatacaatactgatagttagaagaaaactattgtactcttttgttttagtggagaaataatagatgtctgttcatgtgttaagtgttatagcaaaaaaaatacacatatggttaagttaatgaatagtttttgttttatcagaatggcaacagacagaagtactttgtagagattgacttcctaagctacttaagacaacttgcaccactaagaaaaaaatgtagaaccatttggaaaaatgaaatttagtagttccaagtttcaaagaaatgtcaacattttattccattcaataaagaacaaaaccaatagtgtttttattactttcatctgaaacattccatgttttaatctgagccttgcagactttcatttggagtttgaacccgttttggttgcatttcatttttggagaacttaattaacgtgagattggcaattgaaatgcaggtgcagttttctgttaatgtcatgctgttgtttaggtaataagaaatattaagtaattggctttagattttgtaatttttttccctg

SEQ ID NO: 151838 - DNA, 444 bp, Homo sapiens
  Payload ID: 9886
  Gene Symbol: MATR3
  Gene Name: matrin 3
  ENST ID: ENST00000513678
  CDS Start-End: 187-444
gttcttgggctgcagccgctgccgccgcttctcgccagcgccgttgctgcgggggattgtgggagtctccgcgtcccgctcgctgggagagaggtacctctccttttccctctccctttccctaaggagtggagtcaacatatcaatggagcaagtcacagtcgtcgatgccagcttcttcttgaaatgggtgatccattcatgttgcagcagtctacaaatccagcaccaggaattctgggacctccacctccctcatttcatcttgggggaccagcagttggaccaagaggaaatctgggtgctggaaatggaaacctgcaaggacctagacacatgcagaaaggcagagtggaaactagcagagttgttcacatcatggattttcaacgagggaaaaacttgagataccagctattacagctggtagaaccatttggagtc

SEQ ID NO: 151839 - DNA, 575 bp, Homo sapiens
  Payload ID: 9886
  Gene Symbol: MATR3
  Gene Name: matrin 3
  ENST ID: ENST00000512876
  CDS Start-End: 202-575
gggtttgttcttgggctgcagccgctgccgccgcttctcgccagcgccgttgctgcgggggattgtgggagtctccgcgtcccgctcgctgggagagaggagtggagtcaacatatcaatggagcaagtcacagtcgtcgatgccagcttcttcttgaaatctacccagaatggaatcctgacaatgatacaggacacacaatgggtgatccattcatgttgcagcagtctacaaatccagcaccaggaattctgggacctccacctccctcatttcatcttgggggaccagcagttggaccaagaggaaatctgggtgctggaaatggaaacctgcaaggacctagacacatgcagaaaggcagagtggaaactagcagagttgttcacatcatggattttcaacgagggaaaaacttgagataccagctattacagctggtagaaccatttggagtcatttcaaatcatctgattctaaataaaattaatgaggcatttattgaaatggcaaccacagaggatgctcaggccgcagtggattattacacaaccacaccagcgttagtatttgg

SEQ ID NO: 151840 - DNA, 455 bp, Homo sapiens
  Payload ID: 9886
  Gene Symbol: MATR3
  Gene Name: matrin 3
  ENST ID: ENST00000511378
  CDS Start-End: 429-455
tctccttttccctctccctttccctaaggtaggcgtgaagcgggtaagagtcggggtcgggtggctgggggttctccgtgtccgccgggaggggacaacgacggcgacaggggctgcggggagccggcggcgcgcctttcttgctcgctcccgctctgcctccctccgcgttgcgtatgtgagccgcctgatcggcggccgccatgttaggagcgcagtggcggcgcaaccagccttctagggcggcggagagttgtctgctggttctcagcttgaagaagattctgcagtccttattgatcctttttcttggcgttaccatttttgaagcaaagttaacctagctttctagtttgagctttctttttggccgtctttaaaaaaatttttttttttaatctataaaatagacaagagctagttctacaatgtccaagtcattccagcagtcatct

SEQ ID NO: 151841 - DNA, 2664 bp, Homo sapiens
  Payload ID: 9886
  Gene Symbol: MATR3
  Gene Name: matrin 3
  ENST ID: ENST00000502499
  CDS Start-End: 125-1654
gttgctgcgggggattgtgggagtctccgcgtcccgctcgctgggagagaggtacctctccttttccctctccctttccctaagctacccagaatggaatcctgacaatgatacaggacacacaatgggtgatccattcatgttgcagcagtctacaaatccagcaccaggaattctgggacctccacctccctcatttcatcttgggggaccagcagttggaccaagaggaaatctgggtgctggaaatggaaacctgcaaggacctagacacatgcagaaaggcagagtggaaactagcagagttgttcacatcatggattttcaacgagggaaaaacttgagataccagctattacagctggtagaaccatttggagtcatttcaaatcatctgattctaaataaaattaatgaggcatttattgaaatggcaaccacagaggatgctcaggccgcagtggattattacacaaccacaccagcgttagtatttggcaagccagtgagagttcatttatcccagaagtataaaagaataaagaaacctgaaggaaagccagatcagaagtttgatcaaaagcaagagcttggacgtgtgatacatctcagcaatttgccgcattctggctattctgatagtgctgttctcaagcttgctgagccttatgggaaaataaagaattacatattgatgaggatgaaaagtcaggcttttattgagatggagacaagagaagatgcaatggcaatggttgaccattgtttgaaaaaagccctttggtttcaggggagatgtgtgaaggttgacctgtctgagaaatataaaaaactggttctgaggattccaaacagaggcattgatttactgaaaaaagataaatcccgaaaaagatcttactctccagatggcaaagaatctccaagtgataagaaatccaaaactgatggttcccagaagactgagagttcaaccgaaggtaaagaacaagaagagaagtccggtgaagatggtgagaaagacacaaaggatgaccagacagagcaggaacctaatatgcttcttgaatctgaagatgagctacttgtagatgaagaagaagcagcagcactgctagaaagtggcagttcagtgggagacgagaccgatcttgctaatttaggtgatgtggcttctgatgggaaaaaggaaccatcagataaagctgtgaaaaaagatggaagtgcttcagcagcagcaaagaaaaagcttaaaaaggtggacaagatcgaggaacttgatcaagaaaacgaagcagcgttggaaaatggaattaaaaatgaggaaaacacagaaccaggtgctgaatcttctgagaacgctgatgatcccaacaaagatacaagtgaaaacgcagatggtcaaagtgatgagaacaaggacgactatacaatcccagatgagtatagaattggaccatatcagcccaatgttcctgttggtatagactatgtgatacctaaaacagggttttactgtaagctgtgttcactcttttatacaaatgaagaagttgcaaagaatactcattgcagcagccttcctcattatcagaaattaaagaaatttctgaataaattggcagaagaacgcagacagaagaaggaaacttaagatgtgcaaggagatttaatgatttcaaagaaaataatggttctttgtttttaatgttaaccttttttaaatacaatactgatagttagaagaaaactattgtactcttttgttttagtggagaaataatagatgtctgttcatgtgttaagtgttatagcaaaaaaaatacacatatggttaagttaatgaatagtttttgttttatcagaatggcaacagacagaagtactttgtagagattgacttcctaagctacttaagacaacttgcaccactaagaaaaaaatgtagaaccatttggaaaaatgaaatttagtagttccaagtttcaaagaaatgtcaacattttattccattcaataaagaacaaaaccaatagtgtttttattactttcatctgaaacattccatgttttaatctgagccttgcagactttcatttggagtttgaacccgttttggttgcatttcatttttggagaacttaattaacgtgagattggcaattgaaatgcaggtgcagttttctgttaatgtcatgctgttgtttaggtaataagaaatattaagtaattggctttagattttgtaatttttttccctgagttcctgctagatttcgtattctagtagtcaatgtattttcagtgaaatgcaaaaatattcccgttatctttgaccagtattaatttttgagatcttactgcttgtcacttgaatcccgtgattgtcatacatctctggtataagcaacatttgatttttgaagtgtgtagaccatctcttcatattttcaagatgtaattttacatttctgcatttttaaaacagtttggccataatcctagatgcacgcttctaattcatgtacctgcacatgtgacctttgtgaacagaaatttgcatgtataatttgtgtttacttgtaactttctggttatatactgcttatatctgtggattcaagttactgaagtgaataccaataaaaagaaaaccctaggcca

SEQ ID NO: 151842 - DNA, 3040 bp, Homo sapiens
  Payload ID: 9886
  Gene Symbol: MATR3
  Gene Name: matrin 3
  ENST ID: ENST00000510056
  CDS Start-End: 254-2638
gggggattgtgggagtctccgcgtcccgctcgctgggagagaggtacctctccttttccctctccctttccctaagagttgtctgctggttctcagcttgaagaagattctgcagtccttattgatcctttttcttggcgttaccatttttgaagcaaagttaacctagctttctagtttgagctttctttttggccgtctttaaaaaaatttttttttttaatctataaaatagacaagagctagttctacaatgtccaagtcattccagcagtcatctctcagtagggactcacagggtcatgggcgtgacctgtctgcggcaggaataggccttcttgctgctgctacccagtctttaagtatgccagcatctcttggaaggatgaaccagggtactgcacgccttgctagtttaatgaatcttggaatgagttcttcattgaatcaacaaggagctcatagtgcactgtcttctgctagtacttcttcccataatttgcagtctatatttaacattggaagtagaggtccactccctttatcttctcaacaccgtggagatgcagaccaggccagtaacattttggccagctttggtctgtctgctagagacttagatgaactgagtcgttatccagaggacaagattactcctgagaatttgccccaaatccttctacagcttaaaaggaggagaactgaagaaggccctaccttgagttatggtagagatggcagatctgctacacgggagccaccatacagagtacctagggatgattgggaagaaaaaaggcactttagaagagatagttttgatgatcgtggtcctagtctcaacccagtgcttgattatgaccatggaagtcgttctcaagaatctggttattatgacagaatggattatgaagatgacagattaagagatggagaaaggtgtagggatgattctttttttggtgagacctcgcataactatcataaatttgacagtgagtatgagagaatgggacgtggtcctggccccttacaagagagatctctctttgagaaaaagagaggcgctcctccaagtagcaatattgaagacttccatggactcttaccgaagggttatccccatctgtgctctatatgtgatttgccagttcattctaataaggagtggagtcaacatatcaatggagcaagtcacagtcgtcgatgccagcttcttcttgaaatctacccagaatggaatcctgacaatgatacaggacacacaatgggtgatccattcatgttgcagcagtctacaaatccagcaccaggaattctgggacctccacctccctcatttcatcttgggggaccagcagttggaccaagaggaaatctgggtgctggaaatggaaacctgcaaggacctagacacatgcagaaaggcagagtggaaactagcagagttgttcacatcatggattttcaacgagggaaaaacttgagataccagctattacagctggtagaaccatttggagtcatttcaaatcatctgattctaaataaaattaatgaggcatttattgaaatggcaaccacagaggatgctcaggccgcagtggattattacacaaccacaccagcgttagtatttggcaagccagtgagagttcatttatcccagaagtataaaagaataaagaaacctgaaggaaagccagatcagaagtttgatcaaaagcaagagcttggacgtgtgatacatctcagcaatttgccgcattctggctattctgatagtgctgttctcaagcttgctgagccttatgggaaaataaagaattacatattgatgaggatgaaaagtcaggcttttattgagatggagacaagagaagatgcaatggcaatggttgaccattgtttgaaaaaagccctttggtttcaggggagatgtgtgaaggttgacctgtctgagaaatataaaaaactggttctgaggattccaaacagaggcattgatttactgaaaaaagataaatcccgaaaaagatcttactctccagatggcaaagaatctccaagtgataagaaatccaaaactgatggttcccagaagactgagagttcaaccgaaggtaaagaacaagaagagaagtccggtgaagatggtgagaaagacacaaaggatgaccagacagagcaggaacctaatatgcttcttgaatctgaagatgagctacttgtagatgaagaagaagcagcagcactgctagaaagtggcagttcagtgggagacgagaccgatcttgctaatttaggtgatgtggcttctgatgggaaaaaggaaccatcagataaagctgtgaaaaaagatggaagtgcttcagcagcagcaaagaaaaagcttaaaaaggtggacaagatcgaggaacttgatcaagaaaacgaagcagcgttggaaaatggaattaaaaatgaggaaaacacagaaccaggtgctgaatcttctgagaacgctgatgatcccaacaaagatacaagtgaaaacgcagatggtcaaagtgatgagaacaaggacgactatacaatcccagatgagtatagaattggaccatatcagcccaatgttcctgttgaaatttctgaataaattggcagaagaacgcagacagaagaaggaaacttaagatgtgcaaggagatttaatgatttcaaagaaaataatggttctttgtttttaatgttaaccttttttaaatacaatactgatagttagaagaaaactattgtactcttttgttttagtggagaaataatagatgtctgttcatgtgttaagtgttatagcaaaaaaaatacacatatggttaagttaatgaatagtttttgttttatcagaatggcaacagacagaagtactttgtagagattgacttcctaagctacttaagacaacttgcaccactaagaaaaaaatgtagaaccatttggaaaaatgaaatttagtagttccaagtttcaaagaaatgtcaacattttattccattcaata

SEQ ID NO: 151843 - DNA, 564 bp, Homo sapiens
  Payload ID: 9886
  Gene Symbol: MATR3
  Gene Name: matrin 3
  ENST ID: ENST00000514488
  CDS Start-End: 265-564
atcgcgtaaaaatggccgaaaaatgaaacgttaacgcttgtttttcgtactgcgtcgtggaacaagccgcctgcagtacagtgcgagagttgtctgctggttctcagcttgaagaagattctgcagtccttattgatcctttttcttggcgttaccatttttgaagcaaagttaacctagctttctagtttgagctttctttttggccgtctttaaaaaaatttttttttttaatctataaaatagacaagagctagttctacaatgtccaagtcattccagcagtcatctctcagtagggactcacagggtcatgggcgtgacctgtctgcggcaggaataggccttcttgctgctgctacccagtctttaagtatgccagcatctcttggaaggatgaaccagggtactgcacgccttgctagtttaatgaatcttggaatgagttcttcattgaatcaacaaggagctcatagtgcactgtcttctgctagtacttcttcccataatttgcagtctatatttaacattggaagtagaggtccactccctttatcttctcaa

SEQ ID NO: 151844 - DNA, 532 bp, Homo sapiens
  Payload ID: 9886
  Gene Symbol: MATR3
  Gene Name: matrin 3
  ENST ID: ENST00000514528
  CDS Start-End: 17-532
ctgatcggcggccgccatgttaggagcgcagtggcggcgcaaccagccttctagggcggcggaggtgagcggtccgggagggaaacacgcggccggccaagggcccagggtgcggcgggagattttgggtgaagaggagtggagtcaacatatcaatggagcaagtcacagtcgtcgatgccagcttcttcttgaaatctacccagaatggaatcctgacaatgatacaggacacacaatgggtgatccattcatgttgcagcagtctacaaatccagcaccaggaattctgggacctccacctccctcatttcatcttgggggaccagcagttggaccaagaggaaatctgggtgctggaaatggaaacctgcaaggacctagacacatgcagaaaggcagagtggaaactagcagagttgttcacatcatggattttcaacgagggaaaaacttgagataccagctattacagctggtagaaccatttggagtcatttcaaatcatctgattctaaataaaattaatgag

SEQ ID NO: 151845 - DNA, 3970 bp, Homo sapiens
  Payload ID: 9887
  Gene Symbol:
  Gene Name: matrin 3 [Source:EntrezGene
  Acc:9782]
  ENST ID: ENST00000361059
  CDS Start-End: 428-2971
ctttcccctccggcctctgccggtgctgctgcgccctgcggagctccgaacacgtgcgcagaggctggctgtggcagatgcaactgcaggatgacttgaaagtagggcatccttcacccatctgaagggaggaaatagtggcaggtgacagtctgcatgtgcagttttcagatgccttcacctgaatgacatctacctccatcaggaccccagatgtctgacagccctgtgtgacaccaagataagtaacagttgtctgctggttctcagcttgaagaagattctgcagtccttattgatcctttttcttggcgttaccatttttgaagcaaagttaacctagctttctagtttgagctttctttttggccgtctttaaaaaaatttttttttttaatctataaaatagacaagagctagttctacaatgtccaagtcattccagcagtcatctctcagtagggactcacagggtcatgggcgtgacctgtctgcggcaggaataggccttcttgctgctgctacccagtctttaagtatgccagcatctcttggaaggatgaaccagggtactgcacgccttgctagtttaatgaatcttggaatgagttcttcattgaatcaacaaggagctcatagtgcactgtcttctgctagtacttcttcccataatttgcagtctatatttaacattggaagtagaggtccactccctttatcttctcaacaccgtggagatgcagaccaggccagtaacattttggccagctttggtctgtctgctagagacttagatgaactgagtcgttatccagaggacaagattactcctgagaatttgccccaaatccttctacagcttaaaaggaggagaactgaagaaggccctaccttgagttatggtagagatggcagatctgctacacgggagccaccatacagagtacctagggatgattgggaagaaaaaaggcactttagaagagatagttttgatgatcgtggtcctagtctcaacccagtgcttgattatgaccatggaagtcgttctcaagaatctggttattatgacagaatggattatgaagatgacagattaagagatggagaaaggtgtagggatgattctttttttggtgagacctcgcataactatcataaatttgacagtgagtatgagagaatgggacgtggtcctggccccttacaagagagatctctctttgagaaaaagagaggcgctcctccaagtagcaatattgaagacttccatggactcttaccgaagggttatccccatctgtgctctatatgtgatttgccagttcattctaataaggagtggagtcaacatatcaatggagcaagtcacagtcgtcgatgccagcttcttcttgaaatctacccagaatggaatcctgacaatgatacaggacacacaatgggtgatccattcatgttgcagcagtctacaaatccagcaccaggaattctgggacctccacctccctcatttcatcttgggggaccagcagttggaccaagaggaaatctgggtgctggaaatggaaacctgcaaggacctagacacatgcagaaaggcagagtggaaactagcagagttgttcacatcatggattttcaacgagggaaaaacttgagataccagctattacagctggtagaaccatttggagtcatttcaaatcatctgattctaaataaaattaatgaggcatttattgaaatggcaaccacagaggatgctcaggccgcagtggattattacacaaccacaccagcgttagtatttggcaagccagtgagagttcatttatcccagaagtataaaagaataaagaaacctgaaggaaagccagatcagaagtttgatcaaaagcaagagcttggacgtgtgatacatctcagcaatttgccgcattctggctattctgatagtgctgttctcaagcttgctgagccttatgggaaaataaagaattacatattgatgaggatgaaaagtcaggcttttattgagatggagacaagagaagatgcaatggcaatggttgaccattgtttgaaaaaagccctttggtttcaggggagatgtgtgaaggttgacctgtctgagaaatataaaaaactggttctgaggattccaaacagaggcattgatttactgaaaaaagataaatcccgaaaaagatcttactctccagatggcaaagaatctccaagtgataagaaatccaaaactgatggttcccagaagactgagagttcaaccgaaggtaaagaacaagaagagaagtccggtgaagatggtgagaaagacacaaaggatgaccagacagagcaggaacctaatatgcttcttgaatctgaagatgagctacttgtagatgaagaagaagcagcagcactgctagaaagtggcagttcagtgggagacgagaccgatcttgctaatttaggtgatgtggcttctgatgggaaaaaggaaccatcagataaagctgtgaaaaaagatggaagtgcttcagcagcagcaaagaaaaagcttaaaaaggtggacaagatcgaggaacttgatcaagaaaacgaagcagcgttggaaaatggaattaaaaatgaggaaaacacagaaccaggtgctgaatcttctgagaacgctgatgatcccaacaaagatacaagtgaaaacgcagatggtcaaagtgatgagaacaaggacgactatacaatcccagatgagtatagaattggaccatatcagcccaatgttcctgttggtatagactatgtgatacctaaaacagggttttactgtaagctgtgttcactcttttatacaaatgaagaagttgcaaagaatactcattgcagcagccttcctcattatcagaaattaaagaaatttctgaataaattggcagaagaacgcagacagaagaaggaaacttaagatgtgcaaggagatttaatgatttcaaagaaaataatggttctttgtttttaatgttaaccttttttaaatacaatactgatagttagaagaaaactattgtactcttttgttttagtggagaaataatagatgtctgttcatgtgttaagtgttatagcaaaaaaaatacacatatggttaagttaatgaatagtttttgttttatcagaatggcaacagacagaagtactttgtagagattgacttcctaagctacttaagacaacttgcaccactaagaaaaaaatgtagaaccatttggaaaaatgaaatttagtagttccaagtttcaaagaaatgtcaacattttattccattcaataaagaacaaaaccaatagtgtttttattactttcatctgaaacattccatgttttaatctgagccttgcagactttcatttggagtttgaacccgttttggttgcatttcatttttggagaacttaattaacgtgagattggcaattgaaatgcaggtgcagttttctgttaatgtcatgctgttgtttaggtaataagaaatattaagtaattggctttagattttgtaatttttttccctgagttcctgctagatttcgtattctagtagtcaatgtattttcagtgaaatgcaaaaatattcccgttatctttgaccagtattaatttttgagatcttactgcttgtcacttgaatcccgtgattgtcatacatctctggtataagcaacatttgatttttgaagtgtgtagaccatctcttcatattttcaagatgtaattttacatttctgcatttttaaaacagtttggccataatcctagatgcacgcttctaattcatgtacctgcacatgtgacctttgtgaacagaaatttgcatgtataatttgtgtttacttgtaactttctggttatatactgcttatatctgtggattcaagttactgaagtgaataccaataaaaagaaa

SEQ ID NO: 151846 - DNA, 5513 bp, Homo sapiens
  Payload ID: 9887
  Gene Symbol:
  Gene Name: matrin 3 [Source:EntrezGene
  Acc:9782]
  ENST ID: ENST00000394800
  CDS Start-End: 550-3237
tttcccctccggcctctgccggtgctgctgcgccctgcggagctccgaacacgtgcgcagaggctggctgtggcagatgcaactgcaggatgacttgaaagtagggcatccttcacccatctgaagggaggaaatagtggcaggtgacagtctgcatgtgcagttttcagatgccttcacctgaatgacatctacctccatcaggaccccagatgtctgacagccctgtgtgacaccaagataagtaacgaggttgacaaacagccttttcgggaatgggactcgaactcgtaagccacgtctgttcctccatttcccgcctcagctggatgacggagagggatctccgggattaaagaacaacgaccgcagagttgtctgctggttctcagcttgaagaagattctgcagtccttattgatcctttttcttggcgttaccatttttgaagcaaagttaacctagctttctagtttgagctttctttttggccgtctttaaaaaaatttttttttttaatctataaaatagacaagagctagttctacaatgtccaagtcattccagcagtcatctctcagtagggactcacagggtcatgggcgtgacctgtctgcggcaggaataggccttcttgctgctgctacccagtctttaagtatgccagcatctcttggaaggatgaaccagggtactgcacgccttgctagtttaatgaatcttggaatgagttcttcattgaatcaacaaggagctcatagtgcactgtcttctgctagtacttcttcccataatttgcagtctatatttaacattggaagtagaggtccactccctttatcttctcaacaccgtggagatgcagaccaggccagtaacattttggccagctttggtctgtctgctagagacttagatgaactgagtcgttatccagaggacaagattactcctgagaatttgccccaaatccttctacagcttaaaaggaggagaactgaagaaggccctaccttgagttatggtagagatggcagatctgctacacgggagccaccatacagagtacctagggatgattgggaagaaaaaaggcactttagaagagatagttttgatgatcgtggtcctagtctcaacccagtgcttgattatgaccatggaagtcgttctcaagaatctggttattatgacagaatggattatgaagatgacagattaagagatggagaaaggtgtagggatgattctttttttggtgagacctcgcataactatcataaatttgacagtgagtatgagagaatgggacgtggtcctggccccttacaagagagatctctctttgagaaaaagagaggcgctcctccaagtagcaatattgaagacttccatggactcttaccgaagggttatccccatctgtgctctatatgtgatttgccagttcattctaataaggagtggagtcaacatatcaatggagcaagtcacagtcgtcgatgccagcttcttcttgaaatctacccagaatggaatcctgacaatgatacaggacacacaatgggtgatccattcatgttgcagcagtctacaaatccagcaccaggaattctgggacctccacctccctcatttcatcttgggggaccagcagttggaccaagaggaaatctgggtgctggaaatggaaacctgcaaggacctagacacatgcagaaaggcagagtggaaactagcagagttgttcacatcatggattttcaacgagggaaaaacttgagataccagctattacagctggtagaaccatttggagtcatttcaaatcatctgattctaaataaaattaatgaggcatttattgaaatggcaaccacagaggatgctcaggccgcagtggattattacacaaccacaccagcgttagtatttggcaagccagtgagagttcatttatcccagaagtataaaagaataaagaaacctgaaggaaagccagatcagaagtttgatcaaaagcaagagcttggacgtgtgatacatctcagcaatttgccgcattctggctattctgatagtgctgttctcaagcttgctgagccttatgggaaaataaagaattacatattgatgaggatgaaaagtcaggcttttattgagatggagacaagagaagatgcaatggcaatggttgaccattgtttgaaaaaagccctttggtttcaggggagatgtgtgaaggttgacctgtctgagaaatataaaaaactggttctgaggattccaaacagaggcattgatttactgaaaaaagataaatcccgaaaaagatcttactctccagatggcaaagaatctccaagtgataagaaatccaaaactgatggttcccagaagactgagagttcaaccgaaggtaaagaacaagaagagaagtccggtgaagatggtgagaaagacacaaaggatgaccagacagagcaggaacctaatatgcttcttgaatctgaagatgagctacttgtagatgaagaagaagcagcagcactgctagaaagtggcagttcagtgggagacgagaccgatcttgctaatttaggtgatgtggcttctgatgggaaaaaggaaccatcagataaagctgtgaaaaaagatggaagtgcttcagcagcagcaaagaaaaagcttaaaaagcgtcgttttccagggagtatggaaggttttgtcactctagatgaggttggtgatgaggaagattcggaacttcagaaacttcgtaaatcgggcatggcatttaaatctggtgacaaaaatgatgatggtttggttgaaattaaggtggacaagatcgaggaacttgatcaagaaaacgaagcagcgttggaaaatggaattaaaaatgaggaaaacacagaaccaggtgctgaatcttctgagaacgctgatgatcccaacaaagatacaagtgaaaacgcagatggtcaaagtgatgagaacaaggacgactatacaatcccagatgagtatagaattggaccatatcagcccaatgttcctgttggtatagactatgtgatacctaaaacagggttttactgtaagctgtgttcactcttttatacaaatgaagaagttgcaaagaatactcattgcagcagccttcctcattatcagaaattaaagaaatttctgaataaattggcagaagaacgcagacagaagaaggaaacttaagatgtgcaaggagatttaatgatttcaaagaaaataatggttctttgtttttaatgttaaccttttttaaatacaatactgatagttagaagaaaactattgtactcttttgttttagtggagaaataatagatgtctgttcatgtgttaagtgttatagcaaaaaaaatacacatatggttaagttaatgaatagtttttgttttatcagaatggcaacagacagaagtactttgtagagattgacttcctaagctacttaagacaacttgcaccactaagaaaaaaatgtagaaccatttggaaaaatgaaatttagtagttccaagtttcaaagaaatgtcaacattttattccattcaataaagaacaaaaccaatagtgtttttattactttcatctgaaacattccatgttttaatctgagccttgcagactttcatttggagtttgaacccgttttggttgcatttcatttttggagaacttaattaacgtgagattggcaattgaaatgcaggtgcagttttctgttaatgtcatgctgttgtttaggtaataagaaatattaagtaattggctttagattttgtaatttttttccctgagttcctgctagatttcgtattctagtagtcaatgtattttcagtgaaatgcaaaaatattcccgttatctttgaccagtattaatttttgagatcttactgcttgtcacttgaatcccgtgattgtcatacatctctggtataagcaacatttgatttttgaagtgtgtagaccatctcttcatattttcaagatgtaattttacatttctgcatttttaaaacagtttggccataatcctagatgcacgcttctaattcatgtacctgcacatgtgacctttgtgaacagaaatttgcatgtataatttgtgtttacttgtaactttctggttatatactgcttatatctgtggattcaagttactgaagtgaataccaataaaaagaaaaccctaggccatgttaattggttatacatgtttggaatgttaaccaacgtatttgtcagttgtggtttttattcgctcttaaactttgtgcatgctttaacaatttattacttttaaatctagagtgaattctaaagactgccgctaaagatctgagttttaaaaatgttgttgctggtggatttcttgttcctgttacataactaaaagtgaggccatttgtggtttttaaaaaccttatgaattaaaaatgctacaggtgaacaaacagaagcttatgtttagagatattgatgacttaacagtacaattggaagtaatacggatgagcaagaattagttctgcagcttttcaaaataattacgtagagactcttggtatattggattatctgttgtaaacaatttttttttcttccctgacacagggtctcactctgtcacccagactggagtgcagtggcacagttctctgcaacctcagcctttgggctcaaatgaccctcctacctcagtctcctgagtagctgggactacaggctcatgccactatacctggctagtttttggtttttttgtatagatggggctttgccatgttgcccaggttgatcttgaattcctgggcccaagtgatctgctcgcttcagcctcccaaagtgctgggactgtaggcatgagccaccatccctggccaagaaacaaagttttaatttcaaaaaaatctacaaaaacaggataggcattgtctttcaaatgttcagaccccagtttattaaaggatacttcaaatagttggctaaattttatgatctctcccgttgaaaagtaggtgatgattttaatgtgacatgcacaaaaaatccttgccagtttacttctgcaatttaattttagcctttactaattacccacttctgtttaattccaatttttaacagcaggtacataaagcattatgtgcacaatggagttcttcagtgtttcctttcagtgatggctttttcatagcttcaactttgttggatttagcaagttgaaggaaagaatgctatgtttttaatacctacatttgagagcatttagaaatcagaaattataataagctgttagtgataaatctgtaacagcccttcgattacgagaaaacctctttttagtaggaatgtttccactcatgtttgctgtaaagtttaagaacatttttcctacggctatgtcagcccttagtttaatcttacattatcctacaaaagtgaatgaaacttctagaagta

SEQ ID NO: 151847 - DNA, 2243 bp, Homo sapiens
  Payload ID: 9887
  Gene Symbol:
  Gene Name: matrin 3 [Source:EntrezGene
  Acc:9782]
  ENST ID: ENST00000504203
  CDS Start-End: 352-1881
tttcccctccggcctctgccggtgctgctgcgccctgcggagctccgaacacgtgcgcagaggctggctgtggcagatgcaactgcaggatgacttgaaagtagggcatccttcacccatctgaagggaggaaatagtggcaggtgacagtctgcatgtgcagttttcagatgccttcacctgaatgacatctacctccatcaggaccccagatgtctgacagccctgtgtgacaccaagataagtaacgagtggagtcaacatatcaatggagcaagtcacagtcgtcgatgccagcttcttcttgaaatctacccagaatggaatcctgacaatgatacaggacacacaatgggtgatccattcatgttgcagcagtctacaaatccagcaccaggaattctgggacctccacctccctcatttcatcttgggggaccagcagttggaccaagaggaaatctgggtgctggaaatggaaacctgcaaggacctagacacatgcagaaaggcagagtggaaactagcagagttgttcacatcatggattttcaacgagggaaaaacttgagataccagctattacagctggtagaaccatttggagtcatttcaaatcatctgattctaaataaaattaatgaggcatttattgaaatggcaaccacagaggatgctcaggccgcagtggattattacacaaccacaccagcgttagtatttggcaagccagtgagagttcatttatcccagaagtataaaagaataaagaaacctgaaggaaagccagatcagaagtttgatcaaaagcaagagcttggacgtgtgatacatctcagcaatttgccgcattctggctattctgatagtgctgttctcaagcttgctgagccttatgggaaaataaagaattacatattgatgaggatgaaaagtcaggcttttattgagatggagacaagagaagatgcaatggcaatggttgaccattgtttgaaaaaagccctttggtttcaggggagatgtgtgaaggttgacctgtctgagaaatataaaaaactggttctgaggattccaaacagaggcattgatttactgaaaaaagataaatcccgaaaaagatcttactctccagatggcaaagaatctccaagtgataagaaatccaaaactgatggttcccagaagactgagagttcaaccgaaggtaaagaacaagaagagaagtccggtgaagatggtgagaaagacacaaaggatgaccagacagagcaggaacctaatatgcttcttgaatctgaagatgagctacttgtagatgaagaagaagcagcagcactgctagaaagtggcagttcagtgggagacgagaccgatcttgctaatttaggtgatgtggcttctgatgggaaaaaggaaccatcagataaagctgtgaaaaaagatggaagtgcttcagcagcagcaaagaaaaagcttaaaaaggtggacaagatcgaggaacttgatcaagaaaacgaagcagcgttggaaaatggaattaaaaatgaggaaaacacagaaccaggtgctgaatcttctgagaacgctgatgatcccaacaaagatacaagtgaaaacgcagatggtcaaagtgatgagaacaaggacgactatacaatcccagatgagtatagaattggaccatatcagcccaatgttcctgttggtatagactatgtgatacctaaaacagggttttactgtaagctgtgttcactcttttatacaaatgaagaagttgcaaagaatactcattgcagcagccttcctcattatcagaaattaaagaaatttctgaataaattggcagaagaacgcagacagaagaaggaaacttaagatgtgcaaggagatttaatgatttcaaagaaaataatggttctttgtttttaatgttaaccttttttaaatacaatactgatagttagaagaaaactattgtactcttttgttttagtggagaaataatagatgtctgttcatgtgttaagtgttatagcaaaaaaaatacacatatggttaagttaatgaatagtttttgttttatcagaatggcaacagacagaagtactttgtagagattgacttcctaagctacttaagacaacttgcaccactaagaaaaaaatgtagaaccatttggaaaaatgaaatttagtagttccaagtttcaaagaaatgtcaacattttattccattca

SEQ ID NO: 151848 - DNA, 750 bp, Homo sapiens
  Payload ID: 9887
  Gene Symbol:
  Gene Name: matrin 3 [Source:EntrezGene
  Acc:9782]
  ENST ID: ENST00000509644
  CDS Start-End: 508-750
ggtgctgctgcgccctgcggagctccgaacacgtgcgcagaggctggctgtggcagatgcaactgcaggatgacttgaaagtagggcatccttcacccatctgaagggaggaaatagtggcaggtgacagtctgcatgtgcagttttcagatcccaatcgcagtgcttggcacatggcaggacctccctgaatgttgcataaaacaactgaaaacacagaaggggattcctgttaaagggtttgacaacagggtctgcaattagtgcttccacgcctgttttgcagtcaatattcaactgatacgtcttctacctggagtgcctagatgccttcacctgaatgacatctacctccatcaggaccccagatgtctgacagccctgtgtgacaccaagataagtaacgagtggagtcaacatatcaatggagcaagtcacagtcgtcgatgccagcttcttcttgaaatctacccagaatggaatcctgacaatgatacaggacacacaatgggtgatccattcatgttgcagcagtctacaaatccagcaccaggaattctgggacctccacctccctcatttcatcttgggggaccagcagttggaccaagaggaaatctgggtgctggaaatggaaacctgcaaggacctagacacatgcagaaaggcagagtggaaactagcagagttgttcacatcatggattttcaacgagggaaaaacttgagataccagctattacagctggta

SEQ ID NO: 151849 - DNA, 587 bp, Homo sapiens
  Payload ID: 9887
  Gene Symbol:
  Gene Name: matrin 3 [Source:EntrezGene
  Acc:9782]
  ENST ID: ENST00000514694
  CDS Start-End: 266-587
tttcccctccggcctctgccggtgctgctgcgccctgcggagctccgaacacgtgcgcagaggctggctgtggcagatgcaactgcagagttgtctgctggttctcagcttgaagaagattctgcagtccttattgatcctttttcttggcgttaccatttttgaagcaaagttaacctagctttctagtttgagctttctttttggccgtctttaaaaaaatttttttttttaatctataaaatagacaagagctagttctacaatgtccaagtcattccagcagtcatctctcagtagggactcacagggtcatgggcgtgacctgtctgcggcaggaataggccttcttgctgctgctacccagtctttaagtatgccagcatctcttggaaggatgaaccagggtactgcacgccttgctagtttaatgaatcttggaatgagttcttcattgaatcaacaaggagctcatagtgcactgtcttctgctagtacttcttcccataatttgcagtctatatttaacattggaagtagaggtccactccctttatcttctcaacaccgtggagatgcagaccagg

SEQ ID NO: 151850 - DNA, 4373 bp, Homo sapiens
  Payload ID: 9887
  Gene Symbol:
  Gene Name: matrin 3 [Source:EntrezGene
  Acc:9782]
  ENST ID: ENST00000502929
  CDS Start-End: 653-3340
tttcccctccggcctctgccggtgctgctgcgccctgcggagctccgaacacgtgcgcagaggctggctgtggcagatgcaactgcaggatgacttgaaagtagggcatccttcacccatctgaagggaggaaatagtggcaggtgacagtctgcatgtgcagttttcagatgccttcacctgaatgacatctacctccatcaggaccccagatgtctgacagccctgtgtgacaccaagataagtaactgtctgactctgtagcccaggctggagtgtgcagtggtgcactaggctcacggcaacctccgcctccggctcaaacgatcctcagccccgtcctccgtaccaggaggttgacaaacagccttttcgggaatgggactcgaactcgtaagccacgtctgttcctccatttcccgcctcagctggatgacggagagggatctccgggattaaagaacaacgaccgcagagttgtctgctggttctcagcttgaagaagattctgcagtccttattgatcctttttcttggcgttaccatttttgaagcaaagttaacctagctttctagtttgagctttctttttggccgtctttaaaaaaatttttttttttaatctataaaatagacaagagctagttctacaatgtccaagtcattccagcagtcatctctcagtagggactcacagggtcatgggcgtgacctgtctgcggcaggaataggccttcttgctgctgctacccagtctttaagtatgccagcatctcttggaaggatgaaccagggtactgcacgccttgctagtttaatgaatcttggaatgagttcttcattgaatcaacaaggagctcatagtgcactgtcttctgctagtacttcttcccataatttgcagtctatatttaacattggaagtagaggtccactccctttatcttctcaacaccgtggagatgcagaccaggccagtaacattttggccagctttggtctgtctgctagagacttagatgaactgagtcgttatccagaggacaagattactcctgagaatttgccccaaatccttctacagcttaaaaggaggagaactgaagaaggccctaccttgagttatggtagagatggcagatctgctacacgggagccaccatacagagtacctagggatgattgggaagaaaaaaggcactttagaagagatagttttgatgatcgtggtcctagtctcaacccagtgcttgattatgaccatggaagtcgttctcaagaatctggttattatgacagaatggattatgaagatgacagattaagagatggagaaaggtgtagggatgattctttttttggtgagacctcgcataactatcataaatttgacagtgagtatgagagaatgggacgtggtcctggccccttacaagagagatctctctttgagaaaaagagaggcgctcctccaagtagcaatattgaagacttccatggactcttaccgaagggttatccccatctgtgctctatatgtgatttgccagttcattctaataaggagtggagtcaacatatcaatggagcaagtcacagtcgtcgatgccagcttcttcttgaaatctacccagaatggaatcctgacaatgatacaggacacacaatgggtgatccattcatgttgcagcagtctacaaatccagcaccaggaattctgggacctccacctccctcatttcatcttgggggaccagcagttggaccaagaggaaatctgggtgctggaaatggaaacctgcaaggacctagacacatgcagaaaggcagagtggaaactagcagagttgttcacatcatggattttcaacgagggaaaaacttgagataccagctattacagctggtagaaccatttggagtcatttcaaatcatctgattctaaataaaattaatgaggcatttattgaaatggcaaccacagaggatgctcaggccgcagtggattattacacaaccacaccagcgttagtatttggcaagccagtgagagttcatttatcccagaagtataaaagaataaagaaacctgaaggaaagccagatcagaagtttgatcaaaagcaagagcttggacgtgtgatacatctcagcaatttgccgcattctggctattctgatagtgctgttctcaagcttgctgagccttatgggaaaataaagaattacatattgatgaggatgaaaagtcaggcttttattgagatggagacaagagaagatgcaatggcaatggttgaccattgtttgaaaaaagccctttggtttcaggggagatgtgtgaaggttgacctgtctgagaaatataaaaaactggttctgaggattccaaacagaggcattgatttactgaaaaaagataaatcccgaaaaagatcttactctccagatggcaaagaatctccaagtgataagaaatccaaaactgatggttcccagaagactgagagttcaaccgaaggtaaagaacaagaagagaagtccggtgaagatggtgagaaagacacaaaggatgaccagacagagcaggaacctaatatgcttcttgaatctgaagatgagctacttgtagatgaagaagaagcagcagcactgctagaaagtggcagttcagtgggagacgagaccgatcttgctaatttaggtgatgtggcttctgatgggaaaaaggaaccatcagataaagctgtgaaaaaagatggaagtgcttcagcagcagcaaagaaaaagcttaaaaagcgtcgttttccagggagtatggaaggttttgtcactctagatgaggttggtgatgaggaagattcggaacttcagaaacttcgtaaatcgggcatggcatttaaatctggtgacaaaaatgatgatggtttggttgaaattaaggtggacaagatcgaggaacttgatcaagaaaacgaagcagcgttggaaaatggaattaaaaatgaggaaaacacagaaccaggtgctgaatcttctgagaacgctgatgatcccaacaaagatacaagtgaaaacgcagatggtcaaagtgatgagaacaaggacgactatacaatcccagatgagtatagaattggaccatatcagcccaatgttcctgttggtatagactatgtgatacctaaaacagggttttactgtaagctgtgttcactcttttatacaaatgaagaagttgcaaagaatactcattgcagcagccttcctcattatcagaaattaaagaaatttctgaataaattggcagaagaacgcagacagaagaaggaaacttaagatgtgcaaggagatttaatgatttcaaagaaaataatggttctttgtttttaatgttaaccttttttaaatacaatactgatagttagaagaaaactattgtactcttttgttttagtggagaaataatagatgtctgttcatgtgttaagtgttatagcaaaaaaaatacacatatggttaagttaatgaatagtttttgttttatcagaatggcaacagacagaagtactttgtagagattgacttcctaagctacttaagacaacttgcaccactaagaaaaaaatgtagaaccatttggaaaaatgaaatttagtagttccaagtttcaaagaaatgtcaacattttattccattcaataaagaacaaaaccaatagtgtttttattactttcatctgaaacattccatgttttaatctgagccttgcagactttcatttggagtttgaacccgttttggttgcatttcatttttggagaacttaattaacgtgagattggcaattgaaatgcaggtgcagttttctgttaatgtcatgctgttgtttaggtaataagaaatattaagtaattggctttagattttgtaatttttttccctgagttcctgctagatttcgtattctagtagtcaatgtattttcagtgaaatgcaaaaatattcccgttatctttgaccagtattaatttttgagatcttactgcttgtcacttgaatcccgtgattgtcatacatctctggtataagcaacatttgatttttgaagtgtgtagaccatctcttcatattttcaagatgtaattttacatttctgcatttttaaaacagtttggccataatcctagatgcacgcttctaattcatgtacctgcacatgtgacctttgtgaacagaaatttgcatgtataatttgtgtttacttgtaactttctggttatatactgcttatatctgtggattcaagttactgaagtgaataccaataaaaagaaaaccctaggccatgttaattggttatacatgtttg

SEQ ID NO: 151851 - DNA, 580 bp, Homo sapiens
  Payload ID: 9887
  Gene Symbol:
  Gene Name: matrin 3 [Source:EntrezGene
  Acc:9782]
  ENST ID: ENST00000506147
  CDS Start-End: 392-580
agcgttccgggggcgctcagtgtgggcaggcaggaagcctggctccactaggacacacagattctctcctgagcagctgcgaactatgcgccccttctacccttaagagatgggatgggagtccaacaaacccagccattgctcagaccccagcccttctctcctctaagaagcaggttcacctctgccaccgcactcgcatttttttttttttttaaagcccggcctttcctaggcggggtcaagggccccgcccaccgaagccacgcccagtagccgccccggggcggggttcccctcggctcccggctgccctttcccctccggcctctgccggtgctgctgcgccctgcggagctccgaacacgtgcgcagaggctggctgtggcagatgcaactgcaggagtggagtcaacatatcaatggagcaagtcacagtcgtcgatgccagcttcttcttgaaatctacccagaatggaatcctgacaatgatacaggacacacaatgggtgatccattcatgttgcagcagtctacaaatccagcaccaggaattctgggacctccacctccctcattt

SEQ ID NO: 151852 - DNA, 3249 bp, Homo sapiens
  Payload ID: 9887
  Gene Symbol:
  Gene Name: matrin 3 [Source:EntrezGene
  Acc:9782]
  Uniprot ID: P43243
  ENST ID: ENST00000509990
  CDS Start-End: 697-3240
gcagcaacggaaaggcgccacgctcgtgagcggaaccagcgttccgggggcgctcagtgtgggcaggcaggaagcctggctccactaggacacacagattctctcctgagcagctgcgaactatgcgccccttctacccttaagagatgggatgggagtccaacaaacccagccattgctcagaccccagcccttctctcctctaagaagcaggttcacctctgccaccgcactcgcatttttttttttttttaaagcccggcctttcctaggcggggtcaagggccccgcccaccgaagccacgcccagtagccgccccggggcggggttcccctcggctcccggctgccctttcccctccggcctctgccggtgctgctgcgccctgcggagctccgaacacgtgcgcagaggctggctgtggcagatgcaactgcagatgccttcacctgaatgacatctacctccatcaggaccccagatgtctgacagccctgtgtgacaccaagataagtaacagttgtctgctggttctcagcttgaagaagattctgcagtccttattgatcctttttcttggcgttaccatttttgaagcaaagttaacctagctttctagtttgagctttctttttggccgtctttaaaaaaatttttttttttaatctataaaatagacaagagctagttctacaatgtccaagtcattccagcagtcatctctcagtagggactcacagggtcatgggcgtgacctgtctgcggcaggaataggccttcttgctgctgctacccagtctttaagtatgccagcatctcttggaaggatgaaccagggtactgcacgccttgctagtttaatgaatcttggaatgagttcttcattgaatcaacaaggagctcatagtgcactgtcttctgctagtacttcttcccataatttgcagtctatatttaacattggaagtagaggtccactccctttatcttctcaacaccgtggagatgcagaccaggccagtaacattttggccagctttggtctgtctgctagagacttagatgaactgagtcgttatccagaggacaagattactcctgagaatttgccccaaatccttctacagcttaaaaggaggagaactgaagaaggccctaccttgagttatggtagagatggcagatctgctacacgggagccaccatacagagtacctagggatgattgggaagaaaaaaggcactttagaagagatagttttgatgatcgtggtcctagtctcaacccagtgcttgattatgaccatggaagtcgttctcaagaatctggttattatgacagaatggattatgaagatgacagattaagagatggagaaaggtgtagggatgattctttttttggtgagacctcgcataactatcataaatttgacagtgagtatgagagaatgggacgtggtcctggccccttacaagagagatctctctttgagaaaaagagaggcgctcctccaagtagcaatattgaagacttccatggactcttaccgaagggttatccccatctgtgctctatatgtgatttgccagttcattctaataaggagtggagtcaacatatcaatggagcaagtcacagtcgtcgatgccagcttcttcttgaaatctacccagaatggaatcctgacaatgatacaggacacacaatgggtgatccattcatgttgcagcagtctacaaatccagcaccaggaattctgggacctccacctccctcatttcatcttgggggaccagcagttggaccaagaggaaatctgggtgctggaaatggaaacctgcaaggacctagacacatgcagaaaggcagagtggaaactagcagagttgttcacatcatggattttcaacgagggaaaaacttgagataccagctattacagctggtagaaccatttggagtcatttcaaatcatctgattctaaataaaattaatgaggcatttattgaaatggcaaccacagaggatgctcaggccgcagtggattattacacaaccacaccagcgttagtatttggcaagccagtgagagttcatttatcccagaagtataaaagaataaagaaacctgaaggaaagccagatcagaagtttgatcaaaagcaagagcttggacgtgtgatacatctcagcaatttgccgcattctggctattctgatagtgctgttctcaagcttgctgagccttatgggaaaataaagaattacatattgatgaggatgaaaagtcaggcttttattgagatggagacaagagaagatgcaatggcaatggttgaccattgtttgaaaaaagccctttggtttcaggggagatgtgtgaaggttgacctgtctgagaaatataaaaaactggttctgaggattccaaacagaggcattgatttactgaaaaaagataaatcccgaaaaagatcttactctccagatggcaaagaatctccaagtgataagaaatccaaaactgatggttcccagaagactgagagttcaaccgaaggtaaagaacaagaagagaagtccggtgaagatggtgagaaagacacaaaggatgaccagacagagcaggaacctaatatgcttcttgaatctgaagatgagctacttgtagatgaagaagaagcagcagcactgctagaaagtggcagttcagtgggagacgagaccgatcttgctaatttaggtgatgtggcttctgatgggaaaaaggaaccatcagataaagctgtgaaaaaagatggaagtgcttcagcagcagcaaagaaaaagcttaaaaaggtggacaagatcgaggaacttgatcaagaaaacgaagcagcgttggaaaatggaattaaaaatgaggaaaacacagaaccaggtgctgaatcttctgagaacgctgatgatcccaacaaagatacaagtgaaaacgcagatggtcaaagtgatgagaacaaggacgactatacaatcccagatgagtatagaattggaccatatcagcccaatgttcctgttggtatagactatgtgatacctaaaacagggttttactgtaagctgtgttcactcttttatacaaatgaagaagttgcaaagaatactcattgcagcagccttcctcattatcagaaattaaagaaatttctgaataaattggcagaagaacgcagacagaagaaggaaacttaagatgtgcaa

SEQ ID NO: 151853 - DNA, 579 bp, Homo sapiens
  Payload ID: 9887
  Gene Symbol:
  Gene Name: matrin 3 [Source:EntrezGene
  Acc:9782]
  ENST ID: ENST00000512107
  CDS Start-End: 560-579
aggacacacagattctctcctgagcagctgcgaactatgcgccccttctacccttaagagatgggatgggagtccaacaaacccagccattgctcagaccccagcccttctctcctctaagaagcaggttcacctctgccaccgcactcgcatttttttttttttttaaagcccggcctttcctaggcggggtcaagggccccgcccaccgaagccacgcccagtagccgccccggggcggggttcccctcggctcccggctgccctttcccctccggcctctgccggtgctgctgcgccctgcggagctccgaacacgtgcgcgtgaagaggctggctgtggcagatgcaactgcaggatgacttgaaagtagggcatccttcacccatctgaagggaggaaatagtggcaggtgacagtctgcatgtgcagttttcagatgccttcacctgaatgacatctacctccatcaggaccccagatgtctgacagccctgtgtgacaccaagataagtaacctacccagaatggaatcctgacaatgatacaggacacacaatgggtgatccattcatgtt

SEQ ID NO: 151854 - DNA, 664 bp, Homo sapiens
  Payload ID: 9887
  Gene Symbol:
  Gene Name: matrin 3 [Source:EntrezGene
  Acc:9782]
  ENST ID: ENST00000505016
  CDS Start-End: 524-664
ctgcgccctgcggagctccgaacacgtgcgcagaggctggctgtggcagatgcaactgcaggatgacttgaaagtagggcatccttcacccatctgaagggaggaaatagtggcaggtgacagtctgcatgtgcagttttcagatgccttcacctgaatgacatctacctccatcaggaccccagatgtctgacagccctgtgtgacaccaagataagtaacaatctggctgctgactaccctattggacaactccaatattagagaacatttccaccaattcagaaagtttattatgcactgctgttctagagcagggatcagcaaacttgctgtaaagagccagagttgtctgctggttctcagcttgaagaagattctgcagtccttattgatcctttttcttggcgttaccatttttgaagcaaagttaacctagctttctagtttgagctttctttttggccgtctttaaaaaaatttttttttttaatctataaaatagacaagagctagttctacaatgtccaagtcattccagcagtcatctctcagtagggactcacagggtcatgggcgtgacctgtctgcggcaggaataggccttcttgctgctgctacccagtctttaagtatgccagcatctcttggaaggatgaaccag

SEQ ID NO: 151855 - DNA, 589 bp, Homo sapiens
  Payload ID: 9887
  Gene Symbol:
  Gene Name: matrin 3 [Source:EntrezGene
  Acc:9782]
  ENST ID: ENST00000502394
  CDS Start-End: 291-589
gtttcattgcagagaggctggctgtggcagatgcaactgcaggtgccgtcatttaatttcccagacacttgacctccttctgatttgtgtactccctccaaggctgagttgcaagttgtctgctggttctcagcttgaagaagattctgcagtccttattgatcctttttcttggcgttaccatttttgaagcaaagttaacctagctttctagtttgagctttctttttggccgtctttaaaaaaatttttttttttaatctataaaatagacaagagctagttctacaatgtccaagtcattccagcagtcatctctcagtagggactcacagggtcatgggcgtgacctgtctgcggcaggaataggccttcttgctgctgctacccagtctttaagtatgccagcatctcttggaaggatgaaccagggtactgcacgccttgctagtttaatgaatcttggaatgagttcttcattgaatcaacaaggagctcatagtgcactgtcttctgctagtacttcttcccataatttgcagtctatatttaacattggaagtagaggtccactccctttatcttctca

SEQ ID NO: 151856 - DNA, 3134 bp, Homo sapiens
  Payload ID: 9887
  Gene Symbol:
  Gene Name: matrin 3 [Source:EntrezGene
  Acc:9782]
  ENST ID: ENST00000620916
  CDS Start-End: 1-852
atgtccaagtcattccagcagtcatctctcagtagggactcacagggtcatgggcgtgacctgtctgcggcaggaataggccttcttgctgctgctacccagtctttaagtatgcttcttgaatctgaagatgagctacttgtagatgaagaagaagcagcagcactgctagaaagtggcagttcagtgggagacgagaccgatcttgctaatttaggtgatgtggcttctgatgggaaaaaggaaccatcagataaagctgtgaaaaaagatggaagtgcttcagcagcagcaaagaaaaagcttaaaaagcgtcgttttccagggagtatggaaggttttgtcactctagatgaggttggtgatgaggaagattcggaacttcagaaacttcgtaaatcgggcatggcatttaaatctggtgacaaaaatgatgatggtttggttgaaattaaggtggacaagatcgaggaacttgatcaagaaaacgaagcagcgttggaaaatggaattaaaaatgaggaaaacacagaaccaggtgctgaatcttctgagaacgctgatgatcccaacaaagatacaagtgaaaacgcagatggtcaaagtgatgagaacaaggacgactatacaatcccagatgagtatagaattggaccatatcagcccaatgttcctgttggtatagactatgtgatacctaaaacagggttttactgtaagctgtgttcactcttttatacaaatgaagaagttgcaaagaatactcattgcagcagccttcctcattatcagaaattaaagaaatttctgaataaattggcagaagaacgcagacagaagaaggaaacttaagatgtgcaaggagatttaatgatttcaaagaaaataatggttctttgtttttaatgttaaccttttttaaatacaatactgatagttagaagaaaactattgtactcttttgttttagtggagaaataatagatgtctgttcatgtgttaagtgttatagcaaaaaaaatacacatatggttaagttaatgaatagtttttgttttatcagaatggcaacagacagaagtactttgtagagattgacttcctaagctacttaagacaacttgcaccactaagaaaaaaatgtagaaccatttggaaaaatgaaatttagtagttccaagtttcaaagaaatgtcaacattttattccattcaataaagaacaaaaccaatagtgtttttattactttcatctgaaacattccatgttttaatctgagccttgcagactttcatttggagtttgaacccgttttggttgcatttcatttttggagaacttaattaacgtgagattggcaattgaaatgcaggtgcagttttctgttaatgtcatgctgttgtttaggtaataagaaatattaagtaattggctttagattttgtaatttttttccctgagttcctgctagatttcgtattctagtagtcaatgtattttcagtgaaatgcaaaaatattcccgttatctttgaccagtattaatttttgagatcttactgcttgtcacttgaatcccgtgattgtcatacatctctggtataagcaacatttgatttttgaagtgtgtagaccatctcttcatattttcaagatgtaattttacatttctgcatttttaaaacagtttggccataatcctagatgcacgcttctaattcatgtacctgcacatgtgacctttgtgaacagaaatttgcatgtataatttgtgtttacttgtaactttctggttatatactgcttatatctgtggattcaagttactgaagtgaataccaataaaaagaaaaccctaggccatgttaattggttatacatgtttggaatgttaaccaacgtatttgtcagttgtggtttttattcgctcttaaactttgtgcatgctttaacaatttattacttttaaatctagagtgaattctaaagactgccgctaaagatctgagttttaaaaatgttgttgctggtggatttcttgttcctgttacataactaaaagtgaggccatttgtggtttttaaaaaccttatgaattaaaaatgctacaggtgaacaaacagaagcttatgtttagagatattgatgacttaacagtacaattggaagtaatacggatgagcaagaattagttctgcagcttttcaaaataattacgtagagactcttggtatattggattatctgttgtaaacaatttttttttcttccctgacacagggtctcactctgtcacccagactggagtgcagtggcacagttctctgcaacctcagcctttgggctcaaatgaccctcctacctcagtctcctgagtagctgggactacaggctcatgccactatacctggctagtttttggtttttttgtatagatggggctttgccatgttgcccaggttgatcttgaattcctgggcccaagtgatctgctcgcttcagcctcccaaagtgctgggactgtaggcatgagccaccatccctggccaagaaacaaagttttaatttcaaaaaaatctacaaaaacaggataggcattgtctttcaaatgttcagaccccagtttattaaaggatacttcaaatagttggctaaattttatgatctctcccgttgaaaagtaggtgatgattttaatgtgacatgcacaaaaaatccttgccagtttacttctgcaatttaattttagcctttactaattacccacttctgtttaattccaatttttaacagcaggtacataaagcattatgtgcacaatggagttcttcagtgtttcctttcagtgatggctttttcatagcttcaactttgttggatttagcaagttgaaggaaagaatgctatgtttttaatacctacatttgagagcatttagaaatcagaaattataataagctgttagtgataaatctgtaacagcccttcgattacgagaaaacctctttttagtaggaatgtttccactcatgtttgctgtaaagtttaagaacatttttcctacggctatgtcagcccttagtttaatcttacattatcctacaaaagtgaatgaaacttctagaagtaccttga

SEQ ID NO: 151857 - DNA, 5282 bp, Homo sapiens
  Payload ID: 9887
  Gene Symbol:
  Gene Name: matrin 3 [Source:EntrezGene
  Acc:9782]
  Uniprot ID: P43243
  ENST ID: ENST00000618441
  CDS Start-End: 457-3000
gcgtcccgctcgctgggagagaggtacctctccttttccctctccctttccctaaggtaggcgtgaagcgggtaagagtcggggtcgggtggctgggggttctccgtgtccgccgggaggggacaacgacggcgacaggggctgcggggagccggcggcgcgcctttcttgctcgctcccgctctgcctccctccgcgttgcgtatgtgagccgcctgatcggcggccgccatgttaggagcgcagtggcggcgcaaccagccttctagggcggcggagagttgtctgctggttctcagcttgaagaagattctgcagtccttattgatcctttttcttggcgttaccatttttgaagcaaagttaacctagctttctagtttgagctttctttttggccgtctttaaaaaaatttttttttttaatctataaaatagacaagagctagttctacaatgtccaagtcattccagcagtcatctctcagtagggactcacagggtcatgggcgtgacctgtctgcggcaggaataggccttcttgctgctgctacccagtctttaagtatgccagcatctcttggaaggatgaaccagggtactgcacgccttgctagtttaatgaatcttggaatgagttcttcattgaatcaacaaggagctcatagtgcactgtcttctgctagtacttcttcccataatttgcagtctatatttaacattggaagtagaggtccactccctttatcttctcaacaccgtggagatgcagaccaggccagtaacattttggccagctttggtctgtctgctagagacttagatgaactgagtcgttatccagaggacaagattactcctgagaatttgccccaaatccttctacagcttaaaaggaggagaactgaagaaggccctaccttgagttatggtagagatggcagatctgctacacgggagccaccatacagagtacctagggatgattgggaagaaaaaaggcactttagaagagatagttttgatgatcgtggtcctagtctcaacccagtgcttgattatgaccatggaagtcgttctcaagaatctggttattatgacagaatggattatgaagatgacagattaagagatggagaaaggtgtagggatgattctttttttggtgagacctcgcataactatcataaatttgacagtgagtatgagagaatgggacgtggtcctggccccttacaagagagatctctctttgagaaaaagagaggcgctcctccaagtagcaatattgaagacttccatggactcttaccgaagggttatccccatctgtgctctatatgtgatttgccagttcattctaataaggagtggagtcaacatatcaatggagcaagtcacagtcgtcgatgccagcttcttcttgaaatctacccagaatggaatcctgacaatgatacaggacacacaatgggtgatccattcatgttgcagcagtctacaaatccagcaccaggaattctgggacctccacctccctcatttcatcttgggggaccagcagttggaccaagaggaaatctgggtgctggaaatggaaacctgcaaggacctagacacatgcagaaaggcagagtggaaactagcagagttgttcacatcatggattttcaacgagggaaaaacttgagataccagctattacagctggtagaaccatttggagtcatttcaaatcatctgattctaaataaaattaatgaggcatttattgaaatggcaaccacagaggatgctcaggccgcagtggattattacacaaccacaccagcgttagtatttggcaagccagtgagagttcatttatcccagaagtataaaagaataaagaaacctgaaggaaagccagatcagaagtttgatcaaaagcaagagcttggacgtgtgatacatctcagcaatttgccgcattctggctattctgatagtgctgttctcaagcttgctgagccttatgggaaaataaagaattacatattgatgaggatgaaaagtcaggcttttattgagatggagacaagagaagatgcaatggcaatggttgaccattgtttgaaaaaagccctttggtttcaggggagatgtgtgaaggttgacctgtctgagaaatataaaaaactggttctgaggattccaaacagaggcattgatttactgaaaaaagataaatcccgaaaaagatcttactctccagatggcaaagaatctccaagtgataagaaatccaaaactgatggttcccagaagactgagagttcaaccgaaggtaaagaacaagaagagaagtccggtgaagatggtgagaaagacacaaaggatgaccagacagagcaggaacctaatatgcttcttgaatctgaagatgagctacttgtagatgaagaagaagcagcagcactgctagaaagtggcagttcagtgggagacgagaccgatcttgctaatttaggtgatgtggcttctgatgggaaaaaggaaccatcagataaagctgtgaaaaaagatggaagtgcttcagcagcagcaaagaaaaagcttaaaaaggtggacaagatcgaggaacttgatcaagaaaacgaagcagcgttggaaaatggaattaaaaatgaggaaaacacagaaccaggtgctgaatcttctgagaacgctgatgatcccaacaaagatacaagtgaaaacgcagatggtcaaagtgatgagaacaaggacgactatacaatcccagatgagtatagaattggaccatatcagcccaatgttcctgttggtatagactatgtgatacctaaaacagggttttactgtaagctgtgttcactcttttatacaaatgaagaagttgcaaagaatactcattgcagcagccttcctcattatcagaaattaaagaaatttctgaataaattggcagaagaacgcagacagaagaaggaaacttaagatgtgcaaggagatttaatgatttcaaagaaaataatggttctttgtttttaatgttaaccttttttaaatacaatactgatagttagaagaaaactattgtactcttttgttttagtggagaaataatagatgtctgttcatgtgttaagtgttatagcaaaaaaaatacacatatggttaagttaatgaatagtttttgttttatcagaatggcaacagacagaagtactttgtagagattgacttcctaagctacttaagacaacttgcaccactaagaaaaaaatgtagaaccatttggaaaaatgaaatttagtagttccaagtttcaaagaaatgtcaacattttattccattcaataaagaacaaaaccaatagtgtttttattactttcatctgaaacattccatgttttaatctgagccttgcagactttcatttggagtttgaacccgttttggttgcatttcatttttggagaacttaattaacgtgagattggcaattgaaatgcaggtgcagttttctgttaatgtcatgctgttgtttaggtaataagaaatattaagtaattggctttagattttgtaatttttttccctgagttcctgctagatttcgtattctagtagtcaatgtattttcagtgaaatgcaaaaatattcccgttatctttgaccagtattaatttttgagatcttactgcttgtcacttgaatcccgtgattgtcatacatctctggtataagcaacatttgatttttgaagtgtgtagaccatctcttcatattttcaagatgtaattttacatttctgcatttttaaaacagtttggccataatcctagatgcacgcttctaattcatgtacctgcacatgtgacctttgtgaacagaaatttgcatgtataatttgtgtttacttgtaactttctggttatatactgcttatatctgtggattcaagttactgaagtgaataccaataaaaagaaaaccctaggccatgttaattggttatacatgtttggaatgttaaccaacgtatttgtcagttgtggtttttattcgctcttaaactttgtgcatgctttaacaatttattacttttaaatctagagtgaattctaaagactgccgctaaagatctgagttttaaaaatgttgttgctggtggatttcttgttcctgttacataactaaaagtgaggccatttgtggtttttaaaaaccttatgaattaaaaatgctacaggtgaacaaacagaagcttatgtttagagatattgatgacttaacagtacaattggaagtaatacggatgagcaagaattagttctgcagcttttcaaaataattacgtagagactcttggtatattggattatctgttgtaaacaatttttttttcttccctgacacagggtctcactctgtcacccagactggagtgcagtggcacagttctctgcaacctcagcctttgggctcaaatgaccctcctacctcagtctcctgagtagctgggactacaggctcatgccactatacctggctagtttttggtttttttgtatagatggggctttgccatgttgcccaggttgatcttgaattcctgggcccaagtgatctgctcgcttcagcctcccaaagtgctgggactgtaggcatgagccaccatccctggccaagaaacaaagttttaatttcaaaaaaatctacaaaaacaggataggcattgtctttcaaatgttcagaccccagtttattaaaggatacttcaaatagttggctaaattttatgatctctcccgttgaaaagtaggtgatgattttaatgtgacatgcacaaaaaatccttgccagtttacttctgcaatttaattttagcctttactaattacccacttctgtttaattccaatttttaacagcaggtacataaagcattatgtgcacaatggagttcttcagtgtttcctttcagtgatggctttttcatagcttcaactttgttggatttagcaagttgaaggaaagaatgctatgtttttaatacctacatttgagagcatttagaaatcagaaattataataagctgttagtgataaatctgtaacagcccttcgattacgagaaaacctctttttagtaggaatgtttccactcatgtttgctgtaaagtttaagaacatttttcctacggctatgtcagcccttagtttaatcttacattatcctacaaaagtgaatgaaacttctagaagtaccttga

SEQ ID NO: 151858 - DNA, 1986 bp, Homo sapiens
  Payload ID: 9888
  Gene Symbol: MEPE
  Gene Name: matrix extracellular phosphoglycoprotein
  Uniprot ID: Q9NQ76
  ENST ID: ENST00000361056
  CDS Start-End: 41-1618
caggtattctgaaggtgaaagataccagagattctcaaagatgcgagttttctgtgtgggactactccttttcagtgtgacctgggcagcaccaacatttcaaccacagactgagaaaactaagcaaagctgtgtggaagagcagaggcaggaagaaaaaaacaaagacaatattggttttcaccatttgggcaagagaataaatcaagagctatcatctaaagaaaatattgtccaggaaagaaagaaagatttgtccctttctgaagccagtgagaataagggaagtagtaaatctcaaaattatttcacaaatagacagagactgaataaagaatatagtatcagtaacaaagagaatactcacaatggcctgaggatgtcaatttatcctaagtcaactgggaataaagggtttgaggatggagatgatgctatcagcaaactacatgaccaagaagaatatggcgcagctctcatcagaaataacatgcaacatataatggggccagtgactgcgattaaactcctgggggaagaaaacaaagagaacacacctaggaatgttctaaacataatcccagcaagtatgaattatgctaaagcacactcgaaggataaaaagaagcctcaaagagattcccaagcccagaaaagtccagtaaaaagcaaaagcacccatcgtattcaacacaacattgactacctaaaacatctctcaaaagtcaaaaaaatccccagtgattttgaaggcagcggttatacagatcttcaagagagaggggacaatgatatatctcctttcagtggggacggccaaccttttaaggacattcctggtaaaggagaagctactggtcctgacctagaaggcaaagatattcaaacagggtttgcaggcccaagtgaagctgagagtactcatcttgacacaaaaaagccaggttataatgagatcccagagagagaagaaaatggtggaaataccattggaactagggatgaaactgcgaaagaggcagatgctgttgatgtcagccttgtagagggcagcaacgatatcatgggtagtaccaattttaaggagctccctggaagagaaggaaacagagtggatgctggcagccaaaatgctcaccaagggaaggttgagtttcattaccctcctgcaccctcaaaagagaaaagaaaagaaggcagtagtgatgcagctgaaagtaccaactataatgaaattcctaaaaatggcaaaggcagtaccagaaagggtgtagatcattctaataggaaccaagcaaccttaaatgaaaaacaaaggtttcctagtaagggcaaaagtcagggcctgcccattccttctcgtggtcttgataatgaaatcaaaaacgaaatggattcctttaatggccccagtcatgagaatataataacacatggcagaaaatatcattatgtaccccacagacaaaataattctacacggaataagggtatgccacaagggaaaggctcctggggtagacaaccccattccaacaggaggtttagttcccgtagaagggatgacagtagtgagtcatctgacagtggcagttcaagtgagagcgatggtgactagtccaccaggagttcccagcggggtgacagtctgaagacctcgtcacctgtgagttgatgtagaggagagccacctgacagctgaccaggtgaagagaggatagagtgaagaactgagtgagccaagaatcctggtctccttgggggaatttttgctatcttaatagtcacagtataaaattctattaaaggctataatgtttttaagcaaaaaaaaatcattacagatctatgaaataggtaacatttgagtaggtgtcatttaaaaatagttggtgaatgtcacaaatgccttctatgttgtttgctctgtagacatgaaaataaacaatatctctcgatgataatttgtattaagtaatctataag

SEQ ID NO: 151859 - DNA, 2123 bp, Homo sapiens
  Payload ID: 9888
  Gene Symbol: MEPE
  Gene Name: matrix extracellular phosphoglycoprotein
  Uniprot ID: Q9NQ76
  ENST ID: ENST00000395102
  CDS Start-End: 111-1781
cattgggaactctaacaaactttaaatttcagcaaaatgcccagagacttctaatcctgcaacaagaagccaggtattctgaaggtgaaagataccagagattctcaaagatgcgagttttctgtgtgggactactccttttcagtgtgacctgggcagcaccaacatttcaaccacagactgagaaaactaagcaaagctgtgtggaagagcagaggataacatacaagggtcactatgagaaacatgggcattatgtttttaagtgtgtttacatgtcacctgagaagaaaaatcaaactgatgtaaagcaggaagaaaaaaacaaagacaatattggttttcaccatttgggcaagagaataaatcaagagctatcatctaaagaaaatattgtccaggaaagaaagaaagatttgtccctttctgaagccagtgagaataagggaagtagtaaatctcaaaattatttcacaaatagacagagactgaataaagaatatagtatcagtaacaaagagaatactcacaatggcctgaggatgtcaatttatcctaagtcaactgggaataaagggtttgaggatggagatgatgctatcagcaaactacatgaccaagaagaatatggcgcagctctcatcagaaataacatgcaacatataatggggccagtgactgcgattaaactcctgggggaagaaaacaaagagaacacacctaggaatgttctaaacataatcccagcaagtatgaattatgctaaagcacactcgaaggataaaaagaagcctcaaagagattcccaagcccagaaaagtccagtaaaaagcaaaagcacccatcgtattcaacacaacattgactacctaaaacatctctcaaaagtcaaaaaaatccccagtgattttgaaggcagcggttatacagatcttcaagagagaggggacaatgatatatctcctttcagtggggacggccaaccttttaaggacattcctggtaaaggagaagctactggtcctgacctagaaggcaaagatattcaaacagggtttgcaggcccaagtgaagctgagagtactcatcttgacacaaaaaagccaggttataatgagatcccagagagagaagaaaatggtggaaataccattggaactagggatgaaactgcgaaagaggcagatgctgttgatgtcagccttgtagagggcagcaacgatatcatgggtagtaccaattttaaggagctccctggaagagaaggaaacagagtggatgctggcagccaaaatgctcaccaagggaaggttgagtttcattaccctcctgcaccctcaaaagagaaaagaaaagaaggcagtagtgatgcagctgaaagtaccaactataatgaaattcctaaaaatggcaaaggcagtaccagaaagggtgtagatcattctaataggaaccaagcaaccttaaatgaaaaacaaaggtttcctagtaagggcaaaagtcagggcctgcccattccttctcgtggtcttgataatgaaatcaaaaacgaaatggattcctttaatggccccagtcatgagaatataataacacatggcagaaaatatcattatgtaccccacagacaaaataattctacacggaataagggtatgccacaagggaaaggctcctggggtagacaaccccattccaacaggaggtttagttcccgtagaagggatgacagtagtgagtcatctgacagtggcagttcaagtgagagcgatggtgactagtccaccaggagttcccagcggggtgacagtctgaagacctcgtcacctgtgagttgatgtagaggagagccacctgacagctgaccaggtgaagagaggatagagtgaagaactgagtgagccaagaatcctggtctccttgggggaatttttgctatcttaatagtcacagtataaaattctattaaaggctataatgtttttaagcaaaaaaaaatcattacagatctatgaaataggtaacatttgagtaggtgtcatttaaaaatagttggtgaatgtcacaaatgccttctatgttgtttgctctgtagacatgaaaataaacaatatctctcgatg

SEQ ID NO: 151860 - DNA, 2022 bp, Homo sapiens
  Payload ID: 9888
  Gene Symbol: MEPE
  Gene Name: matrix extracellular phosphoglycoprotein
  Uniprot ID: Q9NQ76
  ENST ID: ENST00000424957
  CDS Start-End: 74-1651
atgcagtgctcccctggcctgccggcagctatccacaccagaaagaggaaaaggtagactgagattctcaaagatgcgagttttctgtgtgggactactccttttcagtgtgacctgggcagcaccaacatttcaaccacagactgagaaaactaagcaaagctgtgtggaagagcagaggcaggaagaaaaaaacaaagacaatattggttttcaccatttgggcaagagaataaatcaagagctatcatctaaagaaaatattgtccaggaaagaaagaaagatttgtccctttctgaagccagtgagaataagggaagtagtaaatctcaaaattatttcacaaatagacagagactgaataaagaatatagtatcagtaacaaagagaatactcacaatggcctgaggatgtcaatttatcctaagtcaactgggaataaagggtttgaggatggagatgatgctatcagcaaactacatgaccaagaagaatatggcgcagctctcatcagaaataacatgcaacatataatggggccagtgactgcgattaaactcctgggggaagaaaacaaagagaacacacctaggaatgttctaaacataatcccagcaagtatgaattatgctaaagcacactcgaaggataaaaagaagcctcaaagagattcccaagcccagaaaagtccagtaaaaagcaaaagcacccatcgtattcaacacaacattgactacctaaaacatctctcaaaagtcaaaaaaatccccagtgattttgaaggcagcggttatacagatcttcaagagagaggggacaatgatatatctcctttcagtggggacggccaaccttttaaggacattcctggtaaaggagaagctactggtcctgacctagaaggcaaagatattcaaacagggtttgcaggcccaagtgaagctgagagtactcatcttgacacaaaaaagccaggttataatgagatcccagagagagaagaaaatggtggaaataccattggaactagggatgaaactgcgaaagaggcagatgctgttgatgtcagccttgtagagggcagcaacgatatcatgggtagtaccaattttaaggagctccctggaagagaaggaaacagagtggatgctggcagccaaaatgctcaccaagggaaggttgagtttcattaccctcctgcaccctcaaaagagaaaagaaaagaaggcagtagtgatgcagctgaaagtaccaactataatgaaattcctaaaaatggcaaaggcagtaccagaaagggtgtagatcattctaataggaaccaagcaaccttaaatgaaaaacaaaggtttcctagtaagggcaaaagtcagggcctgcccattccttctcgtggtcttgataatgaaatcaaaaacgaaatggattcctttaatggccccagtcatgagaatataataacacatggcagaaaatatcattatgtaccccacagacaaaataattctacacggaataagggtatgccacaagggaaaggctcctggggtagacaaccccattccaacaggaggtttagttcccgtagaagggatgacagtagtgagtcatctgacagtggcagttcaagtgagagcgatggtgactagtccaccaggagttcccagcggggtgacagtctgaagacctcgtcacctgtgagttgatgtagaggagagccacctgacagctgaccaggtgaagagaggatagagtgaagaactgagtgagccaagaatcctggtctccttgggggaatttttgctatcttaatagtcacagtataaaattctattaaaggctataatgtttttaagcaaaaaaaaatcattacagatctatgaaataggtaacatttgagtaggtgtcatttaaaaatagttggtgaatgtcacaaatgccttctatgttgtttgctctgtagacatgaaaataaacaatatctctcgatgataatttgtattaagtaatctataagaaa

SEQ ID NO: 151861 - DNA, 550 bp, Homo sapiens
  Payload ID: 9888
  Gene Symbol: MEPE
  Gene Name: matrix extracellular phosphoglycoprotein
  ENST ID: ENST00000511670
  CDS Start-End: 51-341
aacaagaagccaggtattctgaaggtgaaagataccagagattctcaaagatgcgagttttctgtgtgggactactccttttcagtgtgacctgggcagcaccaacatttcaaccacagactgagaaaactaagcaaagctgtgtggaagagcagagggctcctcaagcctctctactacaaaactctgggtcccagaatcttcctgatccccatcccatgcctcggcccacatctcgctctgcttcaggacctgtggctgcaggtgtgatactcatggacctcagcaggaagaaaaaaacaaagacaatattggttttcaccatttgggcaagagaataaatcaagagctatcatctaaagaaaatattgtccaggaaagaaagaaagatttgtccctttctgaagccagtgagaataagggaagtagtaaatctcaaaattatttcacaaatagacagagactgaataaagaatatagtatcagtaacaaagagaatactcacaatggcctgaggatgtcaatttatcctaagtcaactgggaataaa

SEQ ID NO: 151862 - DNA, 2226 bp, Homo sapiens
  Payload ID: 9888
  Gene Symbol: MEPE
  Gene Name: matrix extracellular phosphoglycoprotein
  ENST ID: ENST00000497649
  CDS Start-End: 379-1884
aaaatgcccagagacttctaatcctgcaacaagaagccaggtattctgaaggtgaaagataccagagattctcaaagatgcgagttttctgtgtgggactactccttttcagtgtgacctgggcagcaccagggttctctcttttatatgattgatccaccatgatgcctgcttccactgtagcacacccattcaaacacggcccagtccgcccattggttcccagtgccacatctgagataggctaggagtttctgaaagaaagagacatttcaaccacagactgagaaaactaagcaaagctgtgtggaagagcagaggataacatacaagggtcactatgagaaacatgggcattatgtttttaagtgtgtttacatgtcacctgagaagaaaaatcaaactgatgtaaagcaggaagaaaaaaacaaagacaatattggttttcaccatttgggcaagagaataaatcaagagctatcatctaaagaaaatattgtccaggaaagaaagaaagatttgtccctttctgaagccagtgagaataagggaagtagtaaatctcaaaattatttcacaaatagacagagactgaataaagaatatagtatcagtaacaaagagaatactcacaatggcctgaggatgtcaatttatcctaagtcaactgggaataaagggtttgaggatggagatgatgctatcagcaaactacatgaccaagaagaatatggcgcagctctcatcagaaataacatgcaacatataatggggccagtgactgcgattaaactcctgggggaagaaaacaaagagaacacacctaggaatgttctaaacataatcccagcaagtatgaattatgctaaagcacactcgaaggataaaaagaagcctcaaagagattcccaagcccagaaaagtccagtaaaaagcaaaagcacccatcgtattcaacacaacattgactacctaaaacatctctcaaaagtcaaaaaaatccccagtgattttgaaggcagcggttatacagatcttcaagagagaggggacaatgatatatctcctttcagtggggacggccaaccttttaaggacattcctggtaaaggagaagctactggtcctgacctagaaggcaaagatattcaaacagggtttgcaggcccaagtgaagctgagagtactcatcttgacacaaaaaagccaggttataatgagatcccagagagagaagaaaatggtggaaataccattggaactagggatgaaactgcgaaagaggcagatgctgttgatgtcagccttgtagagggcagcaacgatatcatgggtagtaccaattttaaggagctccctggaagagaaggaaacagagtggatgctggcagccaaaatgctcaccaagggaaggttgagtttcattaccctcctgcaccctcaaaagagaaaagaaaagaaggcagtagtgatgcagctgaaagtaccaactataatgaaattcctaaaaatggcaaaggcagtaccagaaagggtgtagatcattctaataggaaccaagcaaccttaaatgaaaaacaaaggtttcctagtaagggcaaaagtcagggcctgcccattccttctcgtggtcttgataatgaaatcaaaaacgaaatggattcctttaatggccccagtcatgagaatataataacacatggcagaaaatatcattatgtaccccacagacaaaataattctacacggaataagggtatgccacaagggaaaggctcctggggtagacaaccccattccaacaggaggtttagttcccgtagaagggatgacagtagtgagtcatctgacagtggcagttcaagtgagagcgatggtgactagtccaccaggagttcccagcggggtgacagtctgaagacctcgtcacctgtgagttgatgtagaggagagccacctgacagctgaccaggtgaagagaggatagagtgaagaactgagtgagccaagaatcctggtctccttgggggaatttttgctatcttaatagtcacagtataaaattctattaaaggctataatgtttttaagcaaaaaaaaatcattacagatctatgaaataggtaacatttgagtaggtgtcatttaaaaatagttggtgaatgtcacaaatgccttctatgttgtttgctctgtagacatgaaaataaacaatatctctcgatg

SEQ ID NO: 151863 - DNA, 2135 bp, Homo sapiens
  Payload ID: 9888
  Gene Symbol: MEPE
  Gene Name: matrix extracellular phosphoglycoprotein
  Uniprot ID: Q9NQ76
  ENST ID: ENST00000540395
  CDS Start-End: 526-1764
aatcctgcaacaagaagccaggtattctgaaggtgaaagataccagagattctcaaagatgcgagttttctgtgtgggactactccttttcagtgtgacctgggcagcaccaacatttcaaccacagactgagaaaactaagcaaagctgtgtggaagagcagagggctcctcaagcctctctactacaaaactctgggtcccagaatcttcctgatccccatcccatgcctcggcccacatctcgctctgcttcaggacctgtggctgcaggtgtgatactcatggacctcagcaggaagaaaaaaacaaagacaatattggttttcaccatttgggcaagagaataaatcaagagctatcatctaaagaaaatattgtccaggaaagaaagaaagatttgtccctttctgaagccagtgagaataagggaagtagtaaatctcaaaattatttcacaaatagacagagactgaataaagaatatagtatcagtaacaaagagaatactcacaatggcctgaggatgtcaatttatcctaagtcaactgggaataaagggtttgaggatggagatgatgctatcagcaaactacatgaccaagaagaatatggcgcagctctcatcagaaataacatgcaacatataatggggccagtgactgcgattaaactcctgggggaagaaaacaaagagaacacacctaggaatgttctaaacataatcccagcaagtatgaattatgctaaagcacactcgaaggataaaaagaagcctcaaagagattcccaagcccagaaaagtccagtaaaaagcaaaagcacccatcgtattcaacacaacattgactacctaaaacatctctcaaaagtcaaaaaaatccccagtgattttgaaggcagcggttatacagatcttcaagagagaggggacaatgatatatctcctttcagtggggacggccaaccttttaaggacattcctggtaaaggagaagctactggtcctgacctagaaggcaaagatattcaaacagggtttgcaggcccaagtgaagctgagagtactcatcttgacacaaaaaagccaggttataatgagatcccagagagagaagaaaatggtggaaataccattggaactagggatgaaactgcgaaagaggcagatgctgttgatgtcagccttgtagagggcagcaacgatatcatgggtagtaccaattttaaggagctccctggaagagaaggaaacagagtggatgctggcagccaaaatgctcaccaagggaaggttgagtttcattaccctcctgcaccctcaaaagagaaaagaaaagaaggcagtagtgatgcagctgaaagtaccaactataatgaaattcctaaaaatggcaaaggcagtaccagaaagggtgtagatcattctaataggaaccaagcaaccttaaatgaaaaacaaaggtttcctagtaagggcaaaagtcagggcctgcccattccttctcgtggtcttgataatgaaatcaaaaacgaaatggattcctttaatggccccagtcatgagaatataataacacatggcagaaaatatcattatgtaccccacagacaaaataattctacacggaataagggtatgccacaagggaaaggctcctggggtagacaaccccattccaacaggaggtttagttcccgtagaagggatgacagtagtgagtcatctgacagtggcagttcaagtgagagcgatggtgactagtccaccaggagttcccagcggggtgacagtctgaagacctcgtcacctgtgagttgatgtagaggagagccacctgacagctgaccaggtgaagagaggatagagtgaagaactgagtgagccaagaatcctggtctccttgggggaatttttgctatcttaatagtcacagtataaaattctattaaaggctataatgtttttaagcaaaaaaaaatcattacagatctatgaaataggtaacatttgagtaggtgtcatttaaaaatagttggtgaatgtcacaaatgccttctatgttgtttgctctgtagacatgaaaataaacaatatctctcgatgataatttgtattaagtaatctataagaaa

SEQ ID NO: 151864 - DNA, 2206 bp, Homo sapiens
  Payload ID: 9888
  Gene Symbol: MEPE
  Gene Name: matrix extracellular phosphoglycoprotein
  Uniprot ID: Q9NQ76
  ENST ID: ENST00000560249
  CDS Start-End: 597-1835
aatcctgcaacaagaagccaggtattctgaaggtgaaagataccagagattctcaaagatgcgagttttctgtgtgggactactccttttcagtgtgacctgggcagcaccaacatttcaaccacagactgagaaaactaagcaaagctgtgtggaagagcagaggataacatacaagggtcactatgagaaacatgggcattatgtttttaagtgtgtttacatgtcacctgagaagaaaaatcaaactgatgtaaaggctcctcaagcctctctactacaaaactctgggtcccagaatcttcctgatccccatcccatgcctcggcccacatctcgctctgcttcaggacctgtggctgcagcaggaagaaaaaaacaaagacaatattggttttcaccatttgggcaagagaataaatcaagagctatcatctaaagaaaatattgtccaggaaagaaagaaagatttgtccctttctgaagccagtgagaataagggaagtagtaaatctcaaaattatttcacaaatagacagagactgaataaagaatatagtatcagtaacaaagagaatactcacaatggcctgaggatgtcaatttatcctaagtcaactgggaataaagggtttgaggatggagatgatgctatcagcaaactacatgaccaagaagaatatggcgcagctctcatcagaaataacatgcaacatataatggggccagtgactgcgattaaactcctgggggaagaaaacaaagagaacacacctaggaatgttctaaacataatcccagcaagtatgaattatgctaaagcacactcgaaggataaaaagaagcctcaaagagattcccaagcccagaaaagtccagtaaaaagcaaaagcacccatcgtattcaacacaacattgactacctaaaacatctctcaaaagtcaaaaaaatccccagtgattttgaaggcagcggttatacagatcttcaagagagaggggacaatgatatatctcctttcagtggggacggccaaccttttaaggacattcctggtaaaggagaagctactggtcctgacctagaaggcaaagatattcaaacagggtttgcaggcccaagtgaagctgagagtactcatcttgacacaaaaaagccaggttataatgagatcccagagagagaagaaaatggtggaaataccattggaactagggatgaaactgcgaaagaggcagatgctgttgatgtcagccttgtagagggcagcaacgatatcatgggtagtaccaattttaaggagctccctggaagagaaggaaacagagtggatgctggcagccaaaatgctcaccaagggaaggttgagtttcattaccctcctgcaccctcaaaagagaaaagaaaagaaggcagtagtgatgcagctgaaagtaccaactataatgaaattcctaaaaatggcaaaggcagtaccagaaagggtgtagatcattctaataggaaccaagcaaccttaaatgaaaaacaaaggtttcctagtaagggcaaaagtcagggcctgcccattccttctcgtggtcttgataatgaaatcaaaaacgaaatggattcctttaatggccccagtcatgagaatataataacacatggcagaaaatatcattatgtaccccacagacaaaataattctacacggaataagggtatgccacaagggaaaggctcctggggtagacaaccccattccaacaggaggtttagttcccgtagaagggatgacagtagtgagtcatctgacagtggcagttcaagtgagagcgatggtgactagtccaccaggagttcccagcggggtgacagtctgaagacctcgtcacctgtgagttgatgtagaggagagccacctgacagctgaccaggtgaagagaggatagagtgaagaactgagtgagccaagaatcctggtctccttgggggaatttttgctatcttaatagtcacagtataaaattctattaaaggctataatgtttttaagcaaaaaaaaatcattacagatctatgaaataggtaacatttgagtaggtgtcatttaaaaatagttggtgaatgtcacaaatgccttctatgttgtttgctctgtagacatgaaaataaacaatatctctcgatgataatttgtattaagtaatctataagaaa

SEQ ID NO: 151865 - DNA, 694 bp, Homo sapiens
  Payload ID: 9889
  Gene Symbol: MGP
  Gene Name: matrix Gla protein
  Uniprot ID: P08493
  ENST ID: ENST00000228938
  CDS Start-End: 67-453
cccgtaggagcctctctccctactgctgctacacaagaccctgagactgacctgcaggacgaaaccatgaagagcctgatccttcttgccatcctggccgccttagcggtagtaactttgtgttatggagagtggcagaaagaagaaaacttcggctttgatatcgtttcagttctctctctgaactggcatcgtgcccaggaatcacatgaaagcatggaatcttatgaacttaatcccttcattaacaggagaaatgcaaataccttcatatcccctcagcagagatggagagctaaagtccaagagaggatccgagaacgctctaagcctgtccacgagctcaatagggaagcctgtgatgactacagactttgcgaacgctacgccatggtttatggatacaatgctgcctataatcgctacttcaggaagcgccgagggaccaaatgagactgagggaagaaaaaaaatctctttttttctggaggctggcacctgattttgtatccccctgtagcagcattacagaaatacataggcttatatacaatgcttctttcctgtatattctcttgtctggctgcacccctttttcccgcccccagattgataagtaatgaaagtgcactgcagtgagggtcaaaggagagtcaacatatgtgattgttccataataaacttctggtgtgat

SEQ ID NO: 151866 - DNA, 423 bp, Homo sapiens
  Payload ID: 9889
  Gene Symbol: MGP
  Gene Name: matrix Gla protein
  ENST ID: ENST00000545199
  CDS Start-End: 1-224
aatcacatgaaagcatggaatcttatgaacttagatccgagaacgctctaagcctgtccacgagctcaatagggaagcctgtgatgactacagactttgcgaacgctacgccatggtttatggatacaatgctgcctataatcgctacttcaggaagcgccgagggaccaaatgagactgagggaagaaaaaaaatctctttttttctggaggctggcacctgattttgtatccccctgtagcagcattacagaaatacataggcttatatacaatgcttctttcctgtatattctcttgtctggctgcacccctttttcccgcccccagattgataagtaatgaaagtgcactgcagtgagggtcaaaggagagtcaacatatgtgattgttccataataaacttctggtgtgatactttca

SEQ ID NO: 151867 - DNA, 1405 bp, Homo sapiens
  Payload ID: 9889
  Gene Symbol: MGP
  Gene Name: matrix Gla protein
  Uniprot ID: P08493
  ENST ID: ENST00000539261
  CDS Start-End: 136-447
tctcccactggttcctcccctctcaactgctctggttcttataaaaacctcacagccttccactaacatcccgtaggagcctctctccctactgctgctacacaagaccctgagactgacctgcaggacgaaaccatgaagagcctgatccttcttgccatcctggccgccttagcggtagtaactttgtgttatgaatcacatgaaagcatggaatcttatgaacttaatcccttcattaacaggagaaatgcaaataccttcatatcccctcagcagagatggagagctaaagtccaagagaggatccgagaacgctctaagcctgtccacgagctcaatagggaagcctgtgatgactacagactttgcgaacgctacgccatggtttatggatacaatgctgcctataatcgctacttcaggaagcgccgagggaccaaatgagactgagggaagaaaaaaaatctctttttttctggaggctggcacctgattttgtatccccctgtagcagcattacagaaatacataggcttatatacaatgcttctttcctgtatattctcttgtctggctgcacccctttttcccgcccccagattgataagtaatgaaagtgcactgcagtgagggtcaaaggagagtcaacatatgtgattgttccataataaacttctggtgtgatactttcatcttgtaaatctgctttcttttgggaagatattgagatatttaaatcatggcccaccttacccaaaataggagattctgttcatctcatatctagtattaattagaaaaataactacataaaaagaaggaagctaagaaggcactcactcagccataaattctctaaaccctctctaccttggaatccgtgaatggaatctggtatgttttttgcaggattttcctattgtaaattgtggcaaatacagggctcccttcatttgcttttcatctcttatgcatcaaagtcaaaaacatttctgaatcaagataatctagaagagaaaaaaggaggaaaaggaaaagagaaagcagaagggacaaataaaagcaattggcaaaaactgtcaataatagtttatacacttaactatatcaataatcacattatatgtaaatagtctaaacaatccaattattttttacttctacttatgttatatttttacttctacatttgttaaaggttccacgctacatttttactattcttgctttaaataattttaataatttcttttaaagtttagataataagaaaatatcccgggccaggcacagtggccacacctgtaatctcagtagccatgaccataccaatgcactccagcctgtgaaacagagtgagactctgtctctacagaaaaataaaaaagaaaagaaagaaaag

SEQ ID NO: 151868 - DNA, 1970 bp, Homo sapiens
  Payload ID: 9890
  Gene Symbol: MMP1
  Gene Name: matrix metallopeptidase 1
  Uniprot ID: P03956
  ENST ID: ENST00000315274
  CDS Start-End: 69-1478
atattggagcagcaagaggctgggaagccatcacttaccttgcactgagaaagaagacaaaggccagtatgcacagctttcctccactgctgctgctgctgttctggggtgtggtgtctcacagcttcccagcgactctagaaacacaagagcaagatgtggacttagtccagaaatacctggaaaaatactacaacctgaagaatgatgggaggcaagttgaaaagcggagaaatagtggcccagtggttgaaaaattgaagcaaatgcaggaattctttgggctgaaagtgactgggaaaccagatgctgaaaccctgaaggtgatgaagcagcccagatgtggagtgcctgatgtggctcagtttgtcctcactgaggggaaccctcgctgggagcaaacacatctgacctacaggattgaaaattacacgccagatttgccaagagcagatgtggaccatgccattgagaaagccttccaactctggagtaatgtcacacctctgacattcaccaaggtctctgagggtcaagcagacatcatgatatcttttgtcaggggagatcatcgggacaactctccttttgatggacctggaggaaatcttgctcatgcttttcaaccaggcccaggtattggaggggatgctcattttgatgaagatgaaaggtggaccaacaatttcagagagtacaacttacatcgtgttgcagctcatgaactcggccattctcttggactctcccattctactgatatcggggctttgatgtaccctagctacaccttcagtggtgatgttcagctagctcaggatgacattgatggcatccaagccatatatggacgttcccaaaatcctgtccagcccatcggcccacaaaccccaaaagcgtgtgacagtaagctaacctttgatgctataactacgattcggggagaagtgatgttctttaaagacagattctacatgcgcacaaatcccttctacccggaagttgagctcaatttcatttctgttttctggccacaactgccaaatgggcttgaagctgcttacgaatttgccgacagagatgaagtccggtttttcaaagggaataagtactgggctgttcagggacagaatgtgctacacggataccccaaggacatctacagctcctttggcttccctagaactgtgaagcatatcgatgctgctctttctgaggaaaacactggaaaaacctacttctttgttgctaacaaatactggaggtatgatgaatataaacgatctatggatccaggttatcccaaaatgatagcacatgactttcctggaattggccacaaagttgatgcagttttcatgaaagatggatttttctatttctttcatggaacaagacaatacaaatttgatcctaaaacgaagagaattttgactctccagaaagctaatagctggttcaactgcaggaaaaattgaacattactaatttgaatggaaaacacatggtgtgagtccaaagaaggtgttttcctgaagaactgtctattttctcagtcatttttaacctctagagtcactgatacacagaatataatcttatttatacctcagtttgcatatttttttactatttagaatgtagccctttttgtactgatataatttagttccacaaatggtgggtacaaaaagtcaagtttgtggcttatggattcatataggccagagttgcaaagatcttttccagagtatgcaactctgacgttgatcccagagagcagcttcagtgacaaacatatcctttcaagacagaaagagacaggagacatgagtctttgccggaggaaaagcagctcaagaacacatgtgcagtcactggtgtcaccctggataggcaagggataactcttctaacacaaaataagtgttttatgtttggaataaagtcaaccttgtttctactgtttt

SEQ ID NO: 151869 - DNA, 1758 bp, Homo sapiens
  Payload ID: 9891
  Gene Symbol: MMP10
  Gene Name: matrix metallopeptidase 10
  Uniprot ID: P09238
  ENST ID: ENST00000279441
  CDS Start-End: 38-1468
agaagcccagtagacaaagaaggtaagggcagtgagaatgatgcatcttgcattccttgtgctgttgtgtctgccagtctgctctgcctatcctctgagtggggcagcaaaagaggaggactccaacaaggatcttgcccagcaatacctagaaaagtactacaacctcgaaaaggatgtgaaacagtttagaagaaaggacagtaatctcattgttaaaaaaatccaaggaatgcagaagttccttgggttggaggtgacagggaagctagacactgacactctggaggtgatgcgcaagcccaggtgtggagttcctgacgttggtcacttcagctcctttcctggcatgccgaagtggaggaaaacccaccttacatacaggattgtgaattatacaccagatttgccaagagatgctgttgattctgccattgagaaagctctgaaagtctgggaagaggtgactccactcacattctccaggctgtatgaaggagaggctgatataatgatctcttttgcagttaaagaacatggagacttttactcttttgatggcccaggacacagtttggctcatgcctacccacctggacctgggctttatggagatattcactttgatgatgatgaaaaatggacagaagatgcatcaggcaccaatttattcctcgttgctgctcatgaacttggccactccctggggctctttcactcagccaacactgaagctttgatgtacccactctacaactcattcacagagctcgcccagttccgcctttcgcaagatgatgtgaatggcattcagtctctctacggacctccccctgcctctactgaggaacccctggtgcccacaaaatctgttccttcgggatctgagatgccagccaagtgtgatcctgctttgtccttcgatgccatcagcactctgaggggagaatatctgttctttaaagacagatatttttggcgaagatcccactggaaccctgaacctgaatttcatttgatttctgcattttggccctctcttccatcatatttggatgctgcatatgaagttaacagcagggacaccgtttttatttttaaaggaaatgagttctgggccatcagaggaaatgaggtacaagcaggttatccaagaggcatccataccctgggttttcctccaaccataaggaaaattgatgcagctgtttctgacaaggaaaagaagaaaacatacttctttgcagcggacaaatactggagatttgatgaaaatagccagtccatggagcaaggcttccctagactaatagctgatgactttccaggagttgagcctaaggttgatgctgtattacaggcatttggatttttctacttcttcagtggatcatcacagtttgagtttgaccccaatgccaggatggtgacacacatattaaagagtaacagctggttacattgctaggcgagatagggggaagacagatatgggtgtttttaataaatctaataattattcatctaatgtattatgagccaaaatggttaatttttcctgcatgttctgtgactgaagaagatgagccttgcagatatctgcatgtgtcatgaagaatgtttctggaattcttcacttgcttttgaattgcactgaacagaattaagaaatactcatgtgcaataggtgagagaatgtattttcatagatgtgttattacttcctcaataaaaagttttattttgggcctgttcctt

SEQ ID NO: 151870 - DNA, 581 bp, Homo sapiens
  Payload ID: 9891
  Gene Symbol: MMP10
  Gene Name: matrix metallopeptidase 10
  ENST ID: ENST00000539681
  CDS Start-End: 38-581
agaagcccagtagacaaagaaggtaagggcagtgagaatgatgcatcttgcattccttgtgctgttgtgtctgccagtctgctctgcctatcctctgagtggggcagcaaaagaggaggactccaacaaggatcttgcccagcaatacctagaaaagtactacaacctcgaaaaggatgtgaaacagtttagaagaaaggacagtaatctcattgttaaaaaaatccaaggaatgcagaagttccttgggttggaggtgacagggaagctagacactgacactctggaggtgatgcgcaagcccaggtgtggagttcctgacgttggtcacttcagctcctttcctggcatgccgaagtggaggaaaacccaccttacatacaggattgtgaattatacaccagatttgccaagagatgctgttgattctgccattgagaaagctctgaaagtctgggaagaggtgactccactcacattctccaggctgtatgaaggagaggctgatataatgatctcttttgcagttaaaggacacagtttggctcatgcctacccacctggacctgggctttatggag

SEQ ID NO: 151871 - DNA, 2291 bp, Homo sapiens
  Payload ID: 9892
  Gene Symbol: MMP11
  Gene Name: matrix metallopeptidase 11
  Uniprot ID: P24347
  ENST ID: ENST00000215743
  CDS Start-End: 53-1519
ataaggggcggcggcccggagcggcccagcaagcccagcagccccggggcggatggctccggccgcctggctccgcagcgcggccgcgcgcgccctcctgcccccgatgctgctgctgctgctccagccgccgccgctgctggcccgggctctgccgccggacgcccaccacctccatgccgagaggagggggccacagccctggcatgcagccctgcccagtagcccggcacctgcccctgccacgcaggaagccccccggcctgccagcagcctcaggcctccccgctgtggcgtgcccgacccatctgatgggctgagtgcccgcaaccgacagaagaggttcgtgctttctggcgggcgctgggagaagacggacctcacctacaggatccttcggttcccatggcagttggtgcaggagcaggtgcggcagacgatggcagaggccctaaaggtatggagcgatgtgacgccactcacctttactgaggtgcacgagggccgtgctgacatcatgatcgacttcgccaggtactggcatggggacgacctgccgtttgatgggcctgggggcatcctggcccatgccttcttccccaagactcaccgagaaggggatgtccacttcgactatgatgagacctggactatcggggatgaccagggcacagacctgctgcaggtggcagcccatgaatttggccacgtgctggggctgcagcacacaacagcagccaaggccctgatgtccgccttctacacctttcgctacccactgagtctcagcccagatgactgcaggggcgttcaacacctatatggccagccctggcccactgtcacctccaggaccccagccctgggcccccaggctgggatagacaccaatgagattgcaccgctggagccagacgccccgccagatgcctgtgaggcctcctttgacgcggtctccaccatccgaggcgagctctttttcttcaaagcgggctttgtgtggcgcctccgtgggggccagctgcagcccggctacccagcattggcctctcgccactggcagggactgcccagccctgtggacgctgccttcgaggatgcccagggccacatttggttcttccaaggtgctcagtactgggtgtacgacggtgaaaagccagtcctgggccccgcacccctcaccgagctgggcctggtgaggttcccggtccatgctgccttggtctggggtcccgagaagaacaagatctacttcttccgaggcagggactactggcgtttccaccccagcacccggcgtgtagacagtcccgtgccccgcagggccactgactggagaggggtgccctctgagatcgacgctgccttccaggatgctgatggctatgcctacttcctgcgcggccgcctctactggaagtttgaccctgtgaaggtgaaggctctggaaggcttcccccgtctcgtgggtcctgacttctttggctgtgccgagcctgccaacactttcctctgaccatggcttggatgccctcaggggtgctgacccctgccaggccacgaatatcaggctagagacccatggccatctttgtggctgtgggcaccaggcatgggactgagcccatgtctcctcagggggatggggtggggtacaaccaccatgacaactgccgggagggccacgcaggtcgtggtcacctgccagcgactgtctcagactgggcagggaggctttggcatgacttaagaggaagggcagtcttgggcccgctatgcaggtcctggcaaacctggctgccctgtctccatccctgtccctcagggtagcaccatggcaggactgggggaactggagtgtccttgctgtatccctgttgtgaggttccttccaggggctggcactgaagcaagggtgctggggccccatggccttcagccctggctgagcaactgggctgtagggcagggccacttcctgaggtcaggtcttggtaggtgcctgcatctgtctgccttctggctgacaatcctggaaatctgttctccagaatccaggccaaaaagttcacagtcaaatggggaggggtattcttcatgcaggagaccccaggccctggaggctgcaacatacctcaatcctgtcccaggccggatcctcctgaagcccttttcgcagcactgctatcctccaaagccattgtaaatgtgtgtacagtgtgtataaaccttcttcttctttttttttttttaaactgaggattgtcattaaacacagttgttttcta

SEQ ID NO: 151872 - DNA, 2071 bp, Homo sapiens
  Payload ID: 9892
  Gene Symbol: MMP11
  Gene Name: matrix metallopeptidase 11
  ENST ID: ENST00000437086
  CDS Start-End: 23-1087
aagcccagcagccccggggcggatggctccggccgcctggctccgcagcgcggccgcgcgcgccctcctgcccccgatgctgctgctgctgctccagccgccgccgctgctggcccgggctctgccgccggacgcccaccacctccatgccgagaggagggggccacagccctggcatgcagccctgcccagtagcccggcacctgcccctgccacgcaggaagccccccggcctgccagcagcctcaggcctccccgctgtggcgtgcccgacccatctgatgggctgagtgcccgcaaccgacagaagaggatccttcggttcccatggcagttggtgcaggagcaggtgcggcagacgatggcagaggccctaaaggtatggagcgatgtgacgccactcacctttactgaggtgcacgagggccgtgctgacatcatgatcgacttcgccaggtactggcatggggacgacctgccgtttgatgggcctgggggcatcctggcccatgccttcttccccaagactcaccgagaaggggatgtccacttcgactatgatgagacctggactatcggggatgaccagggcacagacctgctgcaggtggcagcccatgaatttggccacgtgctggggctgcagcacacaacagcagccaaggccctgatgtccgccttctacacctttcgctacccactgagtctcagcccagatgactgcaggggcgttcaacacctatatggccagccctggcccactgtcacctccaggaccccagccctgggcccccaggctgggatagacaccaatgagattgcaccgctggagccagacgccccgccagatgcctgtgaggcctcctttgacgcggtctccaccatccgaggcgagctctttttcttcaaagcgggctttgtgtggcgcctccgtgggggccagctgcagcccggctacccagcattggcctctcgccactggcagggactgcccagccctgtggacgctgccttcgaggatgcccagggccacatttggttcttccaagggactactggcgtttccaccccagcacccggcgtgtagacagtcccgtgccccgcagggccactgactggagaggggtgccctctgagatcgacgctgccttccaggatgctgatggctatgcctacttcctgcgcggccgcctctactggaagtttgaccctgtgaaggtgaaggctctggaaggcttcccccgtctcgtgggtcctgacttctttggctgtgccgagcctgccaacactttcctctgaccatggcttggatgccctcaggggtgctgacccctgccaggccacgaatatcaggctagagacccatggccatctttgtggctgtgggcaccaggcatgggactgagcccatgtctcctcagggggatggggtggggtacaaccaccatgacaactgccgggagggccacgcaggtcgtggtcacctgccagcgactgtctcagactgggcagggaggctttggcatgacttaagaggaagggcagtcttgggcccgctatgcaggtcctggcaaacctggctgccctgtctccatccctgtccctcagggtagcaccatggcaggactgggggaactggagtgtccttgctgtatccctgttgtgaggttccttccaggggctggcactgaagcaagggtgctggggccccatggccttcagccctggctgagcaactgggctgtagggcagggccacttcctgaggtcaggtcttggtaggtgcctgcatctgtctgccttctggctgacaatcctggaaatctgttctccagaatccaggccaaaaagttcacagtcaaatggggaggggtattcttcatgcaggagaccccaggccctggaggctgcaacatacctcaatcctgtcccaggccggatcctcctgaagcccttttcgcagcactgctatcctccaaagccattgtaaatgtgtgtacagtgtgtataaaccttcttcttctttttttttttttaaactgaggattgtcattaaacacagttgttttcta

SEQ ID NO: 151873 - DNA, 537 bp, Homo sapiens
  Payload ID: 9892
  Gene Symbol: MMP11
  Gene Name: matrix metallopeptidase 11
  ENST ID: ENST00000428253
  CDS Start-End: 26-367
agcaagcccagcagccccggggcggatggctccggccgcctggctccgcagcgcggccgcgcgcgccctcctgcccccgatgctgctgctgctgctccagccgccgccgctgctggcccgggctctgccgccggacgcccaccacctccatgccgagaggagggggccacagccctggcatgcagccctgcccagtagcccggcacctgcccctgccacgcaggaagccccccggcctgccagcagcctcaggcctccccgctgtggcgtgcccgacccatctgatgggctgagtgcccgcaaccgacagaagaggttcgtgctttctggcgggcgctgggagaagacggacctcacctacaggtaggggcctgggagcaggacactaggatgccacctgtgtgtccgtgggatccttcggttcccatggcagttggtgcaggagcaggtgcggcagacgatggcagaggccctaaaggtatggagcgatgtgacgccactcacctttactgaggtgcacgagggccgtgctgacat

SEQ ID NO: 151874 - DNA, 1165 bp, Homo sapiens
  Payload ID: 9892
  Gene Symbol: MMP11
  Gene Name: matrix metallopeptidase 11
  ENST ID: ENST00000434318
  CDS Start-End: 1-512
cagcccatgaatttggccacgtgctggggctgcagcacacaacagcagccaaggccctgatgtccgccttctacacctttcgctacccactgagtctcagcccagatgactgcaggggcgttcaacacctatatggccagccctggcccactgtcacctccaggaccccagccctgggcccccaggctgggatagacaccaatgagattgcaccgctggagccagacgccccgccagatgcctgtgaggcctcctttgacgcggtctccaccatccgaggcgagctctttttcttcaaagcgggctttgtgtggcgcctccgtgggggccagctgcagcccggctacccagcattggcctctcgccactggcagggactgcccagccctgtggacgctgccttcgaggatgcccagggccacatttggttcttccaagagctgggatttccatcctcaactggcagagatgagagcctggagcattgcagatgccagggacttcacaaatgaaggcacagcatgggaaacctgcgtgggttccagggcagtccagcctgcaggggcccagggagtggtcagtaggcatttgtcacagccaaatgccagtggaaggagcagccgcccaggcagccctctactgatgagagtaacctcacccgtgcactagtttacagagcattcactgccccagcttatcccaggcctcccgcttccctctgcgggtggggtgctgagcaggcattattggcctgcatgttttactgatgaggaaactgaggctgggagagtctgtggtaggggtcaagcaggtccacagtggcggggcatggcagtggtggctgggcaggtccttgcagccttccctctccggcaggtgctcagtactgggtgtacgacggtgaaaagccagtcctgggccccgcacccctcaccgagctgggcctggtgaggttcccggtccatgctgccttggtctggggtcccgagaagaacaagatctacttcttccgaggcagggactactggcgtttccaccccagcacccggcgtgtagacagtcccgtgccccgcagggccactgactggagaggggtgccctctgagatcgacgctgccttccaggatgctgatggctatgcctacttcctgcgcggccgcctcta

SEQ ID NO: 151875 - DNA, 2291 bp, Homo sapiens; identical to SEQ ID NO: 151871
  Payload ID: 9892
  Gene Symbol: MMP11
  Gene Name: matrix metallopeptidase 11
  Uniprot ID: P24347
  ENST ID: ENST00000612388
  CDS Start-End: 53-1519

SEQ ID NO: 151876 - DNA, 1165 bp, Homo sapiens; identical to SEQ ID NO: 151874
  Payload ID: 9892
  Gene Symbol: MMP11
  Gene Name: matrix metallopeptidase 11
  ENST ID: ENST00000627283
  CDS Start-End: 1-512

SEQ ID NO: 151877 - DNA, 2071 bp, Homo sapiens; identical to SEQ ID NO: 151872
  Payload ID: 9892
  Gene Symbol: MMP11
  Gene Name: matrix metallopeptidase 11
  ENST ID: ENST00000629514
  CDS Start-End: 23-1087

SEQ ID NO: 151878 - DNA, 1874 bp, Homo sapiens
  Payload ID: 9893
  Gene Symbol: MMP12
  Gene Name: matrix metallopeptidase 12
  Uniprot ID: P39900
  ENST ID: ENST00000571244
  CDS Start-End: 98-1510
cagaacccggactaagggctatataaagaggaacagttcaggaacttaggctagaaaggaacacagtaaactgaattgatccgtttagaagtttacaatgaagtttcttctaatactgctcctgcaggccactgcttctggagctcttcccctgaacagctctacaagcctggaaaaaaataatgtgctatttggtgaaagatacttagaaaaattttatggccttgagataaacaaacttccagtgacaaaaatgaaatatagtggaaacttaatgaaggaaaaaatccaagaaatgcagcacttcttgggtctgaaagtgaccgggcaactggacacatctaccctggagatgatgcacgcacctcgatgtggagtccccgatgtccatcatttcagggaaatgccaggggggcccgtatggaggaaacattatatcacctacagaatcaataattacacacctgacatgaaccgtgaggatgttgactacgcaatccggaaagctttccaagtatggagtaatgttacccccttgaaattcagcaagattaacacaggcatggctgacattttggtggtttttgcccgtggagctcatggagacttccatgcttttgatggcaaaggtggaatcctagcccatgcttttggacctggatctggcattggaggggatgcacatttcgatgaggacgaattctggactacacattcaggaggcacaaacttgttcctcactgctgttcacgagattggccattccttaggtcttggccattctagtgatccaaaggccgtaatgttccccacctacaaatatgttgacatcaacacatttcgcctctctgctgatgacatacgtggcattcagtccctgtatggagacccaaaagagaaccaacgcttgccaaatcctgacaattcagaaccagctctctgtgaccccaatttgagttttgatgctgtcactaccgtgggaaataagatctttttcttcaaagacaggttcttctggctgaaggtttctgagagaccaaagaccagtgttaatttaatttcttccttatggccaaccttgccatctggcattgaagctgcttatgaaattgaagccagaaatcaagtttttctttttaaagatgacaaatactggttaattagcaatttaagaccagagccaaattatcccaagagcatacattcttttggttttcctaactttgtgaaaaaaattgatgcagctgtttttaacccacgtttttataggacctacttctttgtagataaccagtattggaggtatgatgaaaggagacagatgatggaccctggttatcccaaactgattaccaagaacttccaaggaatcgggcctaaaattgatgcagtcttctactctaaaaacaaatactactatttcttccaaggatctaaccaatttgaatatgacttcctactccaacgtatcaccaaaacactgaaaagcaatagctggtttggttgttagaaatggtgtaattaatggtttttgttagttcacttcagcttaataagtatttattgcatatttgctatgtcctcagtgtaccactacttagagatatgtatcataaaaataaaatctgtaaaccataggtaatgattatataaaatacataatatttttcaattttgaaaactctaattgtccattcttgcttgactctactattaagtttgaaaatagttaccttcaaaggccaagagaattctatttgaagcatgctctgtaagttgcttcctaacatccttggactgagaaattatacttacttctggcataactaaaattaagtatatatattttggctcaaataaaattgaaaaaaaaa

SEQ ID NO: 151879 - DNA, 2716 bp, Homo sapiens
  Payload ID: 9894
  Gene Symbol: MMP13
  Gene Name: matrix metallopeptidase 13
  Uniprot ID: P45452
  ENST ID: ENST00000260302
  CDS Start-End: 30-1445
acaacagtccccaggcatcaccattcaagatgcatccaggggtcctggctgccttcctcttcttgagctggactcattgtcgggccctgccccttcccagtggtggtgatgaagatgatttgtctgaggaagacctccagtttgcagagcgctacctgagatcatactaccatcctacaaatctcgcgggaatcctgaaggagaatgcagcaagctccatgactgagaggctccgagaaatgcagtctttcttcggcttagaggtgactggcaaacttgacgataacaccttagatgtcatgaaaaagccaagatgcggggttcctgatgtgggtgaatacaatgttttccctcgaactcttaaatggtccaaaatgaatttaacctacagaattgtgaattacacccctgatatgactcattctgaagtcgaaaaggcattcaaaaaagccttcaaagtttggtccgatgtaactcctctgaattttaccagacttcacgatggcattgctgacatcatgatctcttttggaattaaggagcatggcgacttctacccatttgatgggccctctggcctgctggctcatgcttttcctcctgggccaaattatggaggagatgcccattttgatgatgatgaaacctggacaagtagttccaaaggctacaacttgtttcttgttgctgcgcatgagttcggccactccttaggtcttgaccactccaaggaccctggagcactcatgtttcctatctacacctacaccggcaaaagccactttatgcttcctgatgacgatgtacaagggatccagtctctctatggtccaggagatgaagaccccaaccctaaacatccaaaaacgccagacaaatgtgacccttccttatcccttgatgccattaccagtctccgaggagaaacaatgatctttaaagacagattcttctggcgcctgcatcctcagcaggttgatgcggagctgtttttaacgaaatcattttggccagaacttcccaaccgtattgatgctgcatatgagcacccttctcatgacctcatcttcatcttcagaggtagaaaattttgggctcttaatggttatgacattctggaaggttatcccaaaaaaatatctgaactgggtcttccaaaagaagttaagaagataagtgcagctgttcactttgaggatacaggcaagactctcctgttctcaggaaaccaggtctggagatatgatgatactaaccatattatggataaagactatccgagactaatagaagaagacttcccaggaattggtgataaagtagatgctgtctatgagaaaaatggttatatctattttttcaacggacccatacagtttgaatacagcatctggagtaaccgtattgttcgcgtcatgccagcaaattccattttgtggtgttaagtgtctttttaaaaattgttatttaaatcctgaagagcatttggggtaatacttccagaagtgcggggtaggggaagaagagctatcaggagaaagcttggttctgtgaacaagcttcagtaagttatctttgaatatgtagtatctatatgactatgcgtggctggaaccacattgaagaatgttagagtaatgaaatggaggatctctaaagagcatctgattcttgttgctgtacaaaagcaatggttgatgatacttcccacaccacaaatgggacacatggtctgtcaatgagagcataatttaaaaatatatttataaggaaattttacaagggcataaagtaaatacatgcatataatgaataaatcattcttactaaaaagtataaaatagtatgaaaatggaaatttgggagagccatacataaaagaaataaaccaaaggaaaatgtctgtaataatagactgtaacttccaaataaataattttcattttgcactgaggatattcagatgtatgtgcccttcttcacacagacactaacgaaatatcaaagtcattaaagacaggagacaaaagagcagtggtaagaatagtagatgtggcctttgaattctgtttaattttcacttttggcaatgactcaaagtctgctctcatataagacaaatattcctttgcatattataaaggataaagaaggatgatgtctttttattaaaatatttcaggttcttcagaagtcacacattacaaagttaaaattgttatcaaaatagtctaaggccatggcatccctttttcataaattatttgattatttaagactaaaagttgcattttaaccctattttacctagctaattatttaattgtccagtttgtcttggatatataggctattttctaaagacttgtatagcatgaaataaaatatatcttataaagtggaagtatgtatattaaaaaagagacatccaaatttttttttaaagcagtctactagattgtgatcccttgagatatggaaggatgcctttttttctctgcatttaaaaaaatcccccagcacttcccacagtgcctattgatacttggggagggtgcttggcacttattgaatatatgatcggccatcaagggaagaactattgtgctcagagacactgttgataaaaactcaggcaaagaaaatgaaatgcatatttgcaaagtgtattaggaagtgtttatgttgtttataataaaaatatattttcaacaga

SEQ ID NO: 151880 - DNA, 1470 bp, Homo sapiens
  Payload ID: 9894
  Gene Symbol: MMP13
  Gene Name: matrix metallopeptidase 13
  ENST ID: ENST00000340273
  CDS Start-End: 1-1470
atgcatccaggggtcctggctgccttcctcttcttgagctggactcattgtcgggccctgccccttcccagtggtggtgatgaagatgatttgtctgaggaagacctccagtttgcagagcgctacctgagatcatactaccatcctacaaatctcgcgggaatcctgaaggagaatgcagcaagctccatgactgagaggctccgagaaatgcagtctttcttcggcttagaggtgactggcaaacttgacgataacaccttagatgtcatgaaaaagccaagatgcggggttcctgatgtgggtgaatacaatgttttccctcgaactcttaaatggtccaaaatgaatttaacctacagaattgtgaattacacccctgatatgactcattctgaagtcgaaaaggcattcaaaaaagccttcaaagtttggtccgatgtaactcctctgaattttaccagacttcacgatggcattgctgacatcatgatctcttttggaattaaggagcatggcgacttctacccatttgatgggccctctggcctgctggctcatgcttttcctcctgggccaaattatggaggagatgcccattttgatgatgatgaaacctggacaagtagttccaaaggctacaacttgtttcttgttgctgcgcatgagttcggccactccttaggtcttgaccactccaaggaccctggagcactcatgtttcctatctacacctacaccggcaaaagccactttatgcttcctgatgacgatgtacaagggatccagtctctctatggtccaggagatgaagaccccaaccctaaacatccaaaaacgccagacaaatgtgacccttccttatcccttgatgccattaccagtctccgaggagaaacaatgatctttaaagacagattcttctggcgcctgcatcctcagcaggttgatgcggagctgtttttaacgaaatcattttggccagaacttcccaaccgtattgatgctgcatatgagcacccttctcatgacctcatcttcatcttcagaggtagaaaattttgggctcttaatggttatgacattctggaaggttatcccaaaaaaatatctgaactgggtcttccaaaagaagttaagaagataagtgcagctgttcactttgaggatacaggcaagactctcctgttctcaggaaaccaggtctggagatatgatgatactaaccatattatggataaagactatccgagactaatagaagaagacttcccaggaattggtgataaagtagatgctgtctatgagaaaaatgagtctcactctgtcacccaggctggagttcattgtcgcaatctgagctcgctgcaacctccgcctcctgggttcaagagattctcctgcctcagcctctggagtagctgggattacaggttatatctattttttcaacggacccatacagtttga

SEQ ID NO: 151881 - DNA, 1152 bp, Homo sapiens
  Payload ID: 9894
  Gene Symbol: MMP13
  Gene Name: matrix metallopeptidase 13
  ENST ID: ENST00000615555
  CDS Start-End: 1-1152
atgcatccaggggtcctggctgccttcctcttcttgagctggactcattgtcgggccctgccccttcccagtggtggtgatgaagatgatttgtctgaggaagacctccagtttgcagagcgctacctgagatcatactaccatcctacaaatctcgcgggaatcctgaaggagaatgcagcaagctccatgactgagaggctccgagaaatgcagtctttcttcggcttagaggtgactggcaaacttgacgataacaccttagatgtcatgaaaaagccaagatgcggggttcctgatgtgggtgaatacaatgttttccctcgaactcttaaatggtccaaaatgaatttaacctacagaattgtgaattacacccctgatatgactcattctgaagtcgaaaaggcattcaaaaaagccttcaaagtttggtccgatgtaactcctctgaattttaccagacttcacgatggcattgctgacatcatgatctcttttggaattaaggagcatggcgacttctacccatttgatgggccctctggcctgctggctcatgcttttcctcctgggccaaattatggaggagatgcccattttgatgatgatgaaacctggacaagtagttccaaaggctacaacttgtttcttgttgctgcgcatgagttcggccactccttaggtcttgaccactccaaggaccctggagcactcatgtttcctatctacacctacaccggcaaaagccactttatgcttcctgatgacgatgtacaagggatccagtctctctatggtccaggagatgaagaccccaaccctaaacatccaaaaacgccagacaaatgtgacccttccttatcccttgatgccattaccagtctccgaggagaaacaatgatctttaaagacagattcttctggcgcctgcatcctcagcaggttgatgcggagctgtttttaacgaaatcattttggccagaacttcccaaccgtattgatgctgcatatgagcacccttctcatgacctcatcttcatcttcagaggtagaaaattttgggctcttaatggttatgacattctggaaggttatcccaaaaaaatatctgaactgggtcttccaaaagaagttaacaagcttcagtaa

SEQ ID NO: 151882 - DNA, 3732 bp, Homo sapiens
  Payload ID: 9895
  Gene Symbol: MMP14
  Gene Name: matrix metallopeptidase 14 (membrane-inserted)
  Uniprot ID: P50281
  ENST ID: ENST00000311852
  CDS Start-End: 262-2010
accagaggagagagcgagagagggaaccagaccccagttcgccgactaagcagaagaaagatcaaaaaccggaaaagaggagaagagcaaacaggcactttgaggaacaatcccctttaactccaagccgacagcggtctaggaattcaagttcagtgcctaccgaagacaaaggcgccccgagggagtggcggtgcgaccccagggcgtgggcccggccgcggagcccacactgcccggctgacccggtggtctcggaccatgtctcccgccccaagacccccccgttgtctcctgctccccctgctcacgctcggcaccgcgctcgcctccctcggctcggcccaaagcagcagcttcagccccgaagcctggctacagcaatatggctacctgcctcccggggacctacgtacccacacacagcgctcaccccagtcactctcagcggccatcgctgccatgcagaagttttacggcttgcaagtaacaggcaaagctgatgcagacaccatgaaggccatgaggcgcccccgatgtggtgttccagacaagtttggggctgagatcaaggccaatgttcgaaggaagcgctacgccatccagggtctcaaatggcaacataatgaaatcactttctgcatccagaattacacccccaaggtgggcgagtatgccacatacgaggccattcgcaaggcgttccgcgtgtgggagagtgccacaccactgcgcttccgcgaggtgccctatgcctacatccgtgagggccatgagaagcaggccgacatcatgatcttctttgccgagggcttccatggcgacagcacgcccttcgatggtgagggcggcttcctggcccatgcctacttcccaggccccaacattggaggagacacccactttgactctgccgagccttggactgtcaggaatgaggatctgaatggaaatgacatcttcctggtggctgtgcacgagctgggccatgccctggggctcgagcattccagtgacccctcggccatcatggcacccttttaccagtggatggacacggagaattttgtgctgcccgatgatgaccgccggggcatccagcaactttatgggggtgagtcagggttccccaccaagatgccccctcaacccaggactacctcccggccttctgttcctgataaacccaaaaaccccacctatgggcccaacatctgtgacgggaactttgacaccgtggccatgctccgaggggagatgtttgtcttcaaggagcgctggttctggcgggtgaggaataaccaagtgatggatggatacccaatgcccattggccagttctggcggggcctgcctgcgtccatcaacactgcctacgagaggaaggatggcaaattcgtcttcttcaaaggagacaagcattgggtgtttgatgaggcgtccctggaacctggctaccccaagcacattaaggagctgggccgagggctgcctaccgacaagattgatgctgctctcttctggatgcccaatggaaagacctacttcttccgtggaaacaagtactaccgtttcaacgaagagctcagggcagtggatagcgagtaccccaagaacatcaaagtctgggaagggatccctgagtctcccagagggtcattcatgggcagcgatgaagtcttcacttacttctacaaggggaacaaatactggaaattcaacaaccagaagctgaaggtagaaccgggctaccccaagtcagccctgagggactggatgggctgcccatcgggaggccggccggatgaggggactgaggaggagacggaggtgatcatcattgaggtggacgaggagggcggcggggcggtgagcgcggctgccgtggtgctgcccgtgctgctgctgctcctggtgctggcggtgggccttgcagtcttcttcttcagacgccatgggacccccaggcgactgctctactgccagcgttccctgctggacaaggtctgacgcccaccgccggcccgcccactcctaccacaaggactttgcctctgaaggccagtggcagcaggtggtggtgggtgggctgttcccatcgtcccgagccccctccccgcagcctccttgcttctctctgtcccctggctggcctccttcaccctgaccgcctccctccctcctgccccggcattgcatcttccctagataggtcccctgagggctgagtgggagggcggccctttccagcctctgcccctcaggggaaccctgtagctttgtgtctgtccagccccatctgaatgtgttgggggctctgcacttgaaggcaggaccctcagacctcgctggtaaaggtcaaatggggtcatctgctccttttccatcccctgacataccttaacctctgaactctgacctcaggaggctctgggcactccagccctgaaagccccaggtgtacccaattggcagcctctcactactctttctggctaaaaggaatctaatcttgttgagggtagagaccctgagacagtgtgagggggtggggactgccaagccaccctaagaccttgggaggaaaactcagagagggtcttcgttgctcagtcagtcaagttcctcggagatctgcctctgcctcacctaccccagggaacttccaaggaaggagcctgagccactggggactaagtgggcagaagaaacccttggcagccctgtgcctctcgaatgttagccttggatggggctttcacagttagaagagctgaaaccaggggtgcagctgtcaggtagggtggggccggtgggagaggcccgggtcagagccctgggggtgagcctgaaggccacagagaaagaaccttgcccaaactcaggcagctggggctgaggcccaaaggcagaacagccagagggggcaggaggggaccaaaaaggaaaatgaggacgtgcagcagcattggaaggctggggccgggcaggccaggccaagccaagcagggggccacagggtgggctgtggagctctcaggaagggccctgaggaaggcacacttgctcctgttggtccctgtccttgctgcccaggcagcgtggaggggaagggtagggcagccagagaaaggagcagagaaggcacacaaacgaggaatgaggggcttcacgagaggccacagggcctggctggccacgctgtcccggcctgctcaccatctcagtgaggggcaggagctggggctcgcttaggctgggtccacgcttccctggtgccagcacccctcaagcctgtctcaccagtggcctgccctctcgctcccccacccagcccacccattgaagtctccttgggccaccaaaggtggtggccatggtaccggggacttgggagagtgagacccagtggagggagcaagaggagagggatgtcgggggggtggggcacggggtaggggaaatggggtgaacggtgctggcagttcggctagatttctgtcttgtttgtttttttgttttgtttaatgtatatttttattataattattatatatgaattccattcaaatcgttcctttttgttaacaaggggcatggggaggggtgggggtgggggggcagaggcgtctgaccccaggaacctgcagggcggggctgggtcggtgccctctaaggacaattttgaccttgttcaacctttccacaaagaataaattgtgtttcacattc

SEQ ID NO: 151883 - DNA, 582 bp, Homo sapiens
  Payload ID: 9895
  Gene Symbol: MMP14
  Gene Name: matrix metallopeptidase 14 (membrane-inserted)
  ENST ID: ENST00000548761
  CDS Start-End: 1-582
atgcgcgagagtttgttgtttcttcgacttcccagctctccagcgctctcccgccggcgcgccctccgatgggcgcttcggcctccccgggtggcccaggccttcagcggacgagtctgcggccaggcctggctacagcaatatggctacctgcctcccggggacctacgtacccacacacagcgctcaccccagtcactctcagcggccatcgctgccatgcagaagttttacggcttgcaagtaacaggcaaagctgatgcagacaccatgaaggccatgaggcgcccccgatgtggtgttccagacaagtttggggctgagatcaaggccaatgttcgaaggaagcgctacgccatccagggtctcaaatggcaacataatgaaatcactttctgcatccagaattacacccccaaggtgggcgagtatgccacatacgaggccattcgcaaggcgttccgcgtgtgggagagtgccacaccactgcgcttccgcgaggtgccctatgcctacatccgtgagggccatgagaagcaggccgacatcatgatcttctttgccgagggcttccatggcgac

SEQ ID NO: 151884 - DNA, 412 bp, Homo sapiens
  Payload ID: 9895
  Gene Symbol: MMP14
  Gene Name: matrix metallopeptidase 14 (membrane-inserted)
  ENST ID: ENST00000547279
  CDS Start-End: 199-412
aaaaaccggaaaagaggagaagagcaaacaggcactttgaggaacaatcccctttaactccaagccgacagcggtctaggaattcaagttcagtgcctaccgaagacaaaggcgccccgagggagtggcggtgcgaccccagggcgtgggcccggccgcggagcccacactgcccggctgacccggtggtctcggaccatgtctcccgccccaagacccccccgttgtctcctgctccccctgctcacgctcggcaccgcgctcgcctccctcggctcggcccaaagcagcagcttcagccccgaatccttggaagaactttacaactggggcgaactcccccttccccgattcccttgggctctgctctcagctctggaaccgcctgataaacatttggactccgctcaaa

SEQ ID NO: 151885 - DNA, 4250 bp, Homo sapiens
  Payload ID: 9896
  Gene Symbol: MMP15
  Gene Name: matrix metallopeptidase 15 (membrane-inserted)
  Uniprot ID: P51511
  ENST ID: ENST00000219271
  CDS Start-End: 786-2795
cgcggggtgggctggagaggtttcctgccgtctgggaagcgtaaacggaccgcccacctgtcgggcctcggccgcccgcacctgcttgtgagaagcctgcggctggggcaccgcccccggtccccgcccgggtccgcgcattgggagcacactggccctttaagagcgcggcggccgcggcgcgcggggaggagggctgggagcgcccggagccgcgctgaactcgccggggacgtcgggcgcccgctccttggctggctcgcttgctctctcgctcgctctctcgggtcggctccctgcgcctcctcccgggactgcttggggacccgggcccggtcgggcgcggcggcgagcagaatccccgtgcaggaggcgcgcgctccgggcagcgcccggccccgggcatggacagagggagctgggcgcgcagggagcgccgcgggaccgggcggccggagcgctgagccagacaaaggctccggagttgcgcttgctctcgggagccgggccccaggcgctgggcgccgaggctgcggaacctcgccgggggcagctccggtcggccccctttcccgccggctggttccgagctcccggacctgccctgcccgcttctcctcgggcttgggaatttgccgaggcgacctaggcggctccggcggggaccgggagcccgaggtccgcggcgcgcctgccgggccaggagccagggagcgtcgcaagtttccaaggcgcgtgcgaggatccggcgtgcagtgttccgagctgggctgggcgccgagagcatgggcagcgacccgagcgcgcccggacggccgggctggacgggcagcctcctcggcgaccgggaggaggcggcgcggccgcgactgctgccgctgctcctggtgcttctgggctgcctgggccttggcgtagcggccgaagacgcggaggtccatgccgagaactggctgcggctttatggctacctgcctcagcccagccgccatatgtccaccatgcgttccgcccagatcttggcctcggcccttgcagagatgcagcgcttctacgggatcccagtcaccggtgtgctcgacgaagagaccaaggagtggatgaagcggccccgctgtggggtgccagaccagttcggggtacgagtgaaagccaacctgcggcggcgtcggaagcgctacgccctcaccgggaggaagtggaacaaccaccatctgacctttagcatccagaactacacggagaagttgggctggtaccactcgatggaggcggtgcgcagggccttccgcgtgtgggagcaggccacgcccctggtcttccaggaggtgccctatgaggacatccggctgcggcgacagaaggaggccgacatcatggtactctttgcctctggcttccacggcgacagctcgccgtttgatggcaccggtggctttctggcccacgcctatttccctggccccggcctaggcggggacacccattttgacgcagatgagccctggaccttctccagcactgacctgcatggaaacaacctcttcctggtggcagtgcatgagctgggccacgcgctggggctggagcactccagcaaccccaatgccatcatggcgccgttctaccagtggaaggacgttgacaacttcaagctgcccgaggacgatctccgtggcatccagcagctctacggtaccccagacggtcagccacagcctacccagcctctccccactgtgacgccacggcggccaggccggcctgaccaccggccgccccggcctccccagccaccacccccaggtgggaagccagagcggcccccaaagccgggccccccagtccagccccgagccacagagcggcccgaccagtatggccccaacatctgcgacggggactttgacacagtggccatgcttcgcggggagatgttcgtgttcaagggccgctggttctggcgagtccggcacaaccgcgtcctggacaactatcccatgcccatcgggcacttctggcgtggtctgcccggtgacatcagtgctgcctacgagcgccaagacggtcgttttgtctttttcaaaggtgaccgctactggctctttcgagaagcgaacctggagcccggctacccacagccgctgaccagctatggcctgggcatcccctatgaccgcattgacacggccatctggtgggagcccacaggccacaccttcttcttccaagaggacaggtactggcgcttcaacgaggagacacagcgtggagaccctgggtaccccaagcccatcagtgtctggcaggggatccctgcctcccctaaaggggccttcctgagcaatgacgcagcctacacctacttctacaagggcaccaaatactggaaattcgacaatgagcgcctgcggatggagcccggctaccccaagtccatcctgcgggacttcatgggctgccaggagcacgtggagccaggcccccgatggcccgacgtggcccggccgcccttcaacccccacgggggtgcagagcccggggcggacagcgcagagggcgacgtgggggatggggatggggactttggggccggggtcaacaaggacgggggcagccgcgtggtggtgcagatggaggaggtggcacggacggtgaacgtggtgatggtgctggtgccactgctgctgctgctctgcgtcctgggcctcacctacgcgctggtgcagatgcagcgcaagggtgcgccacgtgtcctgctttactgcaagcgctcgctgcaggagtgggtctgaccacccagcgctcctgctaacggtgctcagggggcgcctgtggttctgagatggctcccaggggctccctccgcccccaggtaggggcccctctcagccctcacacaccctgtctgccccgccctcattatttatgtccaggtgtttgttttgttttgtttttggcaccttacttgaccatttgtttctgtttccccgactggggcagggtgtttagaattttctaaatgtagttctgctccagacagggaattaggcccccatcatcctctggcttggccacagccaggggagcagaggggcagaggcccacattggaagagcagcacctcctcagcctgaaccccagggctgtaactgccaggctctctttgcccagttggagactgtctggcccccctggtcccctccttcccaagtgagtctctctgggccttaggaagagccttccacccaggggcagccccaggccaaaggggacctggaagggaggtgggccgtggcccttgagtccccattgaggcttggttccttcccaatccagtggacttcgcagtccacttctgacagcctcagtgaccctggctccttgtgccagagaacccagcccacccccggcagcagcccccagctcccacctccccttgggcccacacctccttccctctctggagaaagggccctgggcctgcctcaccacggaccaaagggagtctgccagggcccctctccccagggaagcagcagcctcgcccctggcagagatgcctccctgagctagaaccctctgttccttccctgtgcctcctccctccctctccgactcacaccactagcctcaggggtctgagctccagctcctttgggcttcagctgccagtgtcctgagccccagggagagggggctggtgggtgcctaggcctgggcagtggatggccgtgaatgggtgcccacagtgtcaggcactgggcatgaggggttcctcccctccagctccctgtgcccccagggtcctgggaggagagacactggtggggataggccagccgcgcatcagactgtgaaccccacgaaggagcccattgtggcctaagaggctgccctcctgtgctcagccctgaggacagatgcctccttcctcttttccttcccaaagcaagcaagaggccgtggctgctgtgggaaatggtactgtacagctggctctacttccccatggccctgagcgagtggagtctgccacccaggatccccaaggcacttgagggggaaggattctgctggcctctgcgagtggtttcttgtgcactggcaccaagtgcgggtccggcagcttctgccccctgcagaaccggagagccagctaaggggtggggctgcgggggttccgtgtccacccccatacatttatttctgtaaataatgtgcactgaataaattgtacagccggcaaa

SEQ ID NO: 151886 - DNA, 349 bp, Homo sapiens
  Payload ID: 9896
  Gene Symbol: MMP15
  Gene Name: matrix metallopeptidase 15 (membrane-inserted)
  ENST ID: ENST00000570065
  CDS Start-End: 1-293
ccagcactgacctgcatggaaacaacctcttcctggtggcagtgcatgagctgggccacgcgctggggctggagcactccagcaaccccaatgccatcatggcgccgttctaccagtggaaggacgttgacaacttcaagctgcccgaggacgatctccgtggcatccagcagctctacggtgcgtgggctgtgaccagcgggctctgcatgccgctctcaagtccctggccaatgaggagtaggcattgctgccatccccattttgtagatgaggaacccaaggctcagtgaggattagtgacttgcccacatcatttggggaataaatggtggtactggaaatgaaa

SEQ ID NO: 151887 - DNA, 11558 bp, Homo sapiens
  Payload ID: 9897
  Gene Symbol: MMP16
  Gene Name: matrix metallopeptidase 16 (membrane-inserted)
  Uniprot ID: P51512
  ENST ID: ENST00000286614
  CDS Start-End: 283-2106
tctttgagccggaaccgccggtgaacttaggcgccacgttcccggtgactgaccccggaggatggtgaacaggaactactgctgaccctgtcttcgccgctgcctctcgggggctgccgagcgcggggcccctgtctcctccccttgcccggctgtgggtgaacctgcaggctccttacccacccggaggacttttttttgaaaggaaacgagggagggagggagagggagagagggagaaaacgaaggggagctcgtccatccattgaagcacagttcactatgatcttactcacattcagcactggaagacggttggatttcgtgcatcattcgggggtgtttttcttgcaaaccttgctttggattttatgtgctacagtctgcggaacggagcagtatttcaatgtggaggtttggttacaaaagtacggctaccttccaccgactgaccccagaatgtcagtgctgcgctctgcagagaccatgcagtctgccctagctgccatgcagcagttctatggcattaacatgacaggaaaagtggacagaaacacaattgactggatgaagaagccccgatgcggtgtacctgaccagacaagaggtagctccaaatttcatattcgtcgaaagcgatatgcattgacaggacagaaatggcagcacaagcacatcacttacagtataaagaacgtaactccaaaagtaggagaccctgagactcgtaaagctattcgccgtgcctttgatgtgtggcagaatgtaactcctctgacatttgaagaagttccctacagtgaattagaaaatggcaaacgtgatgtggatataaccattatttttgcatctggtttccatggggacagctctccctttgatggagagggaggatttttggcacatgcctacttccctggaccaggaattggaggagatacccattttgactcagatgagccatggacactaggaaatcctaatcatgatggaaatgacttatttcttgtagcagtccatgaactgggacatgctctgggattggagcattccaatgaccccactgccatcatggctccattttaccagtacatggaaacagacaacttcaaactacctaatgatgatttacagggcatccagaagatatatggtccacctgacaagattcctccacctacaagacctctaccgacagtgcccccacaccgctctattcctccggctgacccaaggaaaaatgacaggccaaaacctcctcggcctccaaccggcagaccctcctatcccggagccaaacccaacatctgtgatgggaactttaacactctagctattcttcgtcgtgagatgtttgttttcaaggaccagtggttttggcgagtgagaaacaacagggtgatggatggatacccaatgcaaattacttacttctggcggggcttgcctcctagtatcgatgcagtttatgaaaatagcgacgggaattttgtgttctttaaaggtaacaaatattgggtgttcaaggatacaactcttcaacctggttaccctcatgacttgataacccttggaagtggaattccccctcatggtattgattcagccatttggtgggaggacgtcgggaaaacctatttcttcaagggagacagatattggagatatagtgaagaaatgaaaacaatggaccctggctatcccaagccaatcacagtctggaaagggatccctgaatctcctcagggagcatttgtacacaaagaaaatggctttacgtatttctacaaaggaaaggagtattggaaattcaacaaccagatactcaaggtagaacctggatatccaagatccatcctcaaggattttatgggctgtgatggaccaacagacagagttaaagaaggacacagcccaccagatgatgtagacattgtcatcaaactggacaacacagccagcactgtgaaagccatagctattgtcattccctgcatcttggccttatgcctccttgtattggtttacactgtgttccagttcaagaggaaaggaacaccccgccacatactgtactgtaaacgctctatgcaagagtgggtgtgatgtagggttttttcttctttctttcttttgcaggagtttgtggtaacttgagattcaagacaagagctgttatgctgtttcctagctaggagcaggcttgtggcagcctgattcggggctgacctttcaaacccagagggttgctggtcctgcacatgagtggaaatacactcatggggaagcttccatgatgcacagtatctgctgttcttcagtcctttgtctttctttgtcattcagttctaggcctttcctctgcacgctcaatgcccagtaaaatttcaggattaactaaagaagaggagaaaaagaagaaaagattcttcttaaaagtttctaatgttattttccttctgaagtctgagcccatttctggggggagaaaaaaaaagcaaatcagaaaacccacggtttttctttttttctttttttctttttttctttttttgctttaaaacaaagggaaaaaagagtttaaacaaaaaacccacaattgaacttccaggaaagtgtgaagacccaaaacagctttgtctccaaagaagatagctctctgactgctttggatagtctcctacgcaccattttgtcaggtgggagatttggaatacacatgcaggacgttagactgttgggacagccattttccaacaaccaaggggccaaaatatctgcaatatagtaacagccttaataatacatccatttttcgttttatacagctgttctcagctatgtcctcagtgtttcatcgcatttatattcatagctattttcaaacacgaccttttaattgtttttgaagtatttctaaaccccttctttccaccttactcctccatcattgtgataatcttcccaagttgtattaggccattgccccaggccttccatgggtctgtcaggaatattcgttacaaagcagagcaagaagcagtatgtctctgaagtggattacagtggcagttattttacaaggatttgtgacactagtaacatacccgtgtaaccctttgagaactatcagaccagctttcagagtcttaggattgtcggtcttgcgatctgataaattatagaactgggcaatggtaaaaacagtcacaagttcaagaagttcaggtttttaaaacagatatcctataatgtcatataatttttaaatgatttacaagactacataaatgtgtttataacaaacagaaatgatgttacttgccaaaatttttctggcaaataaaaaaggtattttattaagattctcataaatctgaaattttatttgaaaaactgataatagcctaagtcttcttttcttttttttaggcatactgaatttctgttttaaaatccattgcatgaaaattcaatttgccttggtatatgcagttagcattgccattttaaaaatgaattaaaacggtgactctgaagttgcatgaatatcctccagtgcattacctattgcatgtccaccatagttctcaaagggttagtgtggcttctggcatttagccgtccatttgatcactgacagagccaagagaccaccaaagcatttcattgttgagtgtaatttgtcctaacagcagtattgtcattttcatgtgacctgcagagcaggtttgtatcaatatttttttcctagagaaaagtcagcaactgacagacctctttattgatttttaggagctgcttcttgcagtgaaaggctttacagccactgggctgtgaacttattagagatggtcagaatgaatgcaccccatgagtcagacattggctttgtgtgaaagccagctttgaggggattagcttttgaaacaatgaacagcttgccttgaacttgattattgatctattgactgtcattaacaacaacttaaacattgtcttctgtgaaaattttccttgaagagtcctgttctatgtctttgccctttgacctttaacttgcaaactggcacaaactgaaggaaatctggtgttgcttctccattggattagttgttctctaaaacctagtaagcatgagctgtttccttagagtggagagagtggtgatggcagatctgcagatggacactttgctctttacatgcacactctgaaaatgccctataggtagaagtgaattttaatttcattttaatataatttcaagtctaaattcatcattttagtacaaattacaaaaactataggaaaaaaaaaacctcaaatacttgaatggccagtgtggcttttatataaagcaggaattttatactagtaaaaatttcttactcatttgctaatacacatttccagatgatttttaatgagtgtaggtatacattcttatttggaaatggatagtttggctgccttgaatttatatttatactcaacgtagcatgaaaattagaatgccttttggttaaactacatgtttatgatttggttggggaaaatattttataattgtgggtggcatgctgcaaagccttgcagattgttatttcttacaacctgagcgtatatagtatgagcctaagaaaaaagaagagtaagaaaagaagaatggctttacagtaaaatatcatacaatgcagacaatattttaagaggatattggagattatgtacgcaagggccaagaaagcaagaaatgagaaccagagtcagccctgtagctttacttcagtgcttccattctagatgatgctgatattataaagagttagtcactgctgctaagcatggaggactatatacataagctcgtttatacagtgtttgcttgtgggagggtttaatccttttagggccttgatgtcaagaaaaaaataactggaaactatattttgctaaagatagaaatgaggaactgtgtcattttgggacatgtgcaaatcattgaggaactccatcaccctgcattgaaaattgatttttttttcctctaaaatgagaaagaaactgaataagcaatctgttgcctctttactcattcatcacaatatcctgattcgtcataaggctatcagtatataagggctagaaaataatcatagcattaagaaggaaggagtctatcattatgcttgaattctggcaaatgtcatgaataagggttgggtcatatttactttaatatgagacaagatttatgtgataagcaaaggcatataaggctgctcttttgaacagaacatttcagttatcaggctgtactattacaagagataagaagacaataaggacaatgtaatcacaaacagtgggattccatttgtttattgtacaccagctactttgtgggtatggttcctgactcctcttctacatgaggtttgggaaaaaagtctcaaaccaaatggaacagtgaaagggaaagtaattcatctagcacataagaatagtgattcaaaaccaatgcagaataaatttccatgggtcaataacataaggtgtcagttcagtgttactagagatatgcaaggcataaaatattttcatcaccccatcactaataacatgaaaagctcagacataggatttcccaaattgaaatgaaaacacattcatgcctgcaaaaataattctccttctgcttcatttctcattactttatctaatataaacacaaatgtaaacaaggtaatggtcttcatgtaaaatgaccatatagttaagaattttagtaaaatattgttgttctgtgtattattaaacaaatgcaatgaagtattaaaatagctgatcagtttgaatttcctgtaaagcagtaattccgcatcagaattgtagataaggttgtgaatttattgactcatttcagaacagtgtctgttgacatggcagtcagagcaggtgaatacagatgctctttctgattgcaaaggttatagagctaaattagacagcattatgtgatactagcaaagacaacttctgttataaatcagagggcaaggcttttctgaatcgatgtgataaattactaagtaatgattaccaaaaataattactaagtaataaaagatacagactggtttactgaaataagcaagtgttacatttaataattacctataatctttttttgttaacacataagcaagtgttacctttaataattacctataatctttttttgttaacacataatttggccatttcatatactgtgtacctattttcattccctctctgtgggtcattaaaaaacacaatgtggtggataagaacattgtccaaacttcactgctagttccaatacatagatgatggtgtgtaaactggattgtaggggtagtcatatttgcaagttctacatgttatgctaatatatctagtatggtacacatacacgcccacactttgtggatcttacagtggaataaatagtgtgtccatattaactaaactcaaagtgctatctgaagaggaatggatgttataagcagacagacagactgagttaaactgagtcatgaaaaaatatatattttaaagtttttggaatcatttccagaaactaataaagggaattatttactggtagtattgagtctgtgagattgtagtatatactgaaacaatcttctggatggtggtaaggtcttttttagcaaacacagtaaagagcttatttcatttctgatgctttcaagggcatattccaaagtatcacagatgtcaaatagaatatgctatataaaccaaaaatgtgcatttcagatgacctattacagcaatctcagccaatatgtaatatcacaaaatgtgtcaagtcaatcatataagaggatctaatcattcggctgtatttcatgtaccttcatgttgttgatatattgtgaccacaggaaataggtgccagagcatatgcagttaagttacaggctccacgttgcctaggagggaatcataactacatcagaaaatttttaacagttatatcttaaaaattagaattttatgtaataaataaagcggcaaccaggaatagcaacgcaacaaatatgaaagctaattattatatttagctttcatatttatataatatgatggaaatggaggaggaaaaatgagtcttttgttaaatataaagacaaactataacactccttgataatacaactggaaattttactttagcaagcataaaatagtggaggaaaaaaatccaacttcaagctctttgcactagtgatgattatgtgatatatcaatgtaatatttagccagtggtcattagatgttactgtgcttaaacacatctgatactcatgcattgccttacaggctaaaaatgtaagaggtaggtgttcagtaacctcaagttggaaagatatataatgttagaatcccctgagacaagccatttccctgaaatagaaatttacctcaatactcatgtaatctaagacacttggcgtagtagcaaagaagttgccttcatgttctagtctcatctaattgtgacctttgtctttcatgtacttctgaaatcattttccactttttccactggtgtgattttgaaacaattctgaaatatttcaggtaagattaataacatccaattacaaatatatgtttcaatattttatacgtatgtctactttgaaagttaaaccaatagtatagaaagcctaagaatgaacactgattggacatactcacagaaattaagggaaaaacacatattgtaaaattcctgtcaatgtttgagtagaatacagaagtacatagcagtcttcaatttttaaacacaattatgggcttataactggacgtgacatgcatcatttattagaacaatattatttatttatactaagtaaggatataagatcacagaagcttagtgttataacggagacttcacagacattcataactaatgttttctaaggcaaataagggcataaaccagaactcatggtcagtgcagagtaagtataaaaagttatgtatgaaagacatttatttatagagatttctgaggattctatgccttttcaacttaaagatgagtgtgtcttagaatttgttttatgcatcattggactggggatgatattcaaatgtgcactcagcgtgtcctcacattaaagggcacattgaacagtataggaaaatacatcataaactagaatgttgtacagattcatataactttcccatgtgctctgctgtagagctgaatttatatgcccttaaaaagggataagaatcaattaaatataaatacggaaatatacttatgttaggtcacttagcttcagagcaagatgtcattaacctttatttcacagagaaaaactggaagaaaagaatggtgaacaagaataaaatgataaactttttggcttatagagatgtttcttgggaattttttccacttgtttttatacatgaaaaaaatatcagtcacaatacagacatttctgtagtatttggtctgtgggtaaactggatcccaggcagaatactttttgacacaggcctttttatacatgctttatatatgatgaagctttggtgagatgtgactgcatggtaggatgcattttcctaggataggatatggtgctgcttgtacttgccaccttttatatgaatgtatgtcgctacattggcctgtcttgccaagacatggttgaatgaagcctggtgtgagctgtctatttgaaaagtcactaggatgcatgtttcatttgccgttacataatgccaatttgaacctgtttcctctatatattaacaatccaattgttaagataaaatatactttgcttgaatgaatgattttggtagtaatatgagcgttatccttaaatcaatgttacaatttttgctattactgaaataccgtcacagaggccacattattggctgtctataccattgcctgagtaaaattaggtttttaggtctttttggcatttacttcttttacagctgatgtggaatcaattattcctttatatgttcataagtacaaaatttcactatcttaattacttccaaacaaacaatttccaagcaagggtatgtgtgcctggtttttctgctcctccaattctaagatcgttatttgtttgccttctgtttctcacccaaaaatacagatggttgggaaagatacatcttattgagttgtcctatgcagtctctgtctatatttgcatttctttctattcctatcttgccttttttttttttttttacacagatttggttttcccttccctttgtgaaaaccagaattgagcagcattgtacatcagagatggtacccaggaaatgtctttgttcctcagtatttttcgtcaaaacttccatgcaaagacagtcccagcaaagttgacatacatcccaacctctctcattggcttttctaactttttatagagctattcccctgagaaaagtgaaatgctgagtatgatgggtattgcctgttgataggatagctaaggaaatttgcttttggagaatgtatcttaaataattatacaggaaagtagtcacagtatagtgttctgtttaaggtacatcatgggtacataaatgcctaaaaccttcatcctttggtctatttctctgtaagtgtaaattacatatatattagaaagagagatagaatcaaagaattaggggtgttacagaggcagctttttgctgccttggttttgactgtatcagcatttctattgcagacctctattttcaggggttttagagactcgaccataaaaatttgtttcaggcttaaaagttttgaaagatttttttaggtatctgattttaaacaaatagatcttgtttttatattataggagggaaataaatggagtttactagttcaattttgcgctaatataacttttaataaacttaactttttaaacaaaaacataaaatctaattagttcatagttggttgatgcttttttaaaagaatcaattattgaccttgagaaacttgcctgcttcatcagtatagtaacctatctttaagatattttaaaacgtgtatacctttattaacattatcttgattccagcggtggatcagtatgataatgcagatttatgacatccatataagctatctggtaatatagatttaggaatatatagtatatatgatacatatatatatatatatttactagatagattaaggagaaaaagctcccataaacttagtttgtcaaataaataccatatatttaaaaaatgcacagacatttatcattcagagtcagaatgagattcaagtaattgcaaagggaagttgtctcttgggtaaacaatacacattttatagcttcttgtgaaactaattttttcctttctatattgtggttatgggaaagtaaaagaattaaaattaatacagactttatttaaataacattaaactgtgaagcagagagaaacgccaggaaattaaatatttaggccattatcttgtggttgtctgacaatacttcacctttcttttaattccccatgatgttttcaattatggagagagtattaaaatctagatttaagtttctgcattgttctcattacactcaacactatttcattaagttcttgataatatgtagtcttctgtgtgcaaggaaagaaataaataacacatttatttgctgaatgagttttaaggtgtgcaagttgtagtgatgtttttcccacacaggattctatacacttataccatcttaaatctggcattttttttttcagatagcttctactgacaaacacaaagcttgtttgtgtgcaaatataaggctaaataaatggtgctaaagtgtattatgactgtcagataaaatcaggcaaaattttgtggtgcttaaattaattttttcattgattttattgatcagtgcattgaacagtgtttattattcacaagttgtcttttattagtaaatcaaggcctcatagcacattgttaaataaagtggttgactagtctatgtaacagctcaccaagctactatctcttttaactccttataatgttgcgtcattaaaggtcaaggggtcatgctattaatctcattgctatagaccattaacatgactgaacttttccacaaagtacttatgtttacaatgctataaccctttgactgctgcggcaacctttaaccacacaaatgtcacaagctagaatcatcagcatggttcttgccatggcaatcaaagagttaagggctgtgcagtgatttgttttgtatttattaatttatatttattttgtttccattcaaggaggggattaggggtggggcagtttttgtctgctgtaagtgtcttaacctagggaagggttaaatggctttttatactattgcatcttctgtatttaccatcaattcattgtgttgtaattaaaagaaactgtcaataaataagagaacagaaaaatg

SEQ ID NO: 151888 - DNA, 551 bp, Homo sapiens
  Payload ID: 9897
  Gene Symbol: MMP16
  Gene Name: matrix metallopeptidase 16 (membrane-inserted)
  ENST ID: ENST00000522726
  CDS Start-End: 46-551
aagaaagaatggagccgcccaagttcctgggtgcctgcctcggggatgcgggatgggagatactgtcgaagagctgtgctcaaaccagggcccttgtcgcgggctggatacctccgcactggaagacggttggatttcgtgcatcattcgggggtgtttttcttgcaaaccttgctttggattttatgtgctacagtctgcggaacggagcagtatttcaatgtggaggtttggttacaaaagtacggctaccttccaccgactgaccccagaatgtcagtgctgcgctctgcagagaccatgcagtctgccctagctgccatgcagcagttctatggcattaacatgacaggaaaagtggacagaaacacaattgactggatgaagaagccccgatgcggtgtacctgaccagacaagaggtagctccaaatttcatattcgtcgaaagcgatatgcattgacaggacagaaatggcagcacaagcacatcacttacagtataaagaacgtaactccaaaagtaggagaccctgagactcgtaaagctat

SEQ ID NO: 151889 - DNA, 2411 bp, Homo sapiens
  Payload ID: 9898
  Gene Symbol: MMP17
  Gene Name: matrix metallopeptidase 17 (membrane-inserted)
  Uniprot ID: Q9ULZ9
  ENST ID: ENST00000360564
  CDS Start-End: 103-1914
agtccggcgggggcgccgcggagagcggagggcgccgggctgcggaacgcgaagcggagggcgcgggaccctgcacgccgcccgcgggcccatgtgagcgccatgcggcgccgcgcagcccggggacccggcccgccgcccccagggcccggactctcgcggctgccgctgccgctgctgctgctgctggcgctggggacccgcgggggctgcgccgcgcccgcacccgcgccgcgcgccgaggacctcagcctgggagtggagtggctaagcaggttcggttacctgcccccggctgaccccacaacagggcagctgcagacgcaagaggagctgtctaaggccatcacagccatgcagcagtttggtggcctggaggccaccggcatcctggacgaggccaccctggccctgatgaaaaccccacgctgctccctgccagacctccctgtcctgacccaggctcgcaggagacgccaggctccagcccccaccaagtggaacaagaggaacctgtcgtggagggtccggacgttcccacgggactcaccactggggcacgacacggtgcgtgcactcatgtactacgccctcaaggtctggagcgacattgcgcccctgaacttccacgaggtggcgggcagcgccgccgacatccagatcgacttctccaaggccgaccataacgacggctaccccttcgacggccccggcggcaccgtggcccacgccttcttccccggccaccaccacaccgccggggacacccactttgacgatgacgaggcctggaccttccgctcctcggatgcccacgggatggacctgtttgcagtggctgtccacgagtttggccacgccattgggttaagccatgtggccgctgcacactccatcatgcggccgtactaccagggcccggtgggtgacccgctgcgctacgggctcccctacgaggacaaggtgcgcgtctggcagctgtacggtgtgcgggagtctgtgtctcccacggcgcagcccgaggagcctcccctgctgccggagcccccagacaaccggtccagcgccccgcccaggaaggacgtgccccacagatgcagcactcactttgacgcggtggcccagatccggggtgaagctttcttcttcaaaggcaagtacttctggcggctgacgcgggaccggcacctggtgtccctgcagccggcacagatgcaccgcttctggcggggcctgccgctgcacctggacagcgtggacgccgtgtacgagcgcaccagcgaccacaagatcgtcttctttaaaggagacaggtactgggtgttcaaggacaataacgtagaggaaggatacccgcgccccgtctccgacttcagcctcccgcctggcggcatcgacgctgccttctcctgggcccacaatgacaggacttatttctttaaggaccagctgtactggcgctacgatgaccacacgaggcacatggaccccggctaccccgcccagagccccctgtggaggggtgtccccagcacgctggacgacgccatgcgctggtccgacggtgcctcctacttcttccgtggccaggagtactggaaagtgctggatggcgagctggaggtggcacccgggtacccacagtccacggcccgggactggctggtgtgtggagactcacaggccgatggatctgtggctgcgggcgtggacgcggcagaggggccccgcgcccctccaggacaacatgaccagagccgctcggaggacggttacgaggtctgctcatgcacctctggggcatcctctcccccgggggccccaggcccactggtggctgccaccatgctgctgctgctgccgccactgtcaccaggcgccctgtggacagcggcccaggccctgacgctatgacacacagcgcgagcccatgagaggacagaggcggtgggacagcctggccacagagggcaaggactgtgccggagtccctgggggaggtgctggcgcgggatgaggacgggccaccctggcaccggaaggccagcagagggcactgtccgccagggctgggcaggctcaggtggcaaggacggagctgtcccctagtgagggactgtgttgactgacgagccgaggggtggccgctccagaagggtgcccagtcaggccgcaccgccgccagcctcctccggccctggagggagcatctcgggctgggggcccacccctctctgtgccggcgccaccaaccccacccacactgctgcctggtgctcccgccggcccacagggcctccgtccccaggtccccagtggggcagccctccccacagacgagccccccacatggtgccgcggcacgtcccccctgtgacgcgttccagaccaacatgacctctccctgcttt

SEQ ID NO: 151890 - DNA, 654 bp, Homo sapiens
  Payload ID: 9898
  Gene Symbol: MMP17
  Gene Name: matrix metallopeptidase 17 (membrane-inserted)
  ENST ID: ENST00000542648
  CDS Start-End: 300-654
cgttttaatttgcctttagcagacctctaggcaaggataggggctccacacaaggatgcctgtcccatgccgctcaggtcaggggctctgccgcaggatgccctgtcccgcgctgcccaggccccgcctcccagcccacctggctctctccctgcaggcccaggaaggacgtgccccacagatgcagcactcactttgacgcggtggcccagatccggggtgaagctttcttcttcaaaggcaagtacttctggcggctgacgcgggaccggcacctggtgtccctgcagccggcacagatgcaccgcttctggcggggcctgccgctgcacctggacagcgtggacgccgtgtacgagcgcaccagcgaccacaagatcgtcttctttaaaggagacaggtactgggtgttcaaggacaataacgtagaggaaggatacccgcgccccgtctccgacttcagcctcccgcctggcggcatcgacgctgccttctcctgggcccacaatgacaggacttatttctttaaggaccagctgtactggcgctacgatgaccacacgaggcacatggaccccggctaccccgcccagagccccctgtggaggggtgtccccagcacgctggacgacgccatgcgctggtccgacggtg

SEQ ID NO: 151891 - DNA, 2301 bp, Homo sapiens
  Payload ID: 9898
  Gene Symbol: MMP17
  Gene Name: matrix metallopeptidase 17 (membrane-inserted)
  Uniprot ID: Q9ULZ9
  ENST ID: ENST00000535291
  CDS Start-End: 233-1792
aagagacaagaggtgccttgtgggcagatagggggctgggagggggcctgcccggaagcagtggtggcccgtggcaggcttctcactgggtaggaccgggccctctgttgcaccccctcaccctgctctctgccctcaggagtggctaagcaggttcggttacctgcccccggctgaccccacaacagggcagctgcagacgcaagaggagctgtctaaggccatcacagccatgcagcagtttggtggcctggaggccaccggcatcctggacgaggccaccctggccctgatgaaaaccccacgctgctccctgccagacctccctgtcctgacccaggctcgcaggagacgccaggctccagcccccaccaagtggaacaagaggaacctgtcgtggagggtccggacgttcccacgggactcaccactggggcacgacacggtgcgtgcactcatgtactacgccctcaaggtctggagcgacattgcgcccctgaacttccacgaggtggcgggcagcgccgccgacatccagatcgacttctccaaggccgaccataacgacggctaccccttcgacggccccggcggcaccgtggcccacgccttcttccccggccaccaccacaccgccggggacacccactttgacgatgacgaggcctggaccttccgctcctcggatgcccacgggatggacctgtttgcagtggctgtccacgagtttggccacgccattgggttaagccatgtggccgctgcacactccatcatgcggccgtactaccagggcccggtgggtgacccgctgcgctacgggctcccctacgaggacaaggtgcgcgtctggcagctgtacggtgtgcgggagtctgtgtctcccacggcgcagcccgaggagcctcccctgctgccggagcccccagacaaccggtccagcgccccgcccaggaaggacgtgccccacagatgcagcactcactttgacgcggtggcccagatccggggtgaagctttcttcttcaaaggcaagtacttctggcggctgacgcgggaccggcacctggtgtccctgcagccggcacagatgcaccgcttctggcggggcctgccgctgcacctggacagcgtggacgccgtgtacgagcgcaccagcgaccacaagatcgtcttctttaaaggagacaggtactgggtgttcaaggacaataacgtagaggaaggatacccgcgccccgtctccgacttcagcctcccgcctggcggcatcgacgctgccttctcctgggcccacaatgacaggacttatttctttaaggaccagctgtactggcgctacgatgaccacacgaggcacatggaccccggctaccccgcccagagccccctgtggaggggtgtccccagcacgctggacgacgccatgcgctggtccgacggtgcctcctacttcttccgtggccaggagtactggaaagtgctggatggcgagctggaggtggcacccgggtacccacagtccacggcccgggactggctggtgtgtggagactcacaggccgatggatctgtggctgcgggcgtggacgcggcagaggggccccgcgcccctccaggacaacatgaccagagccgctcggaggacggttacgaggtctgctcatgcacctctggggcatcctctcccccgggggccccaggcccactggtggctgccaccatgctgctgctgctgccgccactgtcaccaggcgccctgtggacagcggcccaggccctgacgctatgacacacagcgcgagcccatgagaggacagaggcggtgggacagcctggccacagagggcaaggactgtgccggagtccctgggggaggtgctggcgcgggatgaggacgggccaccctggcaccggaaggccagcagagggcactgtccgccagggctgggcaggctcaggtggcaaggacggagctgtcccctagtgagggactgtgttgactgacgagccgaggggtggccgctccagaagggtgcccagtcaggccgcaccgccgccagcctcctccggccctggagggagcatctcgggctgggggcccacccctctctgtgccggcgccaccaaccccacccacactgctgcctggtgctcccgccggcccacagggcctccgtccccaggtccccagtggggcagccctccccacagacgagccccccacatggtgccgcggcacgtcccccctgtgacgcgttccagaccaacatgacctctccctgctttctagcggctcgg

SEQ ID NO: 151892 - DNA, 552 bp, Homo sapiens
  Payload ID: 9898
  Gene Symbol: MMP17
  Gene Name: matrix metallopeptidase 17 (membrane-inserted)
  ENST ID: ENST00000545790
  CDS Start-End: 208-552
cccggactctcgcggctgccgctgccgctgctgctgctgctggcgctggggacccgcgggggctgcgccgcgcccgcacccgcgccgcgcgccgaggacctcagcctgggagtggagtggctaagcaggttcggttacctgcccccggctgaccccacaacagggcagctgcagacgcaagaggagctgtctaaggccatcacagccatgcagcagtttggtggcctggaggccaccggcatcctggacgaggccaccctggccctgatgaaaaccccacgctgctccctgccagacctccctgtcctgacccaggctcgcaggagacgccaggctccagcccccaccaagtggaacaagaggaacctgtcgtggagggtccggacgttcccacgggactcaccactggggcacgacacggtgcgtgcactcatgtactacgccctcaaggtctggagcgacattgcgcccctgaacttccacgaggtggcgggcagcgccgccgacatccagatcgacttctccaaggccgaccataacgacggctacccc

SEQ ID NO: 151893 - DNA, 1510 bp, Homo sapiens
  Payload ID: 9898
  Gene Symbol: MMP17
  Gene Name: matrix metallopeptidase 17 (membrane-inserted)
  ENST ID: ENST00000534865
  CDS Start-End: 604-1510
caatctgcccaccctggcctcccaaagtgctggggttacaagtgtgagccaccacacccagccaaccctatttccaaaccaggtcatattctaaggttccggatggacgtgaatttggcgggacactatgtgacccactcaccttctgctgtcccccggagtcaaaactatctcagatgggccctggctagtgtgagggctggtgaaccgagagagccccttcagtggggagcagggggatggggcagacgggacgcaccgttgagggccctggggctgatggctccacgcgggagctgacgtttgcctgtggcctgggggtctcagcctgcctgggctctcatttccctccctccgtcatctatcccagtgaactactggaaccgccgtgagtgcatcggatgactcctggcgtggggaggaaggcggaagatgggggagaccctcataggggcacccccgggctgaggaggggcgttcagggaacctcggcctggggcacgtggcctgttctccgtgactcactctgggctgacccctgcctgcagggtccggacgttcccacgggactcaccactggggcacgacacggtgcgtgcactcatgtactacgccctcaaggtctggagcgacattgcgcccctgaacttccacgaggtggcgggcagcgccgccgacatccagatcgacttctccaaggccgaccataacgacggctaccccttcgacggccccggcggcaccgtggcccacgccttcttccccggccaccaccacaccgccggggacacccactttgacgatgacgaggcctggaccttccgctcctcggatgcccacgggatggacctgtttgcagtggctgtccacgagtttggccacgccattgggttaagccatgtggccgctgcacactccatcatgcggccgtactaccagggcccggtgggtgacccgctgcgctacgggctcccctacgaggacaaggtgcgcgtctggcagctgtacggtgtgcgggagtctgtgtctcccacggcgcagcccgaggagcctcccctgctgccggagcccccagacaaccggtccagcgccccgcccaggaaggacgtgccccacagatgcagcactcactttgacgcggtggcccagatccggggtgaagctttcttcttcaaaggcaagtacttctggcggctgacgcgggaccggcacctggtgtccctgcagccggcacagatgcaccgcttctggcggggcctgccgctgcacctggacagcgtggacgccgtgtacgagcgcaccagcgaccacaagatcgtcttctttaaaggagacaggtactgggtgttcaaggacaataacgtagaggaaggatacccgcgccccgtctccgacttcagcctcccgcctggcggcatcgacgctgccttctcctgggcccacaatgacaggacttatttctttaaggaccagctgtactggcgctacgatgaccacacgaggcacatgg

SEQ ID NO: 151894 - DNA, 711 bp, Homo sapiens
  Payload ID: 9898
  Gene Symbol: MMP17
  Gene Name: matrix metallopeptidase 17 (membrane-inserted)
  ENST ID: ENST00000537848
  CDS Start-End: 391-510
agctcctgccctccccgcagctccctggcgctctgtatgctcagagcgtagatctcggcccccgcccgctgaagcggtggacaggcacccccgttttaatttgcctttagcagacctctaggcaaggataggggctccacacaaggatgcctgtcccatgccgctcaggtcaggggctctgccgcaggatgccctgtcccgcgctgcccaggccccgcctcccagcccacctggctctctccctgcaggcccaggaaggacgtgccccacagatgcagcactcactttgacgcggtggcccagatccggggtgaagctttcttcttcaaaggcaagtacttctggcggctgacgcgggaccggcacctggtgtccctgcagccggcacagatgcaccgcttctggcggggcctgccgctgcacctggacagcgtggacgccgtgtacgagcgcaccagcgaccacaagatcgtcttctttaaaggaccagctgtactggcgctacgatgaccacacgaggcacatggaccccggctaccccgcccagagccccctgtggaggggtgtccccagcacgctggacgacgccatgcgctggtccgacggtgcctcctacttcttccgtggccaggagtactggaaagtgctggatggcgagctggaggtggcacccgggtacccacagtccacggcccgggactggctggtgtg

SEQ ID NO: 151895 - DNA, 775 bp, Homo sapiens
  Payload ID: 9898
  Gene Symbol: MMP17
  Gene Name: matrix metallopeptidase 17 (membrane-inserted)
  ENST ID: ENST00000545671
  CDS Start-End: 269-775
cgccgcggagagcggagggcgccgggctgcggaacgcgaagcggagggcgcgggaccctgcacgccgcccgcgggcccatgtgagcgccatgcggcgccgcgcagcccggggacccggcccgccgcccccagggcccggactctcgcggctgccgctgccgctgctgctgctgctggcgctggggacccgcgggggctgcgccgcgcccgcacccgcgccgcgcgccgaggacctcagcctgggagtgacgaggccaccctggccctgatgaaaaccccacgctgctccctgccagacctccctgtcctgacccaggctcgcaggagacgccaggctccagcccccaccaagtggaacaagaggaacctgtcgtggagggtccggacgttcccacgggactcaccactggggcacgacacggtgcgtgcactcatgtactacgccctcaaggtctggagcgacattgcgcccctgaacttccacgaggtggcgggcagcgccgccgacatccagatcgacttctccaaggccgaccataacgacggctaccccttcgacggccccggcggcaccgtggcccacgccttcttccccggccaccaccacaccgccggggacacccactttgacgatgacgaggcctggaccttccgctcctcggatgcccacgggatggacctgtttgcagtggctgtccacgagtttggccacgccattgggttaagccatgtggccgctgcacactccatcatgcggccgtactaccagggcccg

SEQ ID NO: 151896 - DNA, 719 bp, Homo sapiens
  Payload ID: 9898
  Gene Symbol: MMP17
  Gene Name: matrix metallopeptidase 17 (membrane-inserted)
  ENST ID: ENST00000535004
  CDS Start-End: 195-626
aggcaagtacttctggcggctgacgcgggaccggcacctggtgtccctgcagccggcacagatgcaccgcttctggcggggcctgccgctgcacctggacagcgtggacgccgtgtacgagcgcaccagcgaccacaagatcgtcttctttaaaggaccagctgtactggcgctacgatgaccacacgaggcacatggaccccggctaccccgcccagagccccctgtggaggggtgtccccagcacgctggacgacgccatgcgctggtccgacggtgcctcctacttcttccgtggccaggagtactggaaagtgctggatggcgagctggaggtggcacccgggtacccacagtccacggcccgggactggctggtgtgtggagactcacaggccgatggatctgtggctgcgggcgtggacgcggcagaggggccccgcgcccctccaggacaacatgaccagagccgctcggaggacggttacgaggtctgctcatgcacctctggggcatcctctcccccgggggccccaggcccactggtggctgccaccatgctgctgctgctgccgccactgtcaccaggcgccctgtggacagcggcccaggccctgacgctatgacacacagcgcgagcccatgagaggacagaggcggtgggacagcctggccacagagggcaaggactgtgccggagtccctgggggaggtgctgg

SEQ ID NO: 151897 - DNA, 2229 bp, Homo sapiens
  Payload ID: 9899
  Gene Symbol: MMP19
  Gene Name: matrix metallopeptidase 19
  Uniprot ID: Q99542
  ENST ID: ENST00000322569
  CDS Start-End: 93-1619
gagcccctctgcctagcactgctcccccaaggctcccagaaatctcaggtcagaggcacggacagcctctggagctctcgtctggtgggaccatgaactgccagcagctgtggctgggcttcctactccccatgacagtctcaggccgggtcctggggcttgcagaggtggcgcctgtggactacctgtcacaatatgggtacctacagaagcctctagaaggatctaataacttcaagccagaagatatcaccgaggctctgagagcttttcaggaagcatctgaacttccagtctcaggtcagctggatgatgccacaagggcccgcatgaggcagcctcgttgtggcctagaggatcccttcaaccagaagacccttaaatacctgttgctgggccgctggagaaagaagcacctgactttccgcatcttgaacctgccctccacccttccaccccacacagcccgggcagccctgcgtcaagccttccaggactggagcaatgtggctcccttgaccttccaagaggtgcaggctggtgcggctgacatccgcctctccttccatggccgccaaagctcgtactgttccaatacttttgatgggcctgggagagtcctggcccatgccgacatcccagagctgggcagtgtgcacttcgacgaagacgagttctggactgaggggacctaccgtggggtgaacctgcgcatcattgcagcccatgaagtgggccatgctctggggcttgggcactcccgatattcccaggccctcatggccccagtctacgagggctaccggccccactttaagctgcacccagatgatgtggcagggatccaggctctctatggcaagaagagtccagtgataagggatgaggaagaagaagagacagagctgcccactgtgcccccagtgcccacagaacccagtcccatgccagacccttgcagtagtgaactggatgccatgatgctggggccccgtgggaagacctatgctttcaagggggactatgtgtggactgtatcagattcaggaccgggccccttgttccgagtgtctgccctttgggaggggctccccggaaacctggatgctgctgtctactcgcctcgaacacaatggattcacttctttaagggagacaaggtgtggcgctacattaatttcaagatgtctcctggcttccccaagaagctgaatagggtagaacctaacctggatgcagctctctattggcctctcaaccaaaaggtgttcctctttaagggctccgggtactggcagtgggacgagctagcccgaactgacttcagcagctaccccaaaccaatcaagggtttgtttacgggagtgccaaaccagccctcggctgctatgagttggcaagatggccgagtctacttcttcaagggcaaagtctactggcgcctcaaccagcagcttcgagtagagaaaggctatcccagaaatatttcccacaactggatgcactgtcgtccccggactatagacactaccccatcaggtgggaataccactccctcaggtacgggcataaccttggataccactctctcagccacagaaaccacgtttgaatactgactgctcacccacagacacaatcttggacattaacccctgaggctccaccacccaccctttcatttcccccccagaagcctaaggcctaatagctgaatgaaatacctgtctgctcagtagaaccttgcaggtgctgtagcaggcgcaagaccgtagatctcaggcctctaacacttccaactccagccaccactttcctgtgcattttcactcctgagaagtgctcccctaactcagatcccctaacttagatttggcccccaactccatttcctgtctgtcttagacagcccttccaactgtgtcatctcttctctggaggtcaatggtggagggagatgcctgggtcctgttcttcctacataaaatgcaagaaaacagcatggccagtaaactgagcaagggccttggaatccttgagaatcacatttatgtgcttatgattacgggcaagctaattaaccttgttgaatctcagattccccatttgcaacattaggttaagaccagtactgcaggattgttgcactaaatgaaatactgtatgtgaagtgcctggcacagtgtctggtacatttgtgtttaataaaagctaactccatgttcataa

SEQ ID NO: 151898 - DNA, 1431 bp, Homo sapiens
  Payload ID: 9899
  Gene Symbol: MMP19
  Gene Name: matrix metallopeptidase 19
  Uniprot ID: Q99542
  ENST ID: ENST00000409200
  CDS Start-End: 107-1024
agaactgggggtaagagcccctctgcctagcactgctcccccaaggctcccagaaatctcaggtcagaggcacggacagcctctggagctctcgtctggtgggaccatgaactgccagcagctgtggctgggcttcctactccccatgacagtctcaggccgggtcctggggcttgcagaggtggcgcctgtggactacctgtcacaatatgggtacctacagaagcctctagaaggatctaataacttcaagccagaagatatcaccgaggctctgagagcttttcaggaagcatctgaacttccagtctcaggtcagctggatgatgccacaagggcccgcatgaggcagcctcgttgtggcctagaggatcccttcaaccagaagacccttaaatacctgttgctgggccgctggagaaagaagcacctgactttccgcatcttgaacctgccctccacccttccaccccacacagcccgggcagccctgcgtcaagccttccaggactggagcaatgtggctcccttgaccttccaagaggtgcaggctggtgcggctgacatccgcctctccttccatggccgccaaagctcgtactgttccaatacttttgatgggcctggcaagaagagtccagtgataagggatgaggaagaagaagagacagagctgcccactgtgcccccagtgcccacagaacccagtcccatgccagacccttgcagtagtgaactggatgccatgatgctgggtgaggcccctcccctccaggctgttggcaggcggtgggggcagcctgctgatcctgaggcctggacaaatgggagtgacatgggacttcagcatgagcaatggagggccccgtgggaagacctatgctttcaagggggactatgtgtggactgtatcagattcaggaccgggccccttgttccgagtgtctgccctttgggaggggctccccggaaacctggatgctgctgtctactcgcctcgaacacaatggattcacttctttaaggggctccgggtactggcagtgggacgagctagcccgaactgacttcagcagctaccccaaaccaatcaagggtttgtttacgggagtgccaaaccagccctcggctgctatgagttggcaagatggccgagtctacttcttcaagggcaaagtctactggcgcctcaaccagcagcttcgagtagagaaaggctatcccagaaatatttcccacaactggatgcactgtcgtccccggactatagacactaccccatcaggtgggaataccactccctcaggtacgggcataaccttggataccactctctcagccacagaaaccacgtttgaatactgactgctcacccacagacacaatcttggacattaacccctgaggctccaccacccaccctttcatttc

SEQ ID NO: 151899 - DNA, 2350 bp, Homo sapiens
  Payload ID: 9899
  Gene Symbol: MMP19
  Gene Name: matrix metallopeptidase 19
  Uniprot ID: Q99542
  ENST ID: ENST00000552872
  CDS Start-End: 137-328
ataaagaggactagaggctggagagtaaaaagaactgggggtaagagcccctctgcctagcactgctcccccaaggctcccagaaatctcaggtcagaggcacggacagcctctggagctctcgtctggtgggaccatgaactgccagcagctgtggctgggcttcctactccccatgacagtctcaggccgggtcctggggcttgcagaggtggcgcctgtggactacctgtcacaatatgggtacctacagaagcctctagaaggatctaataacttcaagccagaagatatcaccgaggctctgagtctcaggtcagctggatgatgccacaagggcccgcatgaggcagcctcgttgtggcctagaggatcccttcaaccagaagacccttaaatacctgttgctgggccgctggagaaagaagcacctgactttccgcatcttgaacctgccctccacccttccaccccacacagcccgggcagccctgcgtcaagccttccaggactggagcaatgtggctcccttgaccttccaagaggtgcaggctggtgcggctgacatccgcctctccttccatggccgccaaagctcgtactgttccaatacttttgatgggcctgggagagtcctggcccatgccgacatcccagagctgggcagtgtgcacttcgacgaagacgagttctggactgaggggacctaccgtggggtgaacctgcgcatcattgcagcccatgaagtgggccatgctctggggcttgggcactcccgatattcccaggccctcatggccccagtctacgagggctaccggccccactttaagctgcacccagatgatgtggcagggatccaggctctctatggcaagaagagtccagtgataagggatgaggaagaagaagagacagagctgcccactgtgcccccagtgcccacagaacccagtcccatgccagacccttgcagtagtgaactggatgccatgatgctgggtgaggcccctcccctccaggctgttggcaggcggtgggggcagcctgctgatcctgaggcctggacaaatgggagtgacatgggacttcagcatgagcaatggagggccccgtgggaagacctatgctttcaagggggactatgtgtggactgtatcagattcaggaccgggccccttgttccgagtgtctgccctttgggaggggctccccggaaacctggatgctgctgtctactcgcctcgaacacaatggattcacttctttaagggagacaaggtgtggcgctacattaatttcaagatgtctcctggcttccccaagaagctgaatagggtagaacctaacctggatgcagctctctattggcctctcaaccaaaaggtgttcctctttaagggctccgggtactggcagtgggacgagctagcccgaactgacttcagcagctaccccaaaccaatcaagggtttgtttacgggagtgccaaaccagccctcggctgctatgagttggcaagatggccgagtctacttcttcaagggcaaagtctactggcgcctcaaccagcagcttcgagtagagaaaggctatcccagaaatatttcccacaactggatgcactgtcgtccccggactatagacactaccccatcaggtgggaataccactccctcaggtacgggcataaccttggataccactctctcagccacagaaaccacgtttgaatactgactgctcacccacagacacaatcttggacattaacccctgaggctccaccacccaccctttcatttcccccccagaagcctaaggcctaatagctgaatgaaatacctgtctgctcagtagaaccttgcaggtgctgtagcaggcgcaagaccgtagatctcaggcctctaacacttccaactccagccaccactttcctgtgcattttcactcctgagaagtgctcccctaactcagatcccctaacttagatttggcccccaactccatttcctgtctgtcttagacagcccttccaactgtgtcatctcttctctggaggtcaatggtggagggagatgcctgggtcctgttcttcctacataaaatgcaagaaaacagcatggccagtaaactgagcaagggccttggaatccttgagaatcacatttatgtgcttatgattacgggcaagctaattaaccttgttgaatctcagattccccatttgcaacattaggttaagaccagtactgcaggattgttgcactaaatgaaatactgtatgtgaagtgcctggcacagtgtctggtacatttgtgtttaataaaagctaactccatgttcataa

SEQ ID NO: 151900 - DNA, 1813 bp, Homo sapiens
  Payload ID: 9899
  Gene Symbol: MMP19
  Gene Name: matrix metallopeptidase 19
  ENST ID: ENST00000548629
  CDS Start-End: 121-1578
gctggagagtaaaaagaactgggggtaagagcccctctgcctagcactgctcccccaaggctcccagaaatctcaggtcagaggcacggacagcctctggagctctcgtctggtgggaccatgaactgccagcagctgtggctgggcttcctactccccatgacagtctcaggccgggtcctggggcttgcagaggtggcgcctgtggactacctgtcacaatatgggtacctacagaagcctctagaaggatctaataacttcaagccagaagatatcaccgaggctctgagagcttttcaggaagcatctgaacttccagtctcaggtcagctggatgatgccacaagggcccgcatgaggcagcctcgttgtggcctagaggatcccttcaaccagaagacccttaaatacctgttgctggcccgggcagccctgcgtcaagccttccaggactggagcaatgtggctcccttgaccttccaagaggtgcaggctggtgcggctgacatccgcctctccttccatggccgccaaagctcgtactgttccaatacttttgatgggcctgggagagtcctggcccatgccgacatcccagagctgggcagtgtgcacttcgacgaagacgagttctggactgaggggacctaccgtggggtgaacctgcgcatcattgcagcccatgaagtgggccatgctctggggcttgggcactcccgatattcccaggccctcatggccccagtctacgagggctaccggccccactttaagctgcacccagatgatgtggcagggatccaggctctctatggcaagaagagtccagtgataagggatgaggaagaagaagagacagagctgcccactgtgcccccagtgcccacagaacccagtcccatgccagacccttgcagtagtgaactggatgccatgatgctggggccccgtgggaagacctatgctttcaagggggactatgtgtggactgtatcagattcaggaccgggccccttgttccgagtgtctgccctttgggaggggctccccggaaacctggatgctgctgtctactcgcctcgaacacaatggattcacttctttaagggagacaaggtgtggcgctacattaatttcaagatgtctcctggcttccccaagaagctgaatagggtagaacctaacctggatgcagctctctattggcctctcaaccaaaaggtgttcctctttaagggctccgggtactggcagtgggacgagctagcccgaactgacttcagcagctaccccaaaccaatcaagggtttgtttacgggagtgccaaaccagccctcggctgctatgagttggcaagatggccgagtctacttcttcaagggcaaagtctactggcgcctcaaccagcagcttcgagtagagaaaggctatcccagaaatatttcccacaactggatgcactgtcgtccccggactatagacactaccccatcaggtgggaataccactccctcaggtacgggcataaccttggataccactctctcagccacagaaaccacgtttgaatactgactgctcacccacagacacaatcttggacattaacccctgaggctccaccacccaccctttcatttcccccccagaagcctaaggcctaatagctgaatgaaatacctgtctgctcagtagaaccttgcaggtgctgtagcaggcgcaagaccgtagatctcaggcctctaacacttccaactccagccaccactttcctgtgcattttcactcctgagaagtgctcccctaactc

SEQ ID NO: 151901 - DNA, 3840 bp, Homo sapiens
  Payload ID: 9899
  Gene Symbol: MMP19
  Gene Name: matrix metallopeptidase 19
  ENST ID: ENST00000548882
  CDS Start-End: 120-365
ctggagagtaaaaagaactgggggtaagagcccctctgcctagcactgctcccccaaggctcccagaaatctcaggtcagaggcacggacagcctctggagctctcgtctggtgggaccatgaactgccagcagctgtggctgggcttcctactccccatgacagtctcaggccgggtcctggggcttgcagaggtggcgcctgtggactacctgtcacaatatgggtacctacagaagcctctagaaggatctaataacttcaagccagaagatatcaccgaggctctgagggagagtcctggcccatgccgacatcccagagctgggcagtgtgcacttcgacgaagacgagttctggactgaggggacctaccgtggggtgaacctgcgcatcattgcagcccatgaagtgggccatgctctggggcttgggcactcccgatattcccaggccctcatggccccagtctacgagggctaccggccccactttaagctgcacccagatgatgtggcagggatccaggctctctatggcaagaagagtccagtgataagggatgaggaagaagaagagacagagctgcccactgtgcccccagtgcccacagaacccagtcccatgccagacccttgcagtagtgaactggatgccatgatgctgggtgaggcccctcccctccaggctgttggcaggcggtgggggcagcctgctgatcctgaggcctggacaaatgggagtgacatgggacttcagcatgagcaatggaggttagaccccaggcattaatgaccatggaaggagacatgtgacatggggagggagagttcggagccaaattaaaggtggcttaggcaggcacttaccaaggctgccacgctctaagggccactagaacacatctggaaatgcagcaagatggagaaaactatattacccagattgcctgttagagagggtgcacctggttggaaggacaactaggaagccacttggaggggagggtgaggttcctaaggaggaatagctatctgcagggcttttgttttgttgagtggaccaaagctgaaacgctctgagcaacaaagcattctgagtcctctttgtctgcctttaattttctctttgaattaaagttgaatgaatttttgaagaatcagcctgcagggagagggcaaattgttagtcagcctgagatacccccaagtttctgtctacttgacctctgtctttttgacttgttgacacaccattacgctcagggccccgtgggaagacctatgctttcaagggggactatgtgtggactgtatcagattcaggaccgggccccttgttccgagtgtctgccctttgggaggggctccccggaaacctggatgctgctgtctactcgcctcgaacacaatggattcacttctttaagggtaaggaggctagttacagtgtcttacttgaggagggcctaatcttaaagaaactataaaagggagggagatgagaagtttctgaataggtggaccggaggagaccaaaagctatcacctgaggacagaggtgacttgttctttcctcacatgctctcaggagacaaggtgtggcgctacattaatttcaagatgtctcctggcttccccaagaagctgaatagggtagaacctaacctggatgcagctctctattggcctctcaaccaaaaggtgttcctctttaaggtataaagttcaaagcaagggcaaatcccttcttaggaggagtgggctaccttatactgagaagcaaagcttgcgcttgaagggagatgttctgcagctgcagtgggctgggggtggacccctgggggtcctaagctctctcctcttcctctcccctctccccacccatcccatatccagggctccgggtactggcagtgggacgagctagcccgaactgacttcagcagctaccccaaaccaatcaagggtttgtttacgggagtgccaaaccagccctcggctgctatgagttggcaagatggccgagtctacttcttcaagggcaaagtctactggcgcctcaaccagcagcttcgagtagagaaaggctatcccagaaatatttcccacaactggatgcactgtcgtccccggactatagacactaccccatcaggtgggaataccactccctcaggtacgggcataaccttggataccactctctcagccacagaaaccacgtttgaatactgactgctcacccacagacacaatcttggacattaacccctgaggctccaccacccaccctttcatttcccccccagaagcctaaggcctaatagctgaatgaaatacctgtctgctcagtagaaccttgcaggtgctgtagcaggcgcaagaccgtagatctcaggcctctaacacttccaactccagccaccactttcctgtgcattttcactcctgagaagtgctcccctaactcagatcccctaacttagatttggcccccaactccatttcctgtctgtcttagacagcccttccaactgtgtcatctcttctctggaggtcaatggtggagggagatgcctgggtcctgttcttcctacataaaatgcaagaaaacagcatggccagtaaactgagcaagggccttggaatccttgagaatcacatttatgtgcttatgattacgggcaagctaattaaccttgttgaatctcagattccccatttgcaacattaggttaagaccagtactgcaggattgttgcactaaatgaaatactgtatgtgaagtgcctggcacagtgtctggtacatttgtgtttaataaaagctaactccatgttcataagagaggactgaacagctcttcctctagctgtctggctgtataactcttacagtagtctgtataataagggcatctctattagatctttaggggacagaggatttgtcaagatggttagctctttgttttggggtgcagagaaagaaaagagcagcaacagcagaggctggactccctggttcagtatttaatgccattttattcacatgctcccatgttctccctccctcccattgtagccttgctgcccaggggagggatatgtcttcctttatgcatctgggaaaccaggaacagaccctgcgcaggagagtcagagggggaagagttagaatgggtcagtggctggaacaaagttctggttaaggaggaaattagtgccacccacggtgagaagcagagaaggcacttgcatcctatgcagccctgaagaccaggctcctttgggcaaaaggcaagactctggcaggtgggtcaatgctctctccttggagcaagaagccagcttttggggaaggcaggtcctgaggcaggcactgccctgtggtcttccccaggttgaggagagaagtggaagccccatggaagacagtgctcccagctgaggtaggaggcggaggtgggggtgggggtagtttaagcctatggggcccagggggaaaggccaaacagaaacccaactaccccctaatgaagggcctggaggttggggtatcttggagctcctcagagcccttcttcccatcaaaaaggtatcaaatgccttggaagctccctgatcctacaaaacaaaaaaatgcttatttttaccactgtgaggcaagctgaggtgaacatttaaaaggctatttcaagacgaggtgcggtggctataatcctagcactttgggaggctgaagcaggaggatcacttgagcccaggagttcaagaccagcttgggcaacatagggagaccctgtctctgcaaaaaaataaaaacgaatacataaaaa

SEQ ID NO: 151902 - DNA, 946 bp, Homo sapiens
  Payload ID: 9899
  Gene Symbol: MMP19
  Gene Name: matrix metallopeptidase 19
  ENST ID: ENST00000552763
  CDS Start-End: 111-437
aaaaagaactgggggtaagagcccctctgcctagcactgctcccccaaggctcccagaaatctcaggtcagaggcacggacagcctctggagctctcgtctggtgggaccatgaactgccagcagctgtggctgggcttcctactccccatgacagtctcaggccgggtcctggggcttgcagaggtggcgcctgtggactacctgtcacaatatgggtacctacagaagcctctagaaggatctaataacttcaagccagaagatatcaccgaggctctgaggccgctggagaaagaagcacctgactttccgcatcttgaacctgccctccacccttccaccccacacagcccgggcagccctgcgtcaagccttccaggactggagcaatgtggctcccttgaccttccaagaggtgcaggctggtgcggctgacatccgcctctccttccatggccgccaaagctcgtactgttccaatacttttgatgggcctggcaagaagagtccagtgataagggatgaggaagaagaagagacagagctgcccactgtgcccccagtgcccacagaacccagtcccatgccagacccttgcagtagtgaactggatgccatgatgctgggtgaggcccctcccctccaggctgttggcaggcggtgggggcagcctgctgatcctgaggcctggacaaatgggagtgacatgggacttcagcatgagcaatggaggttagaccccaggcattaatgaccatggaaggagacatgtgacatggggagggagagttcggagccaaattaaaggtggcttaggcaggcacttaccaaggctgccacgctctaagggccactagaacacatctggaaatgcagcaagatggagaaaactatattacccagattgcctgttagagagggtgcacctggttggaaggacaact

SEQ ID NO: 151903 - DNA, 3741 bp, Homo sapiens
  Payload ID: 9900
  Gene Symbol: MMP2
  Gene Name: matrix metallopeptidase 2
  Uniprot ID: P08253
  ENST ID: ENST00000219070
  CDS Start-End: 510-2492
tggggtgacgaggtcgtgcactgagggtggacgtagaggccaggagtagcaggcggccggggaaaagaggtggagaaaggaaaaaagaggagaaaagtggaggagggcgagtaggggggtggggcagagaggggcgggcccgagtgcgccccccgcccccagccccgctctgccagctccctcccagcccagccggctacatctggcggctgccctcccttgtttccgctgcatccagacttcctcaggcggtggctggaggctgcgcatctggggctttaaacatacaaagggattgccaggacctgcggcggcggcggcggcggcgggggctggggcgcgggggccggaccatgagccgctgagccgggcaaaccccaggccaccgagccagcggaccctcggagcgcagccctgcgccgcggagcaggctccaaccaggcggcgaggcggccacacgcaccgagccagcgacccccgggcgacgcgcggggccagggagcgctacgatggaggcgctaatggcccggggcgcgctcacgggtcccctgagggcgctctgtctcctgggctgcctgctgagccacgccgccgccgcgccgtcgcccatcatcaagttccccggcgatgtcgcccccaaaacggacaaagagttggcagtgcaatacctgaacaccttctatggctgccccaaggagagctgcaacctgtttgtgctgaaggacacactaaagaagatgcagaagttctttggactgccccagacaggtgatcttgaccagaataccatcgagaccatgcggaagccacgctgcggcaacccagatgtggccaactacaacttcttccctcgcaagcccaagtgggacaagaaccagatcacatacaggatcattggctacacacctgatctggacccagagacagtggatgatgcctttgctcgtgccttccaagtctggagcgatgtgaccccactgcggttttctcgaatccatgatggagaggcagacatcatgatcaactttggccgctgggagcatggcgatggatacccctttgacggtaaggacggactcctggctcatgccttcgccccaggcactggtgttgggggagactcccattttgatgacgatgagctatggaccttgggagaaggccaagtggtccgtgtgaagtatgggaacgccgatggggagtactgcaagttccccttcttgttcaatggcaaggagtacaacagctgcactgataccggccgcagcgatggcttcctctggtgctccaccacctacaactttgagaaggatggcaagtacggcttctgtccccatgaagccctgttcaccatgggcggcaacgctgaaggacagccctgcaagtttccattccgcttccagggcacatcctatgacagctgcaccactgagggccgcacggatggctaccgctggtgcggcaccactgaggactacgaccgcgacaagaagtatggcttctgccctgagaccgccatgtccactgttggtgggaactcagaaggtgccccctgtgtcttccccttcactttcctgggcaacaaatatgagagctgcaccagcgccggccgcagtgacggaaagatgtggtgtgcgaccacagccaactacgatgatgaccgcaagtggggcttctgccctgaccaagggtacagcctgttcctcgtggcagcccacgagtttggccacgccatggggctggagcactcccaagaccctggggccctgatggcacccatttacacctacaccaagaacttccgtctgtcccaggatgacatcaagggcattcaggagctctatggggcctctcctgacattgaccttggcaccggccccacccccacgctgggccctgtcactcctgagatctgcaaacaggacattgtatttgatggcatcgctcagatccgtggtgagatcttcttcttcaaggaccggttcatttggcggactgtgacgccacgtgacaagcccatggggcccctgctggtggccacattctggcctgagctcccggaaaagattgatgcggtatacgaggccccacaggaggagaaggctgtgttctttgcagggaatgaatactggatctactcagccagcaccctggagcgagggtaccccaagccactgaccagcctgggactgccccctgatgtccagcgagtggatgccgcctttaactggagcaaaaacaagaagacatacatctttgctggagacaaattctggagatacaatgaggtgaagaagaaaatggatcctggcttccccaagctcatcgcagatgcctggaatgccatccccgataacctggatgccgtcgtggacctgcagggcggcggtcacagctacttcttcaagggtgcctattacctgaagctggagaaccaaagtctgaagagcgtgaagtttggaagcatcaaatccgactggctaggctgctgagctggccctggctcccacaggcccttcctctccactgccttcgatacaccgggcctggagaactagagaaggacccggaggggcctggcagccgtgccttcagctctacagctaatcagcattctcactcctacctggtaatttaagattccagagagtggctcctcccggtgcccaagaatagatgctgactgtactcctcccaggcgccccttccccctccaatcccaccaaccctcagagccacccctaaagagatactttgatattttcaacgcagccctgctttgggctgccctggtgctgccacacttcaggctcttctcctttcacaaccttctgtggctcacagaacccttggagccaatggagactgtctcaagagggcactggtggcccgacagcctggcacagggcagtgggacagggcatggccaggtggccactccagacccctggcttttcactgctggctgccttagaacctttcttacattagcagtttgctttgtatgcactttgtttttttctttgggtcttgttttttttttccacttagaaattgcatttcctgacagaaggactcaggttgtctgaagtcactgcacagtgcatctcagcccacatagtgatggttcccctgttcactctacttagcatgtccctaccgagtctcttctccactggatggaggaaaaccaagccgtggcttcccgctcagccctccctgcccctcccttcaaccattccccatgggaaatgtcaacaagtatgaataaagacacctactgagtggccgtgtttgccatctgttttagcagagcctagacaagggccacagacccagccagaagcggaaacttaaaaagtccgaatctctgctccctgcagggcacaggtgatggtgtctgctggaaaggtcagagcttccaaagtaaacagcaagagaacctcagggagagtaagctctagtccctctgtcctgtagaaagagccctgaagaatcagcaattttgttgctttattgtggcatctgttcgaggtttgcttcctctttaagtctgtttcttcattagcaatcatatcagttttaatgctactactaacaatgaacagtaacaataatatccccctcaattaatagagtgctttctatgtgcaaggcacttttcacgtgtcacctattttaacctttccaaccacataaataaaaaaggccattattagttgaatcttattgatgaagaga

SEQ ID NO: 151904 - DNA, 2469 bp, Homo sapiens
  Payload ID: 9900
  Gene Symbol: MMP2
  Gene Name: matrix metallopeptidase 2
  Uniprot ID: P08253
  ENST ID: ENST00000437642
  CDS Start-End: 320-2152
aatgcatgcctgccctcctgggaatgaagcacagcaggtctcagcctcatcttacccagccccccactcaagatggaggtgcctggtttgaacacctctgacaaatggaagtctgtgttgtccagaggcaatgcagtgggggcttaagaagataactctggacttagaccgcttggcttcaaatcaaagagtgcatgaaccaaccagctggcctagtgatgatgttaggcaagtgacttctcagtttcttcatctgcaaactgggaaatttcctatctcagggttaaaagagaggtaatcttaggtgcttacctagcacatgcaatacctgaacaccttctatggctgccccaaggagagctgcaacctgtttgtgctgaaggacacactaaagaagatgcagaagttctttggactgccccagacaggtgatcttgaccagaataccatcgagaccatgcggaagccacgctgcggcaacccagatgtggccaactacaacttcttccctcgcaagcccaagtgggacaagaaccagatcacatacaggatcattggctacacacctgatctggacccagagacagtggatgatgcctttgctcgtgccttccaagtctggagcgatgtgaccccactgcggttttctcgaatccatgatggagaggcagacatcatgatcaactttggccgctgggagcatggcgatggatacccctttgacggtaaggacggactcctggctcatgccttcgccccaggcactggtgttgggggagactcccattttgatgacgatgagctatggaccttgggagaaggccaagtggtccgtgtgaagtatgggaacgccgatggggagtactgcaagttccccttcttgttcaatggcaaggagtacaacagctgcactgataccggccgcagcgatggcttcctctggtgctccaccacctacaactttgagaaggatggcaagtacggcttctgtccccatgaagccctgttcaccatgggcggcaacgctgaaggacagccctgcaagtttccattccgcttccagggcacatcctatgacagctgcaccactgagggccgcacggatggctaccgctggtgcggcaccactgaggactacgaccgcgacaagaagtatggcttctgccctgagaccgccatgtccactgttggtgggaactcagaaggtgccccctgtgtcttccccttcactttcctgggcaacaaatatgagagctgcaccagcgccggccgcagtgacggaaagatgtggtgtgcgaccacagccaactacgatgatgaccgcaagtggggcttctgccctgaccaagggtacagcctgttcctcgtggcagcccacgagtttggccacgccatggggctggagcactcccaagaccctggggccctgatggcacccatttacacctacaccaagaacttccgtctgtcccaggatgacatcaagggcattcaggagctctatggggcctctcctgacattgaccttggcaccggccccacccccacgctgggccctgtcactcctgagatctgcaaacaggacattgtatttgatggcatcgctcagatccgtggtgagatcttcttcttcaaggaccggttcatttggcggactgtgacgccacgtgacaagcccatggggcccctgctggtggccacattctggcctgagctcccggaaaagattgatgcggtatacgaggccccacaggaggagaaggctgtgttctttgcagggaatgaatactggatctactcagccagcaccctggagcgagggtaccccaagccactgaccagcctgggactgccccctgatgtccagcgagtggatgccgcctttaactggagcaaaaacaagaagacatacatctttgctggagacaaattctggagatacaatgaggtgaagaagaaaatggatcctggcttccccaagctcatcgcagatgcctggaatgccatccccgataacctggatgccgtcgtggacctgcagggcggcggtcacagctacttcttcaagggtgcctattacctgaagctggagaaccaaagtctgaagagcgtgaagtttggaagcatcaaatccgactggctaggctgctgagctggccctggctcccacaggcccttcctctccactgccttcgatacaccgggcctggagaactagagaaggacccggaggggcctggcagccgtgccttcagctctacagctaatcagcattctcactcctacctggtaatttaagattccagagagtggctcctcccggtgcccaagaatagatgctgactgtactcctcccaggcgccccttccccctccaatcccaccaaccctcagagccacccctaaagagatactttgatattttcaacgcagccctgctttgggctgccctggtgctgccacacttcag

SEQ ID NO: 151905 - DNA, 1978 bp, Homo sapiens
  Payload ID: 9900
  Gene Symbol: MMP2
  Gene Name: matrix metallopeptidase 2
  Uniprot ID: P08253
  ENST ID: ENST00000543485
  CDS Start-End: 141-1895
agatgttgtcttgtgagcgtgcgcgcgcctggctggaggggcactgagcctggccgcagtgttgccaatacctgaacaccttctatggctgccccaaggagagctgcaacctgtttgtgctgaaggacacactaaagaagatgcagaagttctttggactgccccagacaggtgatcttgaccagaataccatcgagaccatgcggaagccacgctgcggcaacccagatgtggccaactacaacttcttccctcgcaagcccaagtgggacaagaaccagatcacatacaggatcattggctacacacctgatctggacccagagacagtggatgatgcctttgctcgtgccttccaagtctggagcgatgtgaccccactgcggttttctcgaatccatgatggagaggcagacatcatgatcaactttggccgctgggagcatggcgatggatacccctttgacggtaaggacggactcctggctcatgccttcgccccaggcactggtgttgggggagactcccattttgatgacgatgagctatggaccttgggagaaggccaagtggtccgtgtgaagtatgggaacgccgatggggagtactgcaagttccccttcttgttcaatggcaaggagtacaacagctgcactgataccggccgcagcgatggcttcctctggtgctccaccacctacaactttgagaaggatggcaagtacggcttctgtccccatgaagccctgttcaccatgggcggcaacgctgaaggacagccctgcaagtttccattccgcttccagggcacatcctatgacagctgcaccactgagggccgcacggatggctaccgctggtgcggcaccactgaggactacgaccgcgacaagaagtatggcttctgccctgagaccgccatgtccactgttggtgggaactcagaaggtgccccctgtgtcttccccttcactttcctgggcaacaaatatgagagctgcaccagcgccggccgcagtgacggaaagatgtggtgtgcgaccacagccaactacgatgatgaccgcaagtggggcttctgccctgaccaagggtacagcctgttcctcgtggcagcccacgagtttggccacgccatggggctggagcactcccaagaccctggggccctgatggcacccatttacacctacaccaagaacttccgtctgtcccaggatgacatcaagggcattcaggagctctatggggcctctcctgacattgaccttggcaccggccccacccccacgctgggccctgtcactcctgagatctgcaaacaggacattgtatttgatggcatcgctcagatccgtggtgagatcttcttcttcaaggaccggttcatttggcggactgtgacgccacgtgacaagcccatggggcccctgctggtggccacattctggcctgagctcccggaaaagattgatgcggtatacgaggccccacaggaggagaaggctgtgttctttgcagggaatgaatactggatctactcagccagcaccctggagcgagggtaccccaagccactgaccagcctgggactgccccctgatgtccagcgagtggatgccgcctttaactggagcaaaaacaagaagacatacatctttgctggagacaaattctggagatacaatgaggtgaagaagaaaatggatcctggcttccccaagctcatcgcagatgcctggaatgccatccccgataacctggatgccgtcgtggacctgcagggcggcggtcacagctacttcttcaagggtgcctattacctgaagctggagaaccaaagtctgaagagcgtgaagtttggaagcatcaaatccgactggctaggctgctgagctggccctggctcccacaggcccttcctctccactgccttcgatacaccgggcctggagaactagagaaggacccggagggg

SEQ ID NO: 151906 - DNA, 736 bp, Homo sapiens
  Payload ID: 9900
  Gene Symbol: MMP2
  Gene Name: matrix metallopeptidase 2
  ENST ID: ENST00000564864
  CDS Start-End: 134-736
tgtaaacaacttttggacacatctgggcagttgctaagggctcttgccaagcgtctagcaatacctgaacaccttctatggctgccccaaggagagctgcaacctgtttgtgctgaaggacacactaaagaagatgcagaagttctttggactgccccagacaggtgatcttgaccagaataccatcgagaccatgcggaagccacgctgcggcaacccagatgtggccaactacaacttcttccctcgcaagcccaagtgggacaagaaccagatcacatacaggatcattggctacacacctgatctggacccagagacagtggatgatgcctttgctcgtgccttccaagtctggagcgatgtgaccccactgcggttttctcgaatccatgatggagaggcagacatcatgatcaactttggccgctgggagcatggcgatggatacccctttgacggtaaggacggactcctggctcatgccttcgccccaggcactggtgttgggggagactcccattttgatgacgatgagctatggaccttgggagaaggccaagtggtccgtgtgaagtatgggaacgccgatggggagtactgcaagttccccttcttgttcaatggcaaggagtacaacagctgcactgataccggccgcagcgatggcttcctctggtgctccaccacctacaactttgagaaggatggcaagtacggcttctgtccccatgaa

SEQ ID NO: 151907 - DNA, 755 bp, Homo sapiens
  Payload ID: 9900
  Gene Symbol: MMP2
  Gene Name: matrix metallopeptidase 2
  ENST ID: ENST00000570283
  CDS Start-End: 1-755
ggcaccactgaggactacgaccgcgacaagaagtatggcttctgccctgagaccgggtacagcctgttcctcgtggcagcccacgagtttggccacgccatggggctggagcactcccaagaccctggggccctgatggcacccatttacacctacaccaagaacttccgtctgtcccaggatgacatcaagggcattcaggagctctatggggcctctcctgacattgaccttggcaccggccccacccccacgctgggccctgtcactcctgagatctgcaaacaggacattgtatttgatggcatcgctcagatccgtggtgagatcttcttcttcaaggaccggttcatttggcggactgtgacgccacgtgacaagcccatggggcccctgctggtggccacattctggcctgagctcccggaaaagattgatgcggtatacgaggccccacaggaggagaaggctgtgttctttgcagggaatgaatactggatctactcagccagcaccctggagcgagggtaccccaagccactgaccagcctgggactgccccctgatgtccagcgagtggatgccgcctttaactggagcaaaaacaagaagacatacatctttgctggagacaaattctggagatacaatgaggtgaagaagaaaatggatcctggcttccccaagctcatcgcagatgcctggaatgccatccccgataacctggatgccgtcgtggacctgcagggcggcgg

SEQ ID NO: 151908 - DNA, 566 bp, Homo sapiens
  Payload ID: 9900
  Gene Symbol: MMP2
  Gene Name: matrix metallopeptidase 2
  ENST ID: ENST00000568715
  CDS Start-End: 212-566
gtgcagggtgtcctagccaagccggcgtccctcctagtagtaccgctgctctctaacctcaggacgtcaagggcctagagcgacagatgtttcccagcagggggttctgaggctgtgcgcccagatcgcgagagagcaatacctgaacaccttctatggctgccccaaggagagctgcaacctgtttgtgctgaaggacacactaaagaagatgcagaagttctttggactgccccagacaggtgatcttgaccagaataccatcgagaccatgcggaagccacgctgcggcaacccagatgtggccaactacaacttcttccctcgcaagcccaagtgggacaagaaccagatcacatacaggatcattggctacacacctgatctggacccagagacagtggatgatgcctttgctcgtgccttccaagtctggagcgatgtgaccccactgcggttttctcgaatccatgatggagaggcagacatcatgatcaactttggccgctgggagcatggcgatggatacccctttgacggtaaggacggactcctggctcatgcct

SEQ ID NO: 151909 - DNA, 3235 bp, Homo sapiens
  Payload ID: 9900
  Gene Symbol: MMP2
  Gene Name: matrix metallopeptidase 2
  Uniprot ID: P08253
  ENST ID: ENST00000570308
  CDS Start-End: 686-2440
acatccgagatgaacccagcccttggtgttcaaaatcactttaaggggaagtagagctttttctttcatgtacctggaccagtagttcacttactctgaaagtcaagaggccccatggactgcccagcccagctgctgtggaatgtggcagagaaagagggtgagagggcctggatgactcccatgctgggagtattatgcaaacgtgggagaaaaaaacatgcttcctctcctggcctacaggagcgcttgaaagcctgctcatctgcaagccctagggctggactctacatcacagcagtggatactccatctccattgagaacccgatgactggtcactgcccagccccaccctcgacccaaccaggatgaagaatgggcaagccagatagctacagtaatcgacagacagacaaacaagagcatcgtatgacccaggggccaacaagtcccaccccagtgacaccatctcacttttgcagagctcttgctcgcaaagtgcagctaggagaacccaggcctcctgatgacaaatgctccttctttctgccccccacgtgccaagagcgaggagggaagatagctgctggctcactgtgtggtcgtggcaatacctgaacaccttctatggctgccccaaggagagctgcaacctgtttgtgctgaaggacacactaaagaagatgcagaagttctttggactgccccagacaggtgatcttgaccagaataccatcgagaccatgcggaagccacgctgcggcaacccagatgtggccaactacaacttcttccctcgcaagcccaagtgggacaagaaccagatcacatacaggatcattggctacacacctgatctggacccagagacagtggatgatgcctttgctcgtgccttccaagtctggagcgatgtgaccccactgcggttttctcgaatccatgatggagaggcagacatcatgatcaactttggccgctgggagcatggcgatggatacccctttgacggtaaggacggactcctggctcatgccttcgccccaggcactggtgttgggggagactcccattttgatgacgatgagctatggaccttgggagaaggccaagtggtccgtgtgaagtatgggaacgccgatggggagtactgcaagttccccttcttgttcaatggcaaggagtacaacagctgcactgataccggccgcagcgatggcttcctctggtgctccaccacctacaactttgagaaggatggcaagtacggcttctgtccccatgaagccctgttcaccatgggcggcaacgctgaaggacagccctgcaagtttccattccgcttccagggcacatcctatgacagctgcaccactgagggccgcacggatggctaccgctggtgcggcaccactgaggactacgaccgcgacaagaagtatggcttctgccctgagaccgccatgtccactgttggtgggaactcagaaggtgccccctgtgtcttccccttcactttcctgggcaacaaatatgagagctgcaccagcgccggccgcagtgacggaaagatgtggtgtgcgaccacagccaactacgatgatgaccgcaagtggggcttctgccctgaccaagggtacagcctgttcctcgtggcagcccacgagtttggccacgccatggggctggagcactcccaagaccctggggccctgatggcacccatttacacctacaccaagaacttccgtctgtcccaggatgacatcaagggcattcaggagctctatggggcctctcctgacattgaccttggcaccggccccacccccacgctgggccctgtcactcctgagatctgcaaacaggacattgtatttgatggcatcgctcagatccgtggtgagatcttcttcttcaaggaccggttcatttggcggactgtgacgccacgtgacaagcccatggggcccctgctggtggccacattctggcctgagctcccggaaaagattgatgcggtatacgaggccccacaggaggagaaggctgtgttctttgcagggaatgaatactggatctactcagccagcaccctggagcgagggtaccccaagccactgaccagcctgggactgccccctgatgtccagcgagtggatgccgcctttaactggagcaaaaacaagaagacatacatctttgctggagacaaattctggagatacaatgaggtgaagaagaaaatggatcctggcttccccaagctcatcgcagatgcctggaatgccatccccgataacctggatgccgtcgtggacctgcagggcggcggtcacagctacttcttcaagggtgcctattacctgaagctggagaaccaaagtctgaagagcgtgaagtttggaagcatcaaatccgactggctaggctgctgagctggccctggctcccacaggcccttcctctccactgccttcgatacaccgggcctggagaactagagaaggacccggaggggcctggcagccgtgccttcagctctacagctaatcagcattctcactcctacctggtaatttaagattccagagagtggctcctcccggtgcccaagaatagatgctgactgtactcctcccaggcgccccttccccctccaatcccaccaaccctcagagccacccctaaagagatactttgatattttcaacgcagccctgctttgggctgccctggtgctgccacacttcaggctcttctcctttcacaaccttctgtggctcacagaacccttggagccaatggagactgtctcaagagggcactggtggcccgacagcctggcacagggcagtgggacagggcatggccaggtggccactccagacccctggcttttcactgctggctgccttagaacctttcttacattagcagtttgctttgtatgcactttgtttttttctttgggtcttgttttttttttccacttagaaattgcatttcctgacagaaggactcaggttgtctgaagtcactgcacagtgcatctcagcccacatagtgatggttcccctgttcactctacttagcatgtccctaccgagtctcttctccactggatggaggaaaaccaagccgtggcttcccgctcagccctccctgcccctcccttcaaccattccccatgggaaatgtcaacaagtatgaataaagacacctactgagtg

SEQ ID NO: 151910 - DNA, 443 bp, Homo sapiens
  Payload ID: 9900
  Gene Symbol: MMP2
  Gene Name: matrix metallopeptidase 2
  ENST ID: ENST00000566564
  CDS Start-End: 1-68
agctggagaaccaaagtctgaagagcgtgaagtttggaagcatcaaatccgactggctaggctgctgagctggccctggctcccacaggcccttcctctccactgccttcgatacaccgggcctggagaactagagaaggacccggaggggcctggcagccgtgccttcagctctacagctaatcagcattctcactcctacctgaaattgcatttcctgacagaaggactcaggttgtctgaagtcactgcacagtgcatctcagcccacatagtgatggttcccctgttcactctacttagcatgtccctaccgagtctcttctccactggatggaggaaaaccaagccgtggcttcccgctcagccctccctgcccctcccttcaaccattccccatgggaaatgtcaacaagtatgaataaagacacctactgagtggc

SEQ ID NO: 151911 - DNA, 1956 bp, Homo sapiens
  Payload ID: 9901
  Gene Symbol: MMP20
  Gene Name: matrix metallopeptidase 20
  Uniprot ID: O60882
  ENST ID: ENST00000260228
  CDS Start-End: 14-1465
ctactgtgaggggatgaaggtgctccctgcatctggccttgctgtcttcctcatcatggctttgaagttttccactgcagccccctccctagttgcagcctcccccaggacctggaggaacaactaccgcctcgcacaggcgtatcttgacaaatattacacaaataaagaaggacaccagattggtgagatggttgcaagaggaagcaattccatgataaggaagattaaggagctacaagcgttctttggcctccaagtcaccgggaagttagaccagaccacaatgaacgtgatcaagaagcctcgctgtggagttcctgatgtggccaattatcgcctcttccctggtgaacccaaatggaaaaaaaatactttgacatacagaatatctaaatacacaccttccatgagttctgtcgaggtggacaaagcagtggagatggccttgcaggcctggagtagcgccgtccctctgagctttgtcagaataaactcaggagaagcggatattatgatatcttttgaaaatggagatcacggggattcctatccattcgatgggcctcgggggactctagcccatgcatttgctcctggagaaggcctgggaggagatacacatttcgacaatgctgagaagtggactatgggaacgaatggttttaatttgtttaccgttgctgctcatgaatttggccatgccctgggcctggcccattccacagacccatcagcactgatgtacccaacttataagtacaagaatccctatggattccacctccccaaagatgatgtgaaagggatccaggcattatacggacctcggaaagtattcctggggaagcccactctgccccatgccccccatcacaagccatccatccctgacctctgtgactccagctcatcctttgacgctgtgacaatgctggggaaggagctcctgctcttcaaggaccggattttctggagacggcaggttcacttgcggacaggaattcggcccagcactattaccagctccttcccccagctcatgtccaatgtggatgcagcttacgaagtggctgagaggggcactgcttacttcttcaaaggtccccactactggataacaagaggattccaaatgcaaggtcctcctcggactatttatgactttggatttccaaggcacgtgcagcaaatagatgctgctgtctacctcagggagccacagaagacccttttctttgtgggagatgaatactacagctacgacgaaaggaaaaggaaaatggaaaaagactatccaaagaatactgaagaagaattttcaggagtaaatggccaaatcgatgctgctgtagaattaaatggctacatttacttcttttcaggaccaaaaacatacaagtatgacacagagaaggaagatgtggttagtgtggtgaaatctagttcctggattggttgctaaatagaaaagcctagtcttctcaagcaatgaggatgactacaagcagcctctaactggatcttaaggactaaagcagaatgtaggagagggattcttccaaaggccttcaaatcaaattagaattcactgagaataataatacttccaatttttttcatagttgtataatcagaatttcaatccacattagaaaagtttttatatgggcaactttatgcgaaatccaaatcaacacaatgcactctgcagttagacaccattattttttcttacctaatatactgaagcagattgatccgtttgatttttatttccaggaggaagactagtggtggattccatgacatatattgtaattcttttcataggaaatgtcattacagtatgaattataattatttacaagcaatggcttttgtggccatcatttggccatcatttgttataataaatataaatttcccaatttttacttaaaagacatcacaaca

SEQ ID NO: 151912 - DNA, 1919 bp, Homo sapiens
  Payload ID: 9902
  Gene Symbol: MMP21
  Gene Name: matrix metallopeptidase 21
  Uniprot ID: Q8N119
  ENST ID: ENST00000368808
  CDS Start-End: 1-1710
atgctcgccgcctccatcttccgtccgacactgctgctctgctggctggctgctccctggcccacccagcccgagagtctcttccacagccgggaccgctcggacctggagccgtccccactgcgccaggccaagcccattgccgacctccacgctgctcagcggttcctgtccagatacggctggtcaggggtgtgggcggcctgggggcccagtcccgaggggccgccggagacccccaagggcgccgccctggccgaggcggtgcgcaggttccagcgggcgaacgcgctgccggccagcggggagctggacgcggccaccctagcggccatgaaccggccgcgctgcggggtcccggacatgcgcccaccgcccccctccgccccgccttcgcccccgggcccgccccccagagcccgctccaggcgctccccgcgggcgccgctgtccttgtcccggcggggttggcagccccggggctaccccgacggcggagctgcccaggccttctccaagaggacgctgagctggcggctgctgggcgaggccctgagcagccaactgtccgtggccgaccagcggcgcattgtggcgctggccttcaggatgtggagcgaggtgacgccgctggacttccgcgaggacctggccgcccccggggccgcggtcgacatcaagctgggctttgggagaggccggcacctgggctgtccgcgggccttcgatgggagcgggcaggagtttgcacacgcctggcgcctaggtgacattcactttgacgacgacgagcacttcacacctcccaccagtgacacgggcatcagccttctcaaggtggccgtccatgaaattggccatgtcctgggcttgcctcacacctacaggacgggatccataatgcaaccaaattacattccccaggagcctgcctttgagttggactggtcagacaggaaagcaattcaaaagctgtatggctcctgtgagggatcatttgatactgcgtttgactggattcgcaaagagagaaaccaatatggagaggtgatggtgagatttagcacatatttcttccgtaacagctggtactggctttatgaaaatcgaaacaataggacacgctatggggaccctatccaaatcctcactggctggcctggaatcccaacacacaacatagatgcctttgttcacatctggacatggaaaagagatgaacgttatttttttcaaggaaatcaatactggagatatgacagtgacaaggatcaggccctcacagaagatgaacaaggaaaaagctatcccaaattgatttcagaaggatttcctggcatcccaagtcccctagacacggcgttttatgaccgaagacagaagttaatttacttcttcaaggagtcccttgtatttgcatttgatgtcaacagaaatcgagtacttaattcttatccaaagaggattactgaagtttttccagcagtaataccacaaaatcatcctttcagaaatatagattccgcttattactcctatgcatacaactccattttctttttcaaaggcaatgcatactggaaggtagttaatgacaaggacaaacaacagaattcctggcttcctgctaatggcttatttccaaaaaagtttatttcagagaagtggtttgatgtttgtgacgtccatatctccacactgaacatgtaataagaaaaagtaggaaatggagggtcataggacttcgctaaaattctgatactgtttacaaagaaaaccggattttcagtagctgaagaaaatatggcactgtaagttaaaacccaatgggaaaagccttagttgaacttttaaaatacttgatttaaaaacaattgctcaggcaaaacataattcataaactaaaaggtttaaaaaaa

SEQ ID NO: 151913 - DNA, 1326 bp, Homo sapiens
  Payload ID: 9903
  Gene Symbol: MMP23B
  Gene Name: matrix metallopeptidase 23B
  Uniprot ID: O75900
  ENST ID: ENST00000356026
  CDS Start-End: 125-1297
caccgggctgtaacccgagccgccgagccactgcctcccctccggatcctccccggaggctctgcggcccgggcccccgcgccttgctgccccatgcagccctgagccccacagcaagtctgccatgggccgcggggcccgtgtcccctcggaggccccgggggcaggcgtcgagcgccgctggcttggagccgcgctggtcgccctgtgcctcctccccgcgctggtgctgctggcccggctgggggccccggcggtgccggcctggagcgcagcgcagggagacgtcgctgcgctgggcctctcggcggtcccccccacccgggtcccgggcccactggccccccgcagacgccgctacacgctgactccagccaggctgcgctgggaccacttcaacctcacctacaggatcctctccttcccgcggaacctgctgagcccgcgggagacgcggcgggccctagctgccgccttccgcatgtggagcgacgtgtcccccttcagcttccgcgaggtggcccccgagcagcccagcgacctccggataggcttctacccgatcaaccacacggactgcctggtctccgcgctgcaccactgcttcgacggccccacgggggagctggcccacgccttcttccccccgcacggcggcatccacttcgacgacagcgagtactgggtcctgggccccacgcgctacagctggaagaaaggcgtgtggctcacggacctggtgcacgtggcggcccacgagatcggccacgcgctgggcctgatgcactcacaacacggccgggcgctcatgcacctgaacgccacgctgcgcggctggaaggcgttgtcccaggacgagctgtgggggctgcaccggctctacggatgcctcgacaggctgttcgtgtgcgcgtcctgggcgcggaggggcttctgcgacgctcgccggcggctcatgaagaggctctgccccagcagctgcgacttctgctacgaattccccttccccacggtggccaccaccccaccgccccccaggaccaaaaccaggctggtgcccgagggcaggaacgtgaccttccgctgcggccagaagatcctccacaagaaagggaaagtgtactggtacaaggaccaggagcccctggagttctcctaccccggctacctggccctgggcgaggcgcacctgagcatcatcgccaacgccgtcaatgagggcacctacacctgcgtggtgcgccgccagcagcgcgtgctgaccacctactcctggcgagtccgtgtgcggggctgagcccggctgataaagcactttctctctga

SEQ ID NO: 151914 - DNA, 1309 bp, Homo sapiens
  Payload ID: 9903
  Gene Symbol: MMP23B
  Gene Name: matrix metallopeptidase 23B
  ENST ID: ENST00000378675
  CDS Start-End: 41-1201
tgctgccccatgcagccctgagccccacagcaagtctgccatgggccgcggggcccgtgtcccctcggaggccccgggggcaggcgtcgagcgccgctggcttggagccgcgctggtcgccctgtgcctcctccccgcgctggtgctgctggcccggctgggggccccggcggtgccggcctggagcgcagcgcagggagacgtcgctgcgctgggcctctcggcggtcccccccacccgggtcccgggcccactggccccccgcagacgccgctacacgctgactccagccaggctgcgctgggaccacttcaacctcacctacaggatcctctccttcccgcggaacctgctgagcccgcgggagacgcggcgggccctagctgccgccttccgcatgtggagcgacgtgtcccccttcagcttccgcgaggtggcccccgagcagcccagcgacctccggataggtgggcgcccgcccccgccccggcccggccctgcgcgcccggcctctcagccccgtgctccccccaggcttctacccgatcaaccacacggactgcctggtctccgcgctgcaccactgcttcgacggccccacgggggagctggcccacgccttcttccccccgcacggcggcatccacttcgacgacagcgagtactgggtcctgggccccacgcgctacagctggaagaaaggcgtgtggctcacggacctggtgcacgtggcggcccacgagatcggccacgcgctgggcctgatgcactcacaacacggccgggcgctcatgcacctgaacgccacgctgcgcggctggaaggcgttgtcccaggacgagctgtgggggctgcaccggctctacggatgcctcgacaggctgttcgtgtgcgcgtcctgggcgcggaggggcttctgcgacgctcgccggcggctcatgaagaggctctgccccagcagctgcgacttctgctacgaattccccttccccacggtggccaccaccccaccgccccccaggaccaaaaccaggctggtgcccgagggcaggaacgtgaccttccgctgcggccagaagatcctccacaagaaagggaaagtgtactggtacaaggaccaggagcccctggagttctcctaccccggctacctggccctgggcgaggcgcacctgagcatcatcgccaacgccgtcaatgagggcacctacacctgcgtggtgcgccgccagcagcgcgtgctgaccacctactcctggcgagtccgtgtgcggggctgagcccggctgataaagcactttctctctga

SEQ ID NO: 151915 - DNA, 750 bp, Homo sapiens
  Payload ID: 9903
  Gene Symbol: MMP23B
  Gene Name: matrix metallopeptidase 23B
  ENST ID: ENST00000435358
  CDS Start-End: 1-728
accacacggactgcctggtctccgcgctgcaccactgcttcgacggccccacgggggagctggcccacgccttcttccccccgcacggcggcatccacttcgacgacagcgagtactgggtcctgggccccacgcgctacagctggaagaaaggcgtgtggctcacggacctggtgcacgtggcggcccacgagatcggccacgcgctgggcctgatgcactcacaacacggccgggcgctcatgcacctgaacgccacgctgcgcggctggaaggcgttgtcccaggacgagctgtgggggctgcaccggctctacggtgagtccctttgtcgggcgggagggcggggaccgggcggtcctgagccaggccgtgctccccacgctcccgataggatgcctcgacaggctgttcgtgtgcgcgtcctgggcgcggaggggcttctgcgacgctcgccggcggctcatgaagaggctctgccccagcagctgcgacttctgctacgaattccccttccccacggtggccaccaccccaccgccccccaggaccaaaaccaggctggtgcccgagggcaggaacgtgaccttccgctgcggccagaagatcctccacaagaaagggaaagtgtactggtacaaggaccaggagcccctggagttctcctaccccggctacctggccctgggcgaggcgcacctgagcatcatcgccaacgccgtcaatgagggcacctacacctgcgtggtg

SEQ ID NO: 151916 - DNA, 1531 bp, Homo sapiens
  Payload ID: 9903
  Gene Symbol: MMP23B
  Gene Name: matrix metallopeptidase 23B
  ENST ID: ENST00000512731
  CDS Start-End: 42-758
ttgctgccccatgcagccctgagccccacagcaagtctgccatgggccgcggggcccgtgtcccctcggaggccccgggggcaggcgtcgagcgccgctggcttggagccgcgctggtcgccctgtgcctcctccccgcgctggtgctgctggcccggctgggggccccggcggtgccggcctggagcgcagcgcagggagacgtcgctgcgctgggcctctcggcggtcccccccacccgggtcccgggcccactggccccccgcagacgccgctacacgctgactccagccaggctgcgctgggaccacttcaacctcacctacaggatcctctccttcccgcggaacctgctgagcccgcgggagacgcggcgggccctagctgccgccttccgcatgtggagcgacgtgtcccccttcagcttccgcgaggtggcccccgagcagcccagcgacctccggataggcttctacccgatcaaccacacggactgcctggtctccgcgctgcaccactgcttcgacggccccacgggggagctggcccacgccttcttccccccgcacggcggcatccacttcgacgacagcgagtactgggtcctgggccccacgcgctacagctggaagaaaggtgaccgtccaggctggcctcctggaggcctctcctctgcagcacagtgggctgccgcggtcgggctttggggcagacggcaggagggaccttccggggtggtggctgccactggagtctagcaggcaaggaggggagcccgtgggagcccccatcccggcagccctgaactccctttcccatccccctgcgcctctggagcgggagctggagctgcattcctgggggccgagctcaccgcctgggcccagaacattcttatctttccgtggctgcggccgagggcggctccgcggctgcgctccagcagatacaccgggcctcggggagctggcccacgggcggcggggctgggcccggggctcccaggcgctgacccccggggcccgcaggcgtgtggctcacggacctggtgcacgtggcggcccacgagatcggccacgcgctgggcctgatgcactcacaacacggccgggcgctcatgcacctgaacgccacgctgcgcggctggaaggcgttgtcccaggacgagctgtgggggctgcaccggctctacggtgagtccctttgtcgggcgggagggcggggaccgggcggtcctgagccaggccgtgctccccacgctcccgataggatgcctcgacaggctgttcgtgtgcgcgtcctgggcgcggaggggcttctgcgacgctcgccggcggctcatgaagaggctctgccccagcagctgcgacttctgctacgaattccccttccccacggtggccaccaccccaccgccccccaggaccaaaaccaggctggtgcccgagggcaggaacgtgaccttccgctgcggccagaagatcctccacaagaaagggaaagtgtactggtacaaggaccaggagcccct

SEQ ID NO: 151917 - DNA, 556 bp, Homo sapiens
  Payload ID: 9903
  Gene Symbol: MMP23B
  Gene Name: matrix metallopeptidase 23B
  ENST ID: ENST00000472264
  CDS Start-End: 57-556
ccgggcccccgcgccttgctgccccatgcagccctgagccccacagcaagtctgccatgggccgcggggcccgtgtcccctcggaggccccgggggcaggcgtcgagcgccgctggcttggagccgcgctggtcgccctgtgcctcctccccgcgctggtgctgctggcccggctgggggccccggcggtgccggcctggagcgcagcgcagtccattttccgcggcagtttttggtcctggggaccgtcaccgatgcctcccacgcacgctttcttccctgaagggagacgtcgctgcgctgggcctctcggcggtcccccccacccgggtcccgggcccactggccccccgcagacgccgctacacgctgactccagccaggctgcgctgggaccacttcaacctcacctacaggatcctctccttcccgcggaacctgctgagcccgcgggagacgcggcgggccctagctgccgccttccgcatgtggagcgacgtgtcccccttcagcttccgcgaggtggcccccgagcagcccagcgacctccggatag

SEQ ID NO: 151918 - DNA, 903 bp, Homo sapiens
  Payload ID: 9903
  Gene Symbol: MMP23B
  Gene Name: matrix metallopeptidase 23B
  ENST ID: ENST00000479814
  CDS Start-End: 1-798
ggagacgtcgctgcgctgggcctctcggcggtcccccccacccgggtcccgggcccactggccccccgcagacgccgctacacgctgactccagccaggctgcgctgggaccacttcaacctcacctacaggcttctacccgatcaaccacacggactgcctggtctccgcgctgcaccactgcttcgacggccccacgggggagctggcccacgccttcttccccccgcacggcggcatccacttcgacgacagcgagtactgggtcctgggccccacgcgctacagctggaagaaaggcgtgtggctcacggacctggtgcacgtggcggcccacgagatcggccacgcgctgggcctgatgcactcacaacacggccgggcgctcatgcacctgaacgccacgctgcgcggctggaaggcgttgtcccaggacgagctgtgggggctgcaccggctctacggatgcctcgacaggctgttcgtgtgcgcgtcctgggcgcggaggggcttctgcgacgctcgccggcggctcatgaagaggctctgccccagcagctgcgacttctgctacgaattccccttccccacggtggccaccaccccaccgccccccaggaccaaaaccaggctggtgcccgagggcaggaacgtgaccttccgctgcggccagaagatcctccacaagaaagggaaagtgtactggtacaaggaccaggagcccctggagttctcctaccccggctacctggccctgggcgaggcgcacctgagcatcatcgccaacgccgtcaatgagggcacctacacctgcgtggtgcgccgccagcagcgcgtgctgaccacctactcctggcgagtccgtgtgcggggctgagcccggctgataaagcactttctctc

SEQ ID NO: 151919 - DNA, 799 bp, Homo sapiens
  Payload ID: 9903
  Gene Symbol: MMP23B
  Gene Name: matrix metallopeptidase 23B
  ENST ID: ENST00000503792
  CDS Start-End: 1-777
accacacggactgcctggtctccgcgctgcaccactgcttcgacggccccacgggggagctggcccacgccttcttccccccgcacggcggcatccacttcgacgacagcgagtactgggtcctgggccccacgcgctacagctggaagaaaggtgaccgtccaggctggcctcctggaggcctctcctctgcagcacagtgggctgccgcggtcgggctttggggcagacggcaggagggaccttccggggtggtggctgccactggagtctagcaggcgtgtggctcacggacctggtgcacgtggcggcccacgagatcggccacgcgctgggcctgatgcactcacaacacggccgggcgctcatgcacctgaacgccacgctgcgcggctggaaggcgttgtcccaggacgagctgtgggggctgcaccggctctacggatgcctcgacaggctgttcgtgtgcgcgtcctgggcgcggaggggcttctgcgacgctcgccggcggctcatgaagaggctctgccccagcagctgcgacttctgctacgaattccccttccccacggtggccaccaccccaccgccccccaggaccaaaaccaggctggtgcccgagggcaggaacgtgaccttccgctgcggccagaagatcctccacaagaaagggaaagtgtactggtacaaggaccaggagcccctggagttctcctaccccggctacctggccctgggcgaggcgcacctgagcatcatcgccaacgccgtcaatgagggcacctacacctgcgtggtg

SEQ ID NO: 151920 - DNA, 530 bp, Homo sapiens
  Payload ID: 9903
  Gene Symbol: MMP23B
  Gene Name: matrix metallopeptidase 23B
  ENST ID: ENST00000490017
  CDS Start-End: 1-264
cccaggaccaaaaccaggctggtgcccgagggcaggaacgtgaccttccgctgcggccagaagatcctccacaagaaagggaaagtgtactggtacaaggaccaggagcccctggagttctcctaccccggctacctggccctgggcgaggcgcacctgagcatcatcgccaacgccgtcaatgagggcacctacacctgcgtggtgcgccgccagcagcgcgtgctgaccacctactcctggcgagtccgtgtgcggggctgagcccggctgataaagcactttctctctgatggctcctcgctcattcttgggagggcagcgggcagccagtctgggcaggtggacaccccagcccctggtccaccgagagctgggcgtcctcggggctgggcacccctgcttccccgcacagcggacaacagagcccggtggtctgcgactcccctcccacacatggtcccgggtcactcaaaggacgacacggggagctttcctcgaagaatattttaatacattttaaaactcaa

SEQ ID NO: 151921 - DNA, 1239 bp, Homo sapiens
  Payload ID: 9903
  Gene Symbol: MMP23B
  Gene Name: matrix metallopeptidase 23B
  Uniprot ID: O75900
  ENST ID: ENST00000412810
  CDS Start-End: 39-1211
ctgccccatgcagccctgagccccacagcaagtctgccatgggccgcggggcccgtgtcccctcggaggccccgggggcaggcgtcgagcgccgctggcttggagccgcgctggtcgccctgtgcctcctccccgcgctggtgctgctggcccggctgggggccccggcggtgccggcctggagcgcagcgcagggagacgtcgctgcgctgggcctctcggcggtcccccccacccgggtcccgggcccactggccccccgcagacgccgctacacgctgactccagccaggctgcgctgggaccacttcaacctcacctacaggatcctctccttcccgcggaacctgctgagcccgcgggagacgcggcgggccctagctgccgccttccgcatgtggagcgacgtgtcccccttcagcttccgcgaggtggcccccgagcagcccagcgacctccggataggcttctacccgatcaaccacacggactgcctggtctccgcgctgcaccactgcttcgacggccccacgggggagctggcccacgccttcttccccccgcacggcggcatccacttcgacgacagcgagtactgggtcctgggccccacgcgctacagctggaagaaaggcgtgtggctcacggacctggtgcacgtggcggcccacgagatcggccacgcgctgggcctgatgcactcacaacacggccgggcgctcatgcacctgaacgccacgctgcgcggctggaaggcgttgtcccaggacgagctgtgggggctgcaccggctctacggatgcctcgacaggctgttcgtgtgcgcgtcctgggcgcggaggggcttctgcgacgctcgccggcggctcatgaagaggctctgccccagcagctgcgacttctgctacgaattccccttccccacggtggccaccaccccaccgccccccaggaccaaaaccaggctggtgcccgagggcaggaacgtgaccttccgctgcggccagaagatcctccacaagaaagggaaagtgtactggtacaaggaccaggagcccctggagttctcctaccccggctacctggccctgggcgaggcgcacctgagcatcatcgccaacgccgtcaatgagggcacctacacctgcgtggtgcgccgccagcagcgcgtgctgaccacctactcctggcgagtccgtgtgcggggctgagcccggctgataaagcactttctctctg

SEQ ID NO: 151922 - DNA, 1308 bp, Homo sapiens
  Payload ID: 9903
  Gene Symbol: MMP23B
  Gene Name: matrix metallopeptidase 23B
  ENST ID: ENST00000618459
  CDS Start-End: 41-1201
tgctgccccatgcagccctgagccccacagcaagtctgccatgggccgcggggcccgtgtcccctcggaggccccgggggcaggcgtcgagcgccgctggcttggagccgcgctggtcgccctgtgcctcctccccgcgctggtgctgctggcccggctgggggccccggcggtgccggcctggagcgcagcgcagggagacgtcgctgcgctgggcctctcggcggtcccccccacccgggtcccgggcccactggccccccgcagacgccgctacacgctgactccagccaggctgcgctgggaccacttcaacctcacctacaggatcctctccttcccgcggaacctgctgagcccgcgggagacgcggcgggccctagctgccgccttccgcatgtggagcgacgtgtcccccttcagcttccgcgaggtggcccccgagcagcccagcgacctccggataggtgggcgcccgcccccgccccggcccggccctgcgcgcccggcctctcagccccgtgctccccccaggcttctacccgatcaaccacacggactgcctggtctccgcgctgcaccactgcttcgacggccccacgggggagctggcccacgccttcttccccccgcacggcggcatccacttcgacgacagcgagtactgggtcctgggccccacgcgctacagctggaagaaaggcgtgtggctcacggacctggtgcacgtggcggcccacgagatcggccacgcgctgggcctgatgcactcacaacacggccgggcgctcatgcacctgaacgccacgctgcgcggctggaaggcgttgtcccaggacgagctgtgggggctgcaccggctctacggatgcctcgacaggctgttcgtgtgcgcgtcctgggcgcggaggggcttctgcgacgctcgccggcggctcatgaagaggctctgccccagcagctgcgacttctgctacgaattccccttccccacggtggccaccaccccaccgccccccaggaccaaaaccaggctggtgcccgagggcaggaacgtgaccttccgctgcggccagaagatcctccacaagaaagggaaagtgtactggtacaaggaccaggagcccctggagttctcctaccccggctacctggccctgggcgaggcgcacctgagcatcatcgccaacgccgtcaatgagggcacctacacctgcgtggtgcgccgccagcagcgcgtgctgaccacctactcctggcgagtccgtgtgcggggctgagcccggctgataaagcactttctctctg

SEQ ID NO: 151923 - DNA, 4414 bp, Homo sapiens
  Payload ID: 9904
  Gene Symbol: MMP24
  Gene Name: matrix metallopeptidase 24 (membrane-inserted)
  Uniprot ID: Q9Y5R2
  ENST ID: ENST00000246186
  CDS Start-End: 86-2023
gcgcggaggcgggggcgcgctggcggccgaggcggcggcggcggcggcgaaggcaggcgggccgggcgcgggccccgccgccgggatgccgaggagccggggcggccgcgccgcgccggggccgccgccgccgccgccgccgccgggccaggccccgcgctggagccgctggcgggtccctgggcggctgctgctgctgctgctgcccgcgctctgctgcctcccgggcgccgcgcgggcggcggcggcggcggcgggggcagggaaccgggcagcggtggcggtggcggtggcgcgggcggacgaggcggaggcgcccttcgccgggcagaactggttaaagtcctatggctatctgcttccctatgactcacgggcatctgcgctgcactcagcgaaggccttgcagtcggcagtctccactatgcagcagttttacgggatcccggtcaccggtgtgttggatcagacaacgatcgagtggatgaagaaaccccgatgtggtgtccctgatcacccccacttaagccgtaggcggagaaacaagcgctatgccctgactggacagaagtggaggcaaaaacacatcacctacagcattcacaactataccccaaaagtgggtgagctagacacgcggaaagctattcgccaggctttcgatgtgtggcagaaggtgaccccactgacctttgaagaggtgccataccatgagatcaaaagtgaccggaaggaggcagacatcatgatcttttttgcttctggtttccatggcgacagctccccatttgatggagaagggggattcctggcccatgcctacttccctggcccagggattggaggagacacccactttgactccgatgagccatggacgctaggaaatgccaaccatgacgggaacgacctcttcctggtggctgtgcatgagctgggccacgcgctgggactggagcactccagcgaccccagcgccatcatggcgcccttctaccagtacatggagacgcacaacttcaagctgccccaggacgatctccagggcatccagaagatctatggacccccagccgagcctctggagcccacaaggccactccctacactccccgtccgcaggatccactcaccatcggagaggaaacacgagcgccagcccaggccccctcggccgcccctcggggaccggccatccacaccaggcaccaaacccaacatctgtgacggcaacttcaacacagtggccctcttccggggcgagatgtttgtctttaaggatcgctggttctggcgtctgcgcaataaccgagtgcaggagggctaccccatgcagatcgagcagttctggaagggcctgcctgcccgcatcgacgcagcctatgaaagggccgatgggagatttgtcttcttcaaaggtgacaagtattgggtgtttaaggaggtgacggtggagcctgggtacccccacagcctgggggagctgggcagctgtttgccccgtgaaggcattgacacagctctgcgctgggaacctgtgggcaagacctactttttcaaaggcgagcggtactggcgctacagcgaggagcggcgggccacggaccctggctaccctaagcccatcaccgtgtggaagggcatcccacaggctccccaaggagccttcatcagcaaggaaggatattacacctatttctacaagggccgggactactggaagtttgacaaccagaaactgagcgtggagccaggctacccgcgcaacatcctgcgtgactggatgggctgcaaccagaaggaggtggagcggcggaaggagcggcggctgccccaggacgacgtggacatcatggtgaccatcaacgatgtgccgggctccgtgaacgccgtggccgtggtcatcccctgcatcctgtccctctgcatcctggtgctggtctacaccatcttccagttcaagaacaagacaggccctcagcctgtcacctactataagcggccagtccaggaatgggtgtgagcagcccagagccctctctatccacttggtctggccagccaggcccttcctcaccagggtctgaggggcagctctggccagtgctcaccagggccagcagggccctaggctggggtcgtacagctgaagtggtgggtgcattggcctaggctgagcgtggggcagggaattatgggggctgtgccccagggtgggtgtctggcacccagctgccagccttctgtcctgggcaaactactccctacttaagggaataggccaggctccatccggaggcagggaccatgccaggaggagcccctgtggtcacggcatcctgtggtgtccatgaggtaccacagctccactcctggctggaacccagcaccctctgtgggaagccagcactagctctcatcccccatccgggagataccaccagtcctggtccccttttgccaacacctgctggtcagatgtccccctacccccaccccactgtcctccaaggctacaggacccctgcttctgacacagtgagcaacaagcctgggtttccctgctggcagacggcagatccctcaggaaacctgctccacttgtcagggtctcttcggagacccaggatttagggtcacatgctgcaggcagggctgtggcccagctgggtctgacaaggacccagctgtcacatcgtgaatatttaaatgtcctgtcactactgtcccattttgcaaaggctgcttgaggctttaggtgaactagaggtgactgtcttggtgatgaggccagcatagcggccctcccccaggcgacaaggaccaaggtgctgctaaggccactctagcgcccagacaccccagtagctgagctctgctcctatggctacagagctggggcagaagctgaccccatttctggaggaagatccgagtttgtgaccgtcctccactcccctctattgtcactgtccccagctttgctccagtctgtcacttgcagcctggagctcagcctcaccagttaggtgaggcagagatggctgcagggccaacactggcagagcctgggagtccttcggaaggggaccagggcgtctgaagtgctcagtgcccccactactctgaggccgactccagctactctgaggccgactcaatctctcggctggaagcagtgttttcccagagcttggcccttgctgacctcgctcactgggcccatcttcccacactgctcttagaaggacacccctaccggtagcagccccaagctgagggggctccctttttgaccttcactggcccgcccttcactgtctccagcaggagttcctagggcttggcctgccttgctccacagtacggcggaggcagccctgcttgtcactgaggagccctagacaaggccaatgggttcatcaatgcccactggctctctgccaaagccaaaaaggtgtcaggcagtctccagcgtgctggccgggtctcggatgccacccctgctcactgagcctgcatgggccttgcccccgaccctgtggtctctgggattggggtcggcttaccctgtagcacagacagggactcctgctgccctgggagctgtctcaagcaaaatctcttgtcccagaggtgcccatgtgggtccgctgtgtcccctgtcatcatccttgttttttctcattttggccaagggcaggctccctgggacaggcagggaacaactgcggagatattagtgattcataggtttgtacagtgttttatactttgcaaagcactttattagctcacacctgtccactcacatgaaactcgtgttaggccctgggaggccgacggtaactctcaccgtgccctcagatgaagcacagagaggttgttacttgcccgggccatccagtgggctggctgggtcttgtgtccccatctgtggacccctctagggtctgagatgagatgagaagtgtctcctgtatccacctcttcctggcctcccttcccccacttcctggtccctgtccactcctcaggttggtgctctcacttcttgaaagctctaggcacccccgcctcccgccaggctccccattggctcctggcaggccagctgagaatgaacaggagatggaggcaggcagcccaggctgcagaggtgagggatgtggggccaggcccagagggctcagcctagaggcttccaatctcagattctcctgcctgtggtcatctgtttgtccatcaccccaggacagggcagacagaggggcaaagcactgggggccccagagcctagcttcccctcagcctgggggacatcacagcatttcagtgtcagtcacattttaaactgatcagcctttgtataatgttttttaaatcatttctaaataaaacagaaatacagagt

SEQ ID NO: 151924 - DNA, 3554 bp, Homo sapiens
  Payload ID: 9905
  Gene Symbol: MMP25
  Gene Name: matrix metallopeptidase 25
  Uniprot ID: Q9NPA2
  ENST ID: ENST00000336577
  CDS Start-End: 238-1926
gattcccgggcccacccgacccagcggcgcgaccctggccctccgggaccctccgctgactccaccgcgcacttcccgggacccccacacacatcccagccctccggccgatccctccctactcggtgccgggtgccccccgccctctccaggcccggatctcctcccccaggtccccggggcggccccagccaggcccccttcgaaccccgccggcggcccgggctggggcgcaccatgcggctgcggctccggcttctggcgctgctgcttctgctgctggcaccgcccgcgcgcgccccgaagccctcggcgcaggacgtgagcctgggcgtggactggctgactcgctatggttacctgccgccaccccaccctgcccaggcccagctgcagagccctgagaagttgcgcgatgccatcaaagtcatgcagaggttcgcggggctgccggagaccggccgcatggacccagggacagtggccaccatgcgtaagccccgctgctccctgcctgacgtgctgggggtggcggggctggtcaggcggcgtcgccggtacgctctgagcggcagcgtgtggaagaagcgaaccctgacatggagggtacgttccttcccccagagctcccagctgagccaggagaccgtgcgggtcctcatgagctatgccctgatggcctggggcatggagtcaggcctcacatttcatgaggtggattccccccagggccaggagcccgacatcctcatcgactttgcccgcgccttccaccaggacagctaccccttcgacgggttggggggcaccctagcccatgccttcttccctggggagcaccccatctccggggacactcactttgacgatgaggagacctggacttttgggtcaaaagacggcgaggggaccgacctgtttgccgtggctgtccatgagtttggccacgccctgggcctgggccactcctcagcccccaactccattatgaggcccttctaccagggtccggtgggcgaccctgacaagtaccgcctgtctcaggatgaccgcgatggcctgcagcaactctatgggaaggcgccccaaaccccatatgacaagcccacaaggaaacccctggctcctccgccccagcccccggcctcgcccacacacagcccatccttccccatccctgatcgatgtgagggcaattttgacgccatcgccaacatccgaggggaaactttcttcttcaaaggcccctggttctggcgcctccagccctccggacagctggtgtccccgcgacccgcacggctgcaccgcttctgggaggggctgcccgcccaggtgagggtggtgcaggccgcctatgctcggcaccgagacggccgaatcctcctctttagcgggccccagttctgggtgttccaggaccggcagctggagggcggggcgcggccgctcacggagctggggctgcccccgggagaggaggtggacgccgtgttctcgtggccacagaacgggaagacctacctggtccgcggccggcagtactggcgctacgacgaggcggcggcgcgcccggaccccggctaccctcgcgacctgagcctctgggaaggcgcgcccccctcccctgacgatgtcaccgtcagcaacgcaggtgacacctacttcttcaagggcgcccactactggcgcttccccaagaacagcatcaagaccgagccggacgccccccagcccatggggcccaactggctggactgccccgccccgagctctggtccccgcgcccccaggccccccaaagcgacccccgtgtccgaaacctgcgattgtcagtgcgagctcaaccaggccgcaggacgttggcctgctcccatcccgctgctcctcttgcccctgctggtggggggtgtagcctcccgctgatggggggagccatccagaccgaacagcgccctccacggccgagtcccccgccgctggacctggtcgggggttgtgaggcgctgcggaggccccttgtctgttcccacggacgggggctcgggcgcggactaagcaggggggatctcccgcgcaggggcggcggcggcggggaccggtcgcctggcgctgggctcagtctcctcagggtctgagaccccggcgctgccaccggaacccgccttcaggggcgcacgcgcgctgggaccatgcgtcggtcgtcgcccccgtcgttccctcccggctgccgccagggggcggtcggaccccgcctcccgagcccggggaggggcggggaggacaaggggcgggcccgcggcctcacccggagggacggcagccccggtcgcgcgctggccccgcaggaccttccttttccaggaagagccagcttttctcggagcgcagtcctgggactctccgcagccccgccccgcctggccactgcgtctggcattcctgggtcgttagaggacaggcctgactgcgaagctgtgccttgcccctctcccacccgcagtttctcaccccgttctgctcccacaaggcccccctacagtcactgccacactggtggggacctgggacccagacccggaaccagcccagatatcacccctgaggacccatgcgccacgtcctgggtggtggaatcagtggctggagggacgacccttgctctccaggctgttaaccttttccgttgctcccccgccacccacctcctcctccccaggccacccaacttgggcacctccctgggcccagaactgccttccattcaatggggaacccttctatccccaagaaccccttccctgcttgcaccctggagagaacagcttgactcccatcaactcaacgctggtggaaagacagggaccgaaccctggctcaggcctggtcattgcctcctcagcactccctcctgggaggccttagctctagagtgaggggtgggtggaacctgggggcacctcgttcaccctgtccccactccccacagttttaggatctaaatgattgcctctggaactattcttctagactatcccacatcagaatcactgggaaatttaagtttgcagatcccacactcaccctgaatcctcactcagggtggggtcaggaatctgcattttaactagtcgcggggattgtggggggcagtagctggctgtttcgtggcatttctgtggctctgcagtgttcctccaccccaggaccaatatgttcaggccacaccgatggcctgaaccccatgggtagagtcacttaggggccacttcctaagttgctgtccagcctcagtgaccccctagtgcttcctggagctgaggctgtgggcggctgtcccagcaaccatgcgaggggttgccccagttgctcatacaaacagatcagcatgaggacagaaggcaggagactttggtcagttacctgggaattctgggctgccaggaaacgatttgggcctctgtcagtttcttttccatgtatgaggagggggaaatttgtatattagaaacttattcatcccactcaggacaataaaaacgaatgtacaaaaa

SEQ ID NO: 151925 - DNA, 1017 bp, Homo sapiens
  Payload ID: 9905
  Gene Symbol: MMP25
  Gene Name: matrix metallopeptidase 25
  ENST ID: ENST00000612971
  CDS Start-End: 466-1017
gattcccgggcccacccgacccagcggcgcgaccctggccctccgggaccctccgctgactccaccgcgcacttcccgggacccccacacacatcccagccctccggccgatccctccctactcggtgccgggtgccccccgccctctccaggcccggatctcctcccccaggtccccggggcggccccagccaggcccccttcgaaccccgccggcggcccgggctggggcgcaccatgcggctgcggctccggcttctggcgctgctgcttctgctgctggcaccgcccgcgcgcgccccgaagccctcggcgcaggacgtgagcctgggcgtggactggctgactcgctatggttacctgccgccaccccaccctgcccaggcccagctgcagagccctgagaagttgcgcgatgccatcaaagtcatgcagaggttcgcggggctgccggagaccggccgcatggacccagggacagtggccaccatgcgtaagccccgctgctccctgcctgacgtgctgggggtggcggggctggtcaggcggcgtcgccggtacgctctgagcggcagcgtgtggaagaagcgaaccctgacatggagggtacgttccttcccccagagctcccagctgagccaggagaccgtgcgggtcctcatgagctatgccctgatggcctggggcatggagtcaggcctcacatttcatgaggtggattccccccagggccaggagcccgacatcctcatcgactttgcccgcgccttccaccaggacagctaccccttcgacgggttggggggcaccctagcccatgccttcttccctggggagcaccccatctccggggacactcactttgacgatgaggagacctggacttttgggtcaaaagcctctcagcagctggagcaggagctggcaggcggctcaccggttgatgaggagctgggcttcagccggggctggcgtgtgaatcctctgggtcctggcagtcctgagcgcctgagctga

SEQ ID NO: 151926 - DNA, 989 bp, Homo sapiens
  Payload ID: 9906
  Gene Symbol: MMP26
  Gene Name: matrix metallopeptidase 26
  Uniprot ID: Q9NRE1
  ENST ID: ENST00000300762
  CDS Start-End: 19-804
gacaaatgagggtttggcatgcagctcgtcatcttaagagttactatcttcttgccctggtgtttcgccgttccagtgccccctgctgcagaccataaaggatgggactttgttgagggctatttccatcaatttttcctgaccaagaaggagtcgccactccttacccaggagacacaaacacagctcctgcaacaattccatcggaatgggacagacctacttgacatgcagatgcatgctctgctacaccagccccactgtggggtgcctgatgggtccgacacctccatctcgccaggaagatgcaagtggaataagcacactctaacttacaggattatcaattacccacatgatatgaagccatccgcagtgaaagacagtatatataatgcagtttccatctggagcaatgtgacccctttgatattccagcaagtgcagaatggagatgcagacatcaaggtttctttctggcagtgggcccatgaagatggttggccctttgatgggccaggtggtatcttaggccatgcctttttaccaaattctggaaatcctggagttgtccattttgacaagaatgaacactggtcagcttcagacactggatataatctgttcctggttgcaactcatgagattgggcattctttgggcctgcagcactctgggaatcagagctccataatgtaccccacttactggtatcacgaccctagaaccttccagctcagtgccgatgatatccaaaggatccagcatttgtatggagaaaaatgttcatctgacataccttaatgttagcacagaggacttattcaacctgtcctttcagggagtttattggaggatcaaagaactgaaagcactagagcagccttggggactgctaggatgaagccctaaagaatgcaacctagtcaggttagctgaaccgacactcaaaacgctactgagtcacaataaagattgttttaaagagt

SEQ ID NO: 151927 - DNA, 1189 bp, Homo sapiens
  Payload ID: 9906
  Gene Symbol: MMP26
  Gene Name: matrix metallopeptidase 26
  Uniprot ID: Q9NRE1
  ENST ID: ENST00000380390
  CDS Start-End: 217-1002
agtttcttacaaaatcgtcctatccagcatgcacttttggatactctttcaactcagaagtcaacataaagggtatggatgatgacgccactcacagattcaaagaaagggcaaactggcagagtgagtcattggatgttgctggcacagctataaagatccagtggcccaagttgtgtacctgaattcaagcagtgggacaaatgagggtttggcatgcagctcgtcatcttaagagttactatcttcttgccctggtgtttcgccgttccagtgccccctgctgcagaccataaaggatgggactttgttgagggctatttccatcaatttttcctgaccaagaaggagtcgccactccttacccaggagacacaaacacagctcctgcaacaattccatcggaatgggacagacctacttgacatgcagatgcatgctctgctacaccagccccactgtggggtgcctgatgggtccgacacctccatctcgccaggaagatgcaagtggaataagcacactctaacttacaggattatcaattacccacatgatatgaagccatccgcagtgaaagacagtatatataatgcagtttccatctggagcaatgtgacccctttgatattccagcaagtgcagaatggagatgcagacatcaaggtttctttctggcagtgggcccatgaagatggttggccctttgatgggccaggtggtatcttaggccatgcctttttaccaaattctggaaatcctggagttgtccattttgacaagaatgaacactggtcagcttcagacactggatataatctgttcctggttgcaactcatgagattgggcattctttgggcctgcagcactctgggaatcagagctccataatgtaccccacttactggtatcacgaccctagaaccttccagctcagtgccgatgatatccaaaggatccagcatttgtatggagaaaaatgttcatctgacataccttaatgttagcacagaggacttattcaacctgtcctttcagggagtttattggaggatcaaagaactgaaagcactagagcagccttggggactgctaggatgaagccctaaagaatgcaacctagtcaggttagctgaaccgacactcaaaacgctactgagtcacaataaagattgttttaaagagtaa

SEQ ID NO: 151928 - DNA, 1913 bp, Homo sapiens
  Payload ID: 9907
  Gene Symbol: MMP27
  Gene Name: matrix metallopeptidase 27
  Uniprot ID: Q9H306
  ENST ID: ENST00000260229
  CDS Start-End: 93-1634
aaatgatgatacaagccaattcatgccacgtctcactattattttctaaattctgtgctaacagaaccggcttcagctgaagaaagagaggaatgaagcgccttctgcttctgtttttgttctttataacattttcttctgcatttcccttagtccggatgacggaaaatgaagaaaatatgcaactggctcaggcatatctcaaccagttctactctcttgaaatagaagggaatcatcttgttcaaagcaagaataggagtctcatagatgacaaaattcgggaaatgcaagcattttttggattgacagtgactggaaaactggactcaaacacccttgagatcatgaagacacccaggtgtggggtgcctgatgtgggccagtatggctacaccctccctgggtggagaaaatacaacctcacctacagaataataaactatactccggatatggcacgagctgctgtggatgaggctatccaagaaggtttagaagtgtggagcaaagtcactccactaaaattcaccaagatttcaaaggggattgcagacatcatgattgcctttaggactcgagtccatggtcggtgtcctcgctattttgatggtcccttgggagtgcttggccatgcctttcctcctggtccgggtctgggtggtgacactcattttgatgaggatgaaaactggaccaaggatggagcaggattcaacttgtttcttgtggctgctcatgaatttggtcatgcactggggctctctcactccaatgatcaaacagccttgatgttcccaaattatgtctccctggatcccagaaaatacccactttctcaggatgatatcaatggaatccagtccatctatggaggtctgcctaaggaacctgctaagccaaaggaacccactataccccatgcctgtgaccctgacttgacttttgacgctatcacaactttccgcagagaagtaatgttctttaaaggcaggcacctatggaggatctattatgatatcacggatgttgagtttgaattaattgcttcattctggccatctctgccagctgatctgcaagctgcatacgagaaccccagagataagattctggtttttaaagatgaaaacttctggatgatcagaggatatgctgtcttgccagattatcccaaatccatccatacattaggttttccaggacgtgtgaagaaaatagatgcagccgtctgtgataagaccacaagaaaaacctacttctttgtgggcatttggtgctggaggtttgatgaaatgacccaaaccatggacaaagggttcccgcagagagtggtaaaacactttcctggaatcagtatccgtgttgatgctgctttccagtacaaaggattcttctttttcagccgtggatcaaagcaatttgaatacgacattaagacaaagaatattacccgaatcatgagaactaatacttggtttcaatgcaaagaaccaaagaactcctcatttggttttgatatcaacaaggaaaaagcacattcaggaggcataaagatattgtatcataagagtttaagcttgtttatttttggtattgttcatttgctgaaaaacacttctatttatcaataaattcatagacctaaaataaacctcaacaggtcttttaatataaattctgcttcaaaatagaataaaaccattctttaacaacaagttgctggtcctagttctaaatatccaaattcaatggccattttgagctgcctgattcttttaataggaagttattatgtagaaacaaaaatctctgactgtactttaagcctatttcatgctttgtggacttggagaagacatgtcttataactgaatactgaaacatttattaaaccaatctttagcattcta

SEQ ID NO: 151929 - DNA, 1928 bp, Homo sapiens
  Payload ID: 9908
  Gene Symbol: MMP28
  Gene Name: matrix metallopeptidase 28
  Uniprot ID: Q9H239
  ENST ID: ENST00000605424
  CDS Start-End: 206-1768
gacgtctggccggctcccggcgaagggcagcggaggagcggcccagagcgcgcagctagggcactggcgaaaccccgggacagtccctctccgtgcgggggcggcgcagagcagtcccatccccggggtcccgggcgcggctgactgccggctggttccctgcgcgcagtagctccccgagccgggctgcaccggaggcggcgagatggtcgcgcgcgtcggcctcctgctgcgcgccctgcagctgctactgtggggccacctggacgcccagcccgcggagcgcggaggccaggagctgcgcaaggaggcggaggcattcctagagaagtacggatacctcaatgaacaggtccccaaagctcccacctccactcgattcagcgatgccatcagagcgtttcagtgggtgtcccagctacctgtcagcggcgtgttggaccgcgccaccctgcgccagatgactcgtccccgctgcggggttacagataccaacagttatgcggcctgggctgagaggatcagtgacttgtttgctagacaccggaccaaaatgaggcgtaagaaacgctttgcaaagcaaggtaacaaatggtacaagcagcacctctcctaccgcctggtgaactggcctgagcatctgccggagccggcagttcggggcgccgtgcgcgccgccttccagttgtggagcaacgtctcagcgctggagttctgggaggccccagccacaggccccgctgacatccggctcaccttcttccaaggggaccacaacgatgggctgggcaatgcctttgatggcccagggggcgccctggcgcacgccttcctgccccgccgcggcgaagcgcacttcgaccaagatgagcgctggtccctgagccgccgccgcgggcgcaacctgttcgtggtgctggcgcacgagatcggtcacacgcttggcctcacccactcgcccgcgccgcgcgcgctcatggcgccctactacaagaggctgggccgcgacgcgctgctcagctgggacgacgtgctggccgtgcagagcctgtatgggaagcccctagggggctcagtggccgtccagctcccaggaaagctgttcactgactttgagacctgggactcctacagcccccaaggaaggcgccctgaaacgcagggccctaaatactgccactcttccttcgatgccatcactgtagacaggcaacagcaactgtacatttttaaagggagccatttctgggaggtggcagctgatggcaacgtctcagagccccgtccactgcaggaaagatgggtcgggctgccccccaacattgaggctgcggcagtgtcattgaatgatggagatttctacttcttcaaagggggtcgatgctggaggttccggggccccaagccagtgtggggtctcccacagctgtgccgggcagggggcctgccccgccatcctgacgccgccctcttcttccctcctctgcgccgcctcatcctcttcaagggtgcccgctactacgtgctggcccgagggggactgcaagtggagccctactacccccgaagtctgcaggactggggaggcatccctgaggaggtcagcggcgccctgccgaggcccgatggctccatcatcttcttccgagatgaccgctactggcgcctcgaccaggccaaactgcaggcaaccacctcgggccgctgggccaccgagctgccctggatgggctgctggcatgccaactcggggagcgccctgttctgaaggcacctcctcacctcagaaactggtggtgctctcagggcaaaatcatgttccccacccccggggcagaacccctcttagaagcctctgagtccctctgcagaagaccgggcagcaaagcctccatctggaagtctgtctgcctttgttccttgaagaa

SEQ ID NO: 151930 - DNA, 2033 bp, Homo sapiens
  Payload ID: 9908
  Gene Symbol: MMP28
  Gene Name: matrix metallopeptidase 28
  ENST ID: ENST00000613289
  CDS Start-End: 248-1429
cggggccggcggacccgcgggcaggcactgcccgggctggacgacgtctggccggctcccggcgaagggcagcggaggagcggcccagagcgcgcagctagggcactggcgaaaccccgggacagtccctctccgtgcgggggcggcgcagagcagtcccatccccggggtcccgggcgcggctgactgccggctggttccctgcgcgcagtagctccccgagccgggctgcaccggaggcggcgagatggtcgcgcgcgtcggcctcctgctgcgcgccctgcagctgctactgtggggccacctggacgcccagcccgcggagcgcggaggccaggagctgcgcaaggaggcggaggcattcctagagaagtacggatacctcaatgaacaggtccccaaagctcccacctccactcgattcagcgatgccatcagagcgtttcagtgggtgtcccagctacctgtcagcggcgtgttggaccgcgccaccctgcgccagatgactcgtccccgctgcggggttacagataccaacagttatgcggcctgggctgagaggatcagtgacttgtttgctagacaccggaccaaaatgaggcgtaagaaacgctttgcaaagcaaggtaacaaatggtacaagcagcacctctcctaccgcctggtgaactggcctgagcatctgccggagccggcagttcggggcgccgtgcgcgccgccttccagttgtggagcaacgtctcagcgctggagttctgggaggccccagccacaggccccgctgacatccggctcaccttcttccaaggggaccacaacgatgggctgggcaatgcctttgatggcccagggggcgccctggcgcacgccttcctgccccgccgcggcgaagcgcacttcgaccaagatgagcgctggtccctgagccgccgccgcgggcgcaacctgttcgtggtgctggcgcacgagatcggtcacacgcttggcctcacccactcgcccgcgccgcgcgcgctcatggcgccctactacaagaggctgggccgcgacgcgctgctcagctgggacgacgtgctggccgtgcagagcctgtatgggaagcccctagggggctcagtggccgtccagctcccaggaaagctgttcactgactttgagacctgggactcctacagcccccaaggaaggcgccctgaaacgcagggccctaaatactgccactcttccttcgatgccatcactgtagacaggcaacagcaactgtacatttttaaagggagccatttctgggaggtggcagctgatggcaacgtctcagagccccgtccactgcaggaaagatgggtcgggctgccccccaacattgaggctgcggcagtgtcattgaatgatggagatttctacttcttcaaagtgcaatccgtttgattgatatgaataccaaccatcgtgggctccagcttaaaggagagcagagggggtcgatgctggaggttccggggccccaagccagtgtggggtctcccacagctgtgccgggcagggggcctgccccgccatcctgacgccgccctcttcttccctcctctgcgccgcctcatcctcttcaagggtgcccgctactacgtgctggcccgagggggactgcaagtggagccctactacccccgaagtctgcaggactggggaggcatccctgaggaggtcagcggcgccctgccgaggcccgatggctccatcatcttcttccgagatgaccgctactggcgcctcgaccaggccaaactgcaggcaaccacctcgggccgctgggccaccgagctgccctggatgggctgctggcatgccaactcggggagcgccctgttctgaaggcacctcctcacctcagaaactggtggtgctctcagggcaaaatcatgttccccacccccggggcagaacccctcttagaagcctctgagtccctctgcagaagaccgggcagcaaagcctccatctggaagtctgtctgcctttgttccttgaagaa

SEQ ID NO: 151931 - DNA, 2336 bp, Homo sapiens
  Payload ID: 9908
  Gene Symbol: MMP28
  Gene Name: matrix metallopeptidase 28
  ENST ID: ENST00000619655
  CDS Start-End: 331-1863
agcagcggcgcggggtgggtggggcgggagtgccgggcctccgccccctccgcctgcctttccttcctccctccctcggtccccggggccggcggacccgcgggcaggcactgcccgggctggacgacgtctggccggctcccggcgaagggcagcggaggagcggcccagagcgcgcagctagggcactggcgaaaccccgggacagtccctctccgtgcgggggcggcgcagagcagtcccatccccggggtcccgggcgcggctgactgccggctggttccctgcgcgcagtagctccccgagccgggctgcaccggaggcggcgagatggtcgcgcgcgtcggcctcctgctgcgcgccctgcagctgctactgtggggccacctggacgcccagcccgcggagcgcggaggccaggagctgcgcaaggaggcggaggcattcctagagaagtacggatacctcaatgaacaggtccccaaagctcccacctccactcgattcagcgatgccatcagagcgtttcagtgggtgtcccagctacctgtcagcggcgtgttggaccgcgccaccctgcgccagatgactcgtccccgctgcggggttacagataccaacagttatgcggcctgggctgagaggatcagtgacttgtttgctagacaccggaccaaaatgaggcgtaagaaacgctttgcaaagcaaggtaacaaatggtacaagcagcacctctcctaccgcctggtgaactggcctgagcatctgccggagccggcagttcggggcgccgtgcgcgccgccttccagttgtggagcaacgtctcagcgctggagttctgggaggccccagccacaggccccgctgacatccggctcaccttcttccaaggggaccacaacgatgggctgggcaatgcctttgatggcccagggggcgccctggcgcacgccttcctgccccgccgcggcgaagcgcacttcgaccaagatgagcgctggtccctgagccgccgccgcgggcgcaacctgttcgtggtgctggcgcacgagatcggtcacacgcttggcctcacccactcgcccgcgccgcgcgcgctcatggcgccctactacaagaggctgggccgcgacgcgctgctcagctgggacgacgtgctggccgtgcagagcctgtatgggaagcccctagggggctcagtggccgtccagctcccaggaaagctgttcactgactttgagacctgggactcctacagcccccaaggaaggcgccctgaaacgcagggccctaaatactgccactcttccttcgatgccatcactgtagggagccatttctgggaggtggcagctgatggcaacgtctcagagccccgtccactgcaggaaagatgggtcgggctgccccccaacattgaggctgcggcagtgtcattgaatgatggagatttctacttcttcaaagggggtcgatgctggaggttccggggccccaagccagtgtggggtctcccacagctgtgccgggcagggggcctgccccgccatcctgacgccgccctcttcttccctcctctgcgccgcctcatcctcttcaagggtgcccgctactacgtgctggcccgagggggactgcaagtggagccctactacccccgaagtctgcaggactggggaggcatccctgaggaggtcagcggcgccctgccgaggcccgatggctccatcatcttcttccgagatgaccgctactggcgcctcgaccaggccaaactgcaggcaaccacctcgggccgctgggccaccgagctgccctggatgggctgctggcatgccaactcggggagcgccctgttctgaaggcacctcctcacctcagaaactggtggtgctctcagggcaaaatcatgttccccacccccggggcagaacccctcttagaagcctctgagtccctctgcagaagaccgggcagcaaagcctccatctggaagtctgtctgcctttgttccttgaagaatgcagcattgtctttgtctgtccccaccacatggaggtgggggtgggatcaatcttaggaaaagcaaaaaagggtcccagatcccttggccctttcctccgaggacttctatcctccccaggcctttgtttcttcggctaaagcctgaggacaaagttctgggagatcggcattgactatgtaagtaacaacaacggcctaaagaagcaacaagaaaggaaccgagtgcctggagaacttcatggagcagagccacttgcctactttggatcatctgtctctaagagagggaaataaacatttcttttgtgtg

SEQ ID NO: 151932 - DNA, 436 bp, Homo sapiens
  Payload ID: 9908
  Gene Symbol: MMP28
  Gene Name: matrix metallopeptidase 28
  ENST ID: ENST00000615317
  CDS Start-End: 1-270
gactttgagacctgggactcctacagcccccaaggaaggcgccctgaaacgcagggccctaaatactgccactcttccttcgatgccatcactgtagacaggcaacagcaactgtacatttttaaagggagccatttctgggaggtggcagctgatggcaacgtctcagagccccgtccactgcaggaaagatgggtcgggctgccccccaacattgaggctgcggcagtgtcattgaatgatggagatttctacttcttcaaagcctgaggacaaagttctgggagatcggcattgactatgtaagtaacaacaacggcctaaagaagcaacaagaaaggaaccgagtgcctggagaacttcatggagcagagccacttgcctactttggatcatctgtctctaagagagggaaataaacatttcttttgtgtga

SEQ ID NO: 151933 - DNA, 2033 bp, Homo sapiens; identical to SEQ ID NO: 151930
  Payload ID: 9908
  Gene Symbol: MMP28
  Gene Name: matrix metallopeptidase 28
  ENST ID: ENST00000615136
  CDS Start-End: 248-1429

SEQ ID NO: 151934 - DNA, 1092 bp, Homo sapiens
  Payload ID: 9908
  Gene Symbol: MMP28
  Gene Name: matrix metallopeptidase 28
  Uniprot ID: Q9H239
  ENST ID: ENST00000612672
  CDS Start-End: 331-723
agcagcggcgcggggtgggtggggcgggagtgccgggcctccgccccctccgcctgcctttccttcctccctccctcggtccccggggccggcggacccgcgggcaggcactgcccgggctggacgacgtctggccggctcccggcgaagggcagcggaggagcggcccagagcgcgcagctagggcactggcgaaaccccgggacagtccctctccgtgcgggggcggcgcagagcagtcccatccccggggtcccgggcgcggctgactgccggctggttccctgcgcgcagtagctccccgagccgggctgcaccggaggcggcgagatggtcgcgcgcgtcggcctcctgctgcgcgccctgcagctgctactgtggggccacctggacgcccagcccgcggagcgcggaggccaggagctgcgcaaggaggcggaggcattcctagagaagtacggatacctcaatgaacaggtccccaaagctcccacctccactcgattcagcgatgccatcagagcgtttcagtgggtgtcccagctacctgtcagcggcgtgttggaccgcgccaccctgcgccagatgactcgtccccgctgcggggttacagataccaacagttatgcggcctgggctgagaggatcagtgacttgtttgctagacaccggaccaaaatgaggcgtaagaaacgctttgcaaagcaaggtgagcactgttaaaatccggctaggccaagatttcccaatgtcttgaagccaatggctaggaaaacagctgagcctgggactggactttgtcagtaacctctcttccctagggcacgggaggagtgggtgaataggacctcttggcttgaggaccatgattgtgaatacagacatttaattcagaatgacacctacattgatgaattttcattgtacaagtgtttttccagatcaaacacaaaacccatgtaattccttgataaattttcaatgcagggcagataaactgttgctaacatttttcatttatatttactgaagttattttcatcagaattcattctttttcataagttattaaacaaatgtgtgatctattga

SEQ ID NO: 151935 - DNA, 2460 bp, Homo sapiens
  Payload ID: 9908
  Gene Symbol: MMP28
  Gene Name: matrix metallopeptidase 28
  Uniprot ID: Q9H239
  ENST ID: ENST00000611911
  CDS Start-End: 271-1833
tccttcctccctccctcggtccccggggccggcggacccgcgggcaggcactgcccgggctggacgacgtctggccggctcccggcgaagggcagcggaggagcggcccagagcgcgcagctagggcactggcgaaaccccgggacagtccctctccgtgcgggggcggcgcagagcagtcccatccccggggtcccgggcgcggctgactgccggctggttccctgcgcgcagtagctccccgagccgggctgcaccggaggcggcgagatggtcgcgcgcgtcggcctcctgctgcgcgccctgcagctgctactgtggggccacctggacgcccagcccgcggagcgcggaggccaggagctgcgcaaggaggcggaggcattcctagagaagtacggatacctcaatgaacaggtccccaaagctcccacctccactcgattcagcgatgccatcagagcgtttcagtgggtgtcccagctacctgtcagcggcgtgttggaccgcgccaccctgcgccagatgactcgtccccgctgcggggttacagataccaacagttatgcggcctgggctgagaggatcagtgacttgtttgctagacaccggaccaaaatgaggcgtaagaaacgctttgcaaagcaaggtaacaaatggtacaagcagcacctctcctaccgcctggtgaactggcctgagcatctgccggagccggcagttcggggcgccgtgcgcgccgccttccagttgtggagcaacgtctcagcgctggagttctgggaggccccagccacaggccccgctgacatccggctcaccttcttccaaggggaccacaacgatgggctgggcaatgcctttgatggcccagggggcgccctggcgcacgccttcctgccccgccgcggcgaagcgcacttcgaccaagatgagcgctggtccctgagccgccgccgcgggcgcaacctgttcgtggtgctggcgcacgagatcggtcacacgcttggcctcacccactcgcccgcgccgcgcgcgctcatggcgccctactacaagaggctgggccgcgacgcgctgctcagctgggacgacgtgctggccgtgcagagcctgtatgggaagcccctagggggctcagtggccgtccagctcccaggaaagctgttcactgactttgagacctgggactcctacagcccccaaggaaggcgccctgaaacgcagggccctaaatactgccactcttccttcgatgccatcactgtagacaggcaacagcaactgtacatttttaaagggagccatttctgggaggtggcagctgatggcaacgtctcagagccccgtccactgcaggaaagatgggtcgggctgccccccaacattgaggctgcggcagtgtcattgaatgatggagatttctacttcttcaaagggggtcgatgctggaggttccggggccccaagccagtgtggggtctcccacagctgtgccgggcagggggcctgccccgccatcctgacgccgccctcttcttccctcctctgcgccgcctcatcctcttcaagggtgcccgctactacgtgctggcccgagggggactgcaagtggagccctactacccccgaagtctgcaggactggggaggcatccctgaggaggtcagcggcgccctgccgaggcccgatggctccatcatcttcttccgagatgaccgctactggcgcctcgaccaggccaaactgcaggcaaccacctcgggccgctgggccaccgagctgccctggatgggctgctggcatgccaactcggggagcgccctgttctgaaggcacctcctcacctcagaaactggtggtgctctcagggcaaaatcatgttccccacccccggggcagaacccctcttagaagcctctgagtccctctgcagaagaccgggcagcaaagcctccatctggaagtctgtctgcctttgttccttgaagaatgcagcattgtctttgtctgtccccaccacatggaggtgggggtgggatcaatcttaggaaaagcaaaaaagggtcccagatcccttggccctttcctccgaggacttctatcctccccaggcctttgtttcttcggctaaaggtacagttcctttcaagaggtaacagcactgggatccaagcagggggatgaaaaactcagcagagaaattcgagaccattttgcaagactgtgcccttctcctcaggaccccctggctcagttcttgaaaaacggtgtcatatttagtcagaggccccacccccaggaagcatggatggggatgaaggcacaggcgtctccaacctcagaggccctttgtggggtcaggacacagagtgggagggagactgatgcaggcctaccagtccctggctttttgtctggggctggaataaagaggtgccttcagctggtgggccgaga

SEQ ID NO: 151936 - DNA, 567 bp, Homo sapiens
  Payload ID: 9908
  Gene Symbol: MMP28
  Gene Name: matrix metallopeptidase 28
  ENST ID: ENST00000612292
  CDS Start-End: 1-567
aagtacggatacctcaatgaacaggtccccaaagctcccacctccactcgattcagcgatgccatcagagcgtttcagtgggtgtcccagctacctgtcagcggcgtgttggaccgcgccaccctgcgccagatgactcgtccccgctgcggggttacagataccaacagttatgcggcctgggctgagaggatcagtgacttgtttgctagacaccggaccaaaatgaggcgtaagaaacgctttgcaaagcaagggggcgccctggcgcacgccttcctgccccgccgcggcgaagcgcacttcgaccaagatgagcgctggtccctgagccgccgccgcgggcgcaacctgttcgtggtgctggcgcacgagatcggtcacacgcttggcctcacccactcgcccgcgccgcgcgcgctcatggcgccctactacaagaggctgggccgcgacgcgctgctcagctgggacgacgtgctggccgtgcagagcctgtatgggaagcccctagggggctcagtggccgtccagctcccaggaaagctgttcactgactttgagacc

SEQ ID NO: 151937 - DNA, 265 bp, Homo sapiens
  Payload ID: 9908
  Gene Symbol: MMP28
  Gene Name: matrix metallopeptidase 28
  ENST ID: ENST00000632913
  CDS Start-End: 1-265
gactttgagacctgggactcctacagcccccaaggaaggcgccctgaaacgcagggccctaaatactgccactcttccttcgatgccatcactgtagacaggcaacagcaactgtacatttttaaagggagccatttctgggaggtggcagctgatggcaacgtctcagagccccgtccactgcaggaaagatgggtcgggctgccccccaacattgaggctgcggcagtgtcattgaatgatggagatttctacttcttcaaag

SEQ ID NO: 151938 - DNA, 567 bp, Homo sapiens; identical to SEQ ID NO: 151936
  Payload ID: 9908
  Gene Symbol: MMP28
  Gene Name: matrix metallopeptidase 28
  ENST ID: ENST00000634159
  CDS Start-End: 1-567

SEQ ID NO: 151939 - DNA, 1092 bp, Homo sapiens; identical to SEQ ID NO: 151934
  Payload ID: 9908
  Gene Symbol: MMP28
  Gene Name: matrix metallopeptidase 28
  Uniprot ID: Q9H239
  ENST ID: ENST00000632360
  CDS Start-End: 331-723

SEQ ID NO: 151940 - DNA, 2166 bp, Homo sapiens
  Payload ID: 9908
  Gene Symbol: MMP28
  Gene Name: matrix metallopeptidase 28
  ENST ID: ENST00000631999
  CDS Start-End: 331-1863
agcagcggcgcggggtgggtggggcgggagtgccgggcctccgccccctccgcctgcctttccttcctccctccctcggtccccggggccggcggacccgcgggcaggcactgcccgggctggacgacgtctggccggctcccggcgaagggcagcggaggagcggcccagagcgcgcagctagggcactggcgaaaccccgggacagtccctctccgtgcgggggcggcgcagagcagtcccatccccggggtcccgggcgcggctgactgccggctggttccctgcgcgcagtagctccccgagccgggctgcaccggaggcggcgagatggtcgcgcgcgtcggcctcctgctgcgcgccctgcagctgctactgtggggccacctggacgcccagcccgcggagcgcggaggccaggagctgcgcaaggaggcggaggcattcctagagaagtacggatacctcaatgaacaggtccccaaagctcccacctccactcgattcagcgatgccatcagagcgtttcagtgggtgtcccagctacctgtcagcggcgtgttggaccgcgccaccctgcgccagatgactcgtccccgctgcggggttacagataccaacagttatgcggcctgggctgagaggatcagtgacttgtttgctagacaccggaccaaaatgaggcgtaagaaacgctttgcaaagcaaggtaacaaatggtacaagcagcacctctcctaccgcctggtgaactggcctgagcatctgccggagccggcagttcggggcgccgtgcgcgccgccttccagttgtggagcaacgtctcagcgctggagttctgggaggccccagccacaggccccgctgacatccggctcaccttcttccaaggggaccacaacgatgggctgggcaatgcctttgatggcccagggggcgccctggcgcacgccttcctgccccgccgcggcgaagcgcacttcgaccaagatgagcgctggtccctgagccgccgccgcgggcgcaacctgttcgtggtgctggcgcacgagatcggtcacacgcttggcctcacccactcgcccgcgccgcgcgcgctcatggcgccctactacaagaggctgggccgcgacgcgctgctcagctgggacgacgtgctggccgtgcagagcctgtatgggaagcccctagggggctcagtggccgtccagctcccaggaaagctgttcactgactttgagacctgggactcctacagcccccaaggaaggcgccctgaaacgcagggccctaaatactgccactcttccttcgatgccatcactgtagggagccatttctgggaggtggcagctgatggcaacgtctcagagccccgtccactgcaggaaagatgggtcgggctgccccccaacattgaggctgcggcagtgtcattgaatgatggagatttctacttcttcaaagggggtcgatgctggaggttccggggccccaagccagtgtggggtctcccacagctgtgccgggcagggggcctgccccgccatcctgacgccgccctcttcttccctcctctgcgccgcctcatcctcttcaagggtgcccgctactacgtgctggcccgagggggactgcaagtggagccctactacccccgaagtctgcaggactggggaggcatccctgaggaggtcagcggcgccctgccgaggcccgatggctccatcatcttcttccgagatgaccgctactggcgcctcgaccaggccaaactgcaggcaaccacctcgggccgctgggccaccgagctgccctggatgggctgctggcatgccaactcggggagcgccctgttctgaaggcacctcctcacctcagaaactggtggtgctctcagggcaaaatcatgttccccacccccggggcagaacccctcttagaagcctctgagtccctctgcagaagaccgggcagcaaagcctccatctggaagtctgtctgcctttgttccttgaagaatgcagcattgtctttgtctgtccccaccacatggaggtgggggtgggatcaatcttaggaaaagcaaaaaagggtcccagatcccttggccctttcctccgaggacttctatcctccccaggcctttgtttcttcggctaaag

SEQ ID NO: 151941 - DNA, 2016 bp, Homo sapiens
  Payload ID: 9909
  Gene Symbol: MMP3
  Gene Name: matrix metallopeptidase 3
  Uniprot ID: P08254
  ENST ID: ENST00000299855
  CDS Start-End: 258-1691
aatcactgtgttgccttgcaaaattgggaaggttgagagaaattagtaaagtaggttgtatcatcctactttgaatttggaatgtttggaaatggtcctgctgccatttggatgaaagcaaggatgagtcaagctgcgggtgatccaaacaaacactgtcactctttaaaagctgcgctcccgaggttggacctacaaggaggcaggcaagacagcaaggcatagagacaacatagagctaagtaaagccagtggaaatgaagagtcttccaatcctactgttgctgtgcgtggcagtttgctcagcctatccattggatggagctgcaaggggtgaggacaccagcatgaaccttgttcagaaatatctagaaaactactacgacctcaaaaaagatgtgaaacagtttgttaggagaaaggacagtggtcctgttgttaaaaaaatccgagaaatgcagaagttccttggattggaggtgacggggaagctggactccgacactctggaggtgatgcgcaagcccaggtgtggagttcctgatgttggtcacttcagaacctttcctggcatcccgaagtggaggaaaacccaccttacatacaggattgtgaattatacaccagatttgccaaaagatgctgttgattctgctgttgagaaagctctgaaagtctgggaagaggtgactccactcacattctccaggctgtatgaaggagaggctgatataatgatctcttttgcagttagagaacatggagacttttacccttttgatggacctggaaatgttttggcccatgcctatgcccctgggccagggattaatggagatgcccactttgatgatgatgaacaatggacaaaggatacaacagggaccaatttatttctcgttgctgctcatgaaattggccactccctgggtctctttcactcagccaacactgaagctttgatgtacccactctatcactcactcacagacctgactcggttccgcctgtctcaagatgatataaatggcattcagtccctctatggacctccccctgactcccctgagacccccctggtacccacggaacctgtccctccagaacctgggacgccagccaactgtgatcctgctttgtcctttgatgctgtcagcactctgaggggagaaatcctgatctttaaagacaggcacttttggcgcaaatccctcaggaagcttgaacctgaattgcatttgatctcttcattttggccatctcttccttcaggcgtggatgccgcatatgaagttactagcaaggacctcgttttcatttttaaaggaaatcaattctgggctatcagaggaaatgaggtacgagctggatacccaagaggcatccacaccctaggtttccctccaaccgtgaggaaaatcgatgcagccatttctgataaggaaaagaacaaaacatatttctttgtagaggacaaatactggagatttgatgagaagagaaattccatggagccaggctttcccaagcaaatagctgaagactttccagggattgactcaaagattgatgctgtttttgaagaatttgggttcttttatttctttactggatcttcacagttggagtttgacccaaatgcaaagaaagtgacacacactttgaagagtaacagctggcttaattgttgaaagagatatgtagaaggcacaatatgggcactttaaatgaagctaataattcttcacctaagtctctgtgaattgaaatgttcgttttctcctgcctgtgctgtgactcgagtcacactcaagggaacttgagcgtgaatctgtatcttgccggtcatttttatgttattacagggcattcaaatgggctgctgcttagcttgcaccttgtcacatagagtgatctttcccaagagaaggggaagcactcgtgtgcaacagacaagtgactgtatctgtgtagactatttgcttatttaataaagacgatttgtcagttatttta

SEQ ID NO: 151942 - DNA, 296 bp, Homo sapiens
  Payload ID: 9909
  Gene Symbol: MMP3
  Gene Name: matrix metallopeptidase 3
  ENST ID: ENST00000434103
  CDS Start-End: 1-296
gaaatcaattctgggctatcagaggaaatgaggtacgagctggatacccaagaggcatccacaccctaggtttccctccaaccgtgaggaaaatcgatgcagccatttctgataaggaaaagaacaaaacatatttctttgtagaggacaaatactggagatttgatgagaagagaaattccatggagccaggctttcccaagcaaatagctgaagactttccagggattgactcaaagattgatgctgtttttgaagaatttgacagagctggcaccgagtgctgtctccattct

SEQ ID NO: 151943 - DNA, 559 bp, Homo sapiens
  Payload ID: 9909
  Gene Symbol: MMP3
  Gene Name: matrix metallopeptidase 3
  ENST ID: ENST00000524478
  CDS Start-End: 62-190
aaggaggcaggcaagacagcaaggcatagagacaacatagagctaagtaaagccagtggaaatgaagagtcttccaatcctactgttgctgtgcgtggcagtttgctcagcctatccattggatggagctgcaagggaaatatctagaaaactactacgacctcaaaaaagatgtgaaacagtttgttaggagaaaggacagtggtcctgttgttaaaaaaatccgagaaatgcagaagttccttggattggaggtgacggggaagctggactccgacactctggaggtgatgcgcaagcccaggtgtggagttcctgatgttggtcacttcagaacctttcctggcatcccgaagtggaggaaaacccaccttacatacaggattgtgaattatacaccagatttgccaaaagatgctgttgattctgctgttgagaaagctctgaaagtctgggaagaggtgactccactcacattctccaggctgtatgaaggagaggctgatataatgatctcttttgcagttagagaacatggagacttttacccttttgatgg

SEQ ID NO: 151944 - DNA, 1125 bp, Homo sapiens
  Payload ID: 9910
  Gene Symbol: MMP7
  Gene Name: matrix metallopeptidase 7
  Uniprot ID: P09237
  ENST ID: ENST00000260227
  CDS Start-End: 54-857
gaaaacaccaaatcaaccataggtccaagaacaattgtctctggacggcagctatgcgactcaccgtgctgtgtgctgtgtgcctgctgcctggcagcctggccctgccgctgcctcaggaggcgggaggcatgagtgagctacagtgggaacaggctcaggactatctcaagagattttatctctatgactcagaaacaaaaaatgccaacagtttagaagccaaactcaaggagatgcaaaaattctttggcctacctataactggaatgttaaactcccgcgtcatagaaataatgcagaagcccagatgtggagtgccagatgttgcagaatactcactatttccaaatagcccaaaatggacttccaaagtggtcacctacaggatcgtatcatatactcgagacttaccgcatattacagtggatcgattagtgtcaaaggctttaaacatgtggggcaaagagatccccctgcatttcaggaaagttgtatggggaactgctgacatcatgattggctttgcgcgaggagctcatggggactcctacccatttgatgggccaggaaacacgctggctcatgcctttgcgcctgggacaggtctcggaggagatgctcacttcgatgaggatgaacgctggacggatggtagcagtctagggattaacttcctgtatgctgcaactcatgaacttggccattctttgggtatgggacattcctctgatcctaatgcagtgatgtatccaacctatggaaatggagatccccaaaattttaaactttcccaggatgatattaaaggcattcagaaactatatggaaagagaagtaattcaagaaagaaatagaaacttcaggcagaacatccattcattcattcattggattgtatatcattgttgcacaatcagaattgataagcactgttcctccactccatttagcaattatgtcacccttttttattgcagttggtttttgaatgtctttcactccttttaaggataaactcctttatggtgtgactgtgtcttattcatctatacttgcagtgggtagatgtcaataaatgttacatacacaaataaataaaatgtttattccatggtaaattta

SEQ ID NO: 151945 - DNA, 3056 bp, Homo sapiens
  Payload ID: 9911
  Gene Symbol: MMP8
  Gene Name: matrix metallopeptidase 8
  Uniprot ID: P22894
  ENST ID: ENST00000236826
  CDS Start-End: 100-1503
gacacatgatgctgtgaacgtcagggtgctcgccagggaagggccctacccagagggacagaaagaaagccaggaggggtagagtttgaagagaagatcatgttctccctgaagacgcttccatttctgctcttactccatgtgcagatttccaaggcctttcctgtatcttctaaagagaaaaatacaaaaactgttcaggactacctggaaaagttctaccaattaccaagcaaccagtatcagtctacaaggaagaatggcactaatgtgatcgttgaaaagcttaaagaaatgcagcgattttttgggttgaatgtgacggggaagccaaatgaggaaactctggacatgatgaaaaagcctcgctgtggagtgcctgacagtggtggttttatgttaaccccaggaaaccccaagtgggaacgcactaacttgacctacaggattcgaaactataccccacagctgtcagaggctgaggtagaaagagctatcaaggatgcctttgaactctggagtgttgcatcacctctcatcttcaccaggatctcacagggagaggcagatatcaacattgctttttaccaaagagatcacggtgacaattctccatttgatggacccaatggaatccttgctcatgcctttcagccaggccaaggtattggaggagatgctcattttgatgccgaagaaacatggaccaacacctccgcaaattacaacttgtttcttgttgctgctcatgaatttggccattctttggggctcgctcactcctctgaccctggtgccttgatgtatcccaactatgctttcagggaaaccagcaactactcactccctcaagatgacatcgatggcattcaggccatctatggactttcaagcaaccctatccaacctactggaccaagcacacccaaaccctgtgaccccagtttgacatttgatgctatcaccacactccgtggagaaatacttttctttaaagacaggtacttctggagaaggcatcctcagctacaaagagtcgaaatgaattttatttctctattctggccatcccttccaactggtatacaggctgcttatgaagattttgacagagacctcattttcctatttaaaggcaaccaatactgggctctgagtggctatgatattctgcaaggttatcccaaggatatatcaaactatggcttccccagcagcgtccaagcaattgacgcagctgttttctacagaagtaaaacatacttctttgtaaatgaccaattctggagatatgataaccaaagacaattcatggagccaggttatcccaaaagcatatcaggtgcctttccaggaatagagagtaaagttgatgcagttttccagcaagaacatttcttccatgtcttcagtggaccaagatattacgcatttgatcttattgctcagagagttaccagagttgcaagaggcaataaatggcttaactgtagatatggctgaagcaaaatcaaatgtggctgtatccactttcagaatgttgaagggaagttcagcaagcattttcgttacattgtgtcctgcttatacttttctcaatattaagtcattgtttcccatcactgtatccattctacctgtcctccgtgaaaatatgtttggaatattccactatttgcagaggcttattcagttcttacacattccatcttacattagtgattccatcaaagagaaggaaagtaagcctttttgtcacctcaatatttactatttcaatacttacatatctgacttctaggatttattgttatattacttgcctatctgacttcatacatccctcagtttcttaaaatgtcctatgtatatcttctacatgcaatttagaactagattttggttagaagtaaggattataaacaacctagacagtacccttggcctttacagaaaatatggtgctgttttctacccttggaaagaaatgtagatgatatgtttcgtgggttgaattgtgtcccccataaaagatatgttgaagttctaaccccaggtacccatgaatgtgagcttaccagggtctttgcagatgtaattagttaagttaaggtgagatcacactgaattagggtgggctctaaatccattatgactgttgttcttataagaagaagagaggcatagtcacctaggggaggaggccgtatgaagacagaggcagagattggagtgacgcatctccaagccaaggaattccaaggactgtaagccaccagtagaagctttgaagaggcaaggaaggattccctccaatagccttcaagtgtgaccctgctgacacctgcagaattcggacttctatcctccaaaaccgtgagggaataaatttcctttgttttaagccaccaactttgcaatactttgttacagcaaccctagacatgaggtactagacacagtacatctacacatatgaaaatgaatcaacacagaatgcagaagtagaacccttgctaaggactactgggcatcttcccaggacagcagccaaaagagaaccaccacttcctctcctgcctcctccttgctctctcctagagtccaaacccaaatgggccagttggatctgatgttcgtcagttctttacttctatttcctggggtactcaggagggcacacactatagataacttgggttagctgcataaaattcaatgtctcattaagttgcattaaactgagcttagatgtgtaagtttgctaacggatgggtttttttgttaagaactataggatttatgggaccaagtctagcgagtccagatatcaaaatcattataatgttatatttgctgttattagaatataatatagcttattatacaataaatatgtagactgtaaaatatatttctcactagtacctcctattttctttctctgttgaagtttttaaatcccacagataattaaattggcacctttatgcttgttcaaaaattaaaataatctattaaataagttcaaattaaagatttttacttcaaatgac

SEQ ID NO: 151946 - DNA, 1394 bp, Homo sapiens
  Payload ID: 9911
  Gene Symbol: MMP8
  Gene Name: matrix metallopeptidase 8
  ENST ID: ENST00000438475
  CDS Start-End: 1-1033
taaagagaaaaatacaaaaactgttcaggactacctggaaaagttctaccaattaccaagcaaccagtatcagtctacaaggaagaatggcactaatgtgatcgttgaaaagcttaaagaaatgcagcgattttttgggttgaatgtgacggggaagccaaatgaggaaactctggacatgatgaaaaagcctcgctgtggagtgcctgacagtggtggttttatgttaaccccaggaaaccccaagtgggaacgcactaacttgacctacaggattcgaaactataccccacagctgtcagaggctgaggtagaaagagctatcaaggatgcctttgaactctggagtgttgcatcacctctcatcttcaccaggatctcacagggagaggcagatatcaacattgctttttaccaaagagatcacggtgacaattctccatttgatggacccaatggaatccttgctcatgcctttcagccaggccaaggtattggaggagatgctcattttgatgccgaagaaacatggaccaacacctccgcaaattacaacttgtttcttgttgctgctcatgaatttggccattctttggggctcgctcactcctctgaccctggtgccttgatgtatcccaactatgctttcagggaaaccagcaactactcactccctcaagatgacatcgatggcattcaggccatctatggactttcaagcaaccctatccaacctactggaccaagcacacccaaaccctgtgaccccagtttgacatttgatgctatcaccacactccgtggagaaatacttttctttaaagacaggtacttctggagaaggcatcctcagctacaaagagtcgaaatgaattttatttctctattctggccatcccttccaactggtatacaggctgcttatgaagattttgacagagacctcattttcctatttaaagatatgataaccaaagacaattcatggagccaggttatcccaaaagcatatcaggtgcctttccaggaatagagagtaaagttgatgcagttttccagcaagaacatttcttccatgtcttcagtggaccaagatattacgcatttgatcttattgctcagagagttaccagagttgcaagaggcaataaatggcttaactgtagatatggctgaagcaaaatcaaatgtggctgtatccactttcagaatgttgaagggaagttcagcaagcattttcgttacattgtgtcctgcttatacttttctcaatattaagtcattgtttcccatcactgtatccattctacctgtcctccgtgaaaatatgtttggaatattccactatttgcagaggcttattcagttcttacacattccatcttacattagtg

SEQ ID NO: 151947 - DNA, 2423 bp, Homo sapiens
  Payload ID: 9911
  Gene Symbol: MMP8
  Gene Name: matrix metallopeptidase 8
  ENST ID: ENST00000528662
  CDS Start-End: 216-326
gtaaatgactgatttgatttttgggggagagagcctgagagaactcagtcccagggaccagaagcagcaattgtttaagacatggctttaaagaggactgcaagagagctgtgagtgacacatgatgctgtgaacgtcagggtgctcgccagggaagggccctacccagagggacagaaagaaagccaggaggggtagagtttgaagagaagatcatgttctccctgaagacgcttccatttctgctcttactccatgtgcagatttccaaggcctttcctgtatcttctaaagagaaaaatacaaaaactgttcagaataaataagccttttctacagtagtgaagaggataaaaaagaggaactgcactgatgcaacaaatacctcaagagaagtcaattaatgactacctggaaaagttctaccaattaccaagcaaccagtatcagtctacaaggaagaatggcactaatgtgatcgttgaaaagcttaaagaaatgcagcgattttttgggttgaatgtgacggggaagccaaatgaggaaactctggacatgatgaaaaagcctcgctgtggagtgcctgacagtggtggttttatgttaaccccaggaaaccccaagtgggaacgcactaacttgacctacaggattcgaaactataccccacagctgtcagaggctgaggtagaaagagctatcaaggatgcctttgaactctggagtgttgcatcacctctcatcttcaccaggatctcacagggagaggcagatatcaacattgctttttaccaaagagatcacggtgacaattctccatttgatggacccaatggaatccttgctcatgcctttcagccaggccaaggtattggaggagatgctcattttgatgccgaagaaacatggaccaacacctccgcaaattacaacttgtttcttgttgctgctcatgaatttggccattctttggggctcgctcactcctctgaccctggtgccttgatgtatcccaactatgctttcagggaaaccagcaactactcactccctcaagatgacatcgatggcattcaggccatctatggactttcaagcaaccctatccaacctactggaccaagcacacccaaaccctgtgaccccagtttgacatttgatgctatcaccacactccgtggagaaatacttttctttaaagacaggtacttctggagaaggcatcctcagctacaaagagtcgaaatgaattttatttctctattctggccatcccttccaactggtatacaggctgcttatgaagattttgacagagacctcattttcctatttaaaggcaaccaatactgggctctgagtggctatgatattctgcaaggttatcccaaggatatatcaaactatggcttccccagcagcgtccaagcaattgacgcagctgttttctacagaagtaaaacatacttctttgtaaatgaccaattctggagatatgataaccaaagacaattcatggagccaggttatcccaaaagcatatcaggtgcctttccaggaatagagagtaaagttgatgcagttttccagcaagaacatttcttccatgtcttcagtggaccaagatattacgcatttgatcttattgctcagagagttaccagagttgcaagaggcaataaatggcttaactgtagatatggctgaagcaaaatcaaatgtggctgtatccactttcagaatgttgaagggaagttcagcaagcattttcgttacattgtgtcctgcttatacttttctcaatattaagtcattgtttcccatcactgtatccattctacctgtcctccgtgaaaatatgtttggaatattccactatttgcagaggcttattcagttcttacacattccatcttacattagtgattccatcaaagagaaggaaagtaagcctttttgtcacctcaatatttactatttcaatacttacatatctgacttctaggatttattgttatattacttgcctatctgacttcatacatccctcagtttcttaaaatgtcctatgtatatcttctacatgcaatttagaactagattttggttagaagtaaggattataaacaacctagacagtacccttggcctttacagaaaatatggtgctgttttctacccttggaaagaaatgtagatgatatgtttcgtgggttgaattgtgtcccccataaaagatatgttgaagttctaaccccaggtacccatgaatgtgagcttaccagggtctttgcagatgtaattagttaagttaaggtgagatcacactgaattagggtgggctctaaatccattatgactgttgttcttataagaagaagagaggcatagtcacctaggggaggaggccgtatgaagacaga

SEQ ID NO: 151948 - DNA, 598 bp, Homo sapiens
  Payload ID: 9911
  Gene Symbol: MMP8
  Gene Name: matrix metallopeptidase 8
  ENST ID: ENST00000532799
  CDS Start-End: 100-231
gacacatgatgctgtgaacgtcagggtgctcgccagggaagggccctacccagagggacagaaagaaagccaggaggggtagagtttgaagagaagatcatgttctccctgaagacgcttccatttctgctcttactccatgtgcagatttccaaggcctttcctgtatcttctaaagagaaaaatacaaaaactgttcagagacaaaaatatcttaaatcagataaataatgtggccaagtgctcacagttaattcatggcagagttaagatttgaacccaggcctgtctgattccaaagcgtgtgatctgcacaaggccatctcagaagccaaccagatgcagccacctgatcttggacttcccagcctccagaattaataaataagccttttctacagtagtgaagaggataaaaaagaggaactgcactgatgcaacaaatacctcaagagaagtcaattaatgactacctggaaaagttctaccaattaccaagcaaccagtatcagtctacaaggaagaatggcactaatgtgatcgttgaaaagcttaaagaaatgcagcgattttttgggttgaatgtgacggggaagcc

SEQ ID NO: 151949 - DNA, 528 bp, Homo sapiens
  Payload ID: 9911
  Gene Symbol: MMP8
  Gene Name: matrix metallopeptidase 8
  ENST ID: ENST00000531168
  CDS Start-End: 98-268
cacatgatgctgtgaacgtcagggtgctcgccagggaagggccctacccagagggacagaaagaaagccaggaggggtagagtttgaagagaagatcatgttctccctgaagacgcttccatttctgctcttactccatgtgcagatttccaaggcctttcctgtatcttctaaagagaaaaatacaaaaactgttcagcacaaggccatctcagaagccaaccagatgcagccacctgatcttggacttcccagcctccagaattaataaataagccttttctacagtagtgaagaggataaaaaagaggaactgcactgatgcaacaaatacctcaagagaagtcaattaatgactacctggaaaagttctaccaattaccaagcaaccagtatcagtctacaaggaagaatggcactaatgtgatcgttgaaaagcttaaagaaatgcagcgattttttgggttgaatgtgacggggaagccaaatgaggaaactctggacatgatgaaaaagcctcgctgtgga

SEQ ID NO: 151950 - DNA, 707 bp, Homo sapiens
  Payload ID: 9911
  Gene Symbol: MMP8
  Gene Name: matrix metallopeptidase 8
  ENST ID: ENST00000533258
  CDS Start-End: 87-257
gtgaacgtcagggtgctcgccagggaagggccctacccagagggacagaaagaaagccaggaggggtagagtttgaagagaagatcatgttctccctgaagacgcttccatttctgctcttactccatgtgcagatttccaaggcctttcctgtatcttctaaagagaaaaatacaaaaactgttcagcacaaggccatctcagaagccaaccagatgcagccacctgatcttggacttcccagcctccagaattgactacctggaaaagttctaccaattaccaagcaaccagtatcagtctacaaggaagaatggcactaatgtgatcgttgaaaagcttaaagaaatgcagcgattttttgggttgaatgtgacggggaagccaaatgaggaaactctggacatgatgaaaaagcctcgctgtggagtgcctgacagtggtggttttatgttaaccccaggaaaccccaagtgggaacgcactaacttgacctacaggattcgaaactataccccacagctgtcagaggctgaggtagaaagagctatcaaggatgcctttgaactctggagtgttgcatcacctctcatcttcaccaggatctcacagggagaggcagatatcaacattgctttttaccaaagagatcacggtgacaattctccatttgatggacccaatggaatccttgctcatgcctttca

SEQ ID NO: 151951 - DNA, 2336 bp, Homo sapiens
  Payload ID: 9912
  Gene Symbol: MMP9
  Gene Name: matrix metallopeptidase 9
  Uniprot ID: P14780
  ENST ID: ENST00000372330
  CDS Start-End: 20-2143
agacacctctgccctcaccatgagcctctggcagcccctggtcctggtgctcctggtgctgggctgctgctttgctgcccccagacagcgccagtccacccttgtgctcttccctggagacctgagaaccaatctcaccgacaggcagctggcagaggaatacctgtaccgctatggttacactcgggtggcagagatgcgtggagagtcgaaatctctggggcctgcgctgctgcttctccagaagcaactgtccctgcccgagaccggtgagctggatagcgccacgctgaaggccatgcgaaccccacggtgcggggtcccagacctgggcagattccaaacctttgagggcgacctcaagtggcaccaccacaacatcacctattggatccaaaactactcggaagacttgccgcgggcggtgattgacgacgcctttgcccgcgccttcgcactgtggagcgcggtgacgccgctcaccttcactcgcgtgtacagccgggacgcagacatcgtcatccagtttggtgtcgcggagcacggagacgggtatcccttcgacgggaaggacgggctcctggcacacgcctttcctcctggccccggcattcagggagacgcccatttcgacgatgacgagttgtggtccctgggcaagggcgtcgtggttccaactcggtttggaaacgcagatggcgcggcctgccacttccccttcatcttcgagggccgctcctactctgcctgcaccaccgacggtcgctccgacggcttgccctggtgcagtaccacggccaactacgacaccgacgaccggtttggcttctgccccagcgagagactctacacccaggacggcaatgctgatgggaaaccctgccagtttccattcatcttccaaggccaatcctactccgcctgcaccacggacggtcgctccgacggctaccgctggtgcgccaccaccgccaactacgaccgggacaagctcttcggcttctgcccgacccgagctgactcgacggtgatggggggcaactcggcgggggagctgtgcgtcttccccttcactttcctgggtaaggagtactcgacctgtaccagcgagggccgcggagatgggcgcctctggtgcgctaccacctcgaactttgacagcgacaagaagtggggcttctgcccggaccaaggatacagtttgttcctcgtggcggcgcatgagttcggccacgcgctgggcttagatcattcctcagtgccggaggcgctcatgtaccctatgtaccgcttcactgaggggccccccttgcataaggacgacgtgaatggcatccggcacctctatggtcctcgccctgaacctgagccacggcctccaaccaccaccacaccgcagcccacggctcccccgacggtctgccccaccggaccccccactgtccacccctcagagcgccccacagctggccccacaggtcccccctcagctggccccacaggtccccccactgctggcccttctacggccactactgtgcctttgagtccggtggacgatgcctgcaacgtgaacatcttcgacgccatcgcggagattgggaaccagctgtatttgttcaaggatgggaagtactggcgattctctgagggcagggggagccggccgcagggccccttccttatcgccgacaagtggcccgcgctgccccgcaagctggactcggtctttgaggagcggctctccaagaagcttttcttcttctctgggcgccaggtgtgggtgtacacaggcgcgtcggtgctgggcccgaggcgtctggacaagctgggcctgggagccgacgtggcccaggtgaccggggccctccggagtggcagggggaagatgctgctgttcagcgggcggcgcctctggaggttcgacgtgaaggcgcagatggtggatccccggagcgccagcgaggtggaccggatgttccccggggtgcctttggacacgcacgacgtcttccagtaccgagagaaagcctatttctgccaggaccgcttctactggcgcgtgagttcccggagtgagttgaaccaggtggaccaagtgggctacgtgacctatgacatcctgcagtgccctgaggactagggctcccgtcctgctttggcagtgccatgtaaatccccactgggaccaaccctggggaaggagccagtttgccggatacaaactggtattctgttctggaggaaagggaggagtggaggtgggctgggccctctcttctcacctttgttttttgttggagtgtttctaataaacttggattctctaaccttta

SEQ ID NO: 151952 - DNA, 9793 bp, Homo sapiens
  Payload ID: 9913
  Gene Symbol: MXRA5
  Gene Name: matrix-remodelling associated 5
  Uniprot ID: Q9NR99
  ENST ID: ENST00000217939
  CDS Start-End: 156-8642
gagctgcctcacccccggccccgggaagggcatggccccggcaaactcccggccgtgactcgcgcgccccggctcggtggatgctcccggcgcaccgctcccgtgtgcggcggcttcccaaggacaggtatccgagaatcaggcaccccgacaagatgcccaagcgcgcgcactggggggccctctccgtggtgctgatcctgctttggggccatccgcgagtggcgctggcctgcccgcatccttgtgcctgctacgtccccagcgaggtccactgcacgttccgatccctggcttccgtgcccgctggcattgctaaacacgtggaaagaatcaatttggggtttaatagcatacaggccctgtcagaaacctcatttgcaggactgaccaagttggagctacttatgattcacggcaatgagatcccaagcatccccgatggagctttaagagacctcagctctcttcaggttttcaagttcagctacaacaagctgagagtgatcacaggacagaccctccagggtctctctaacttaatgaggctgcacattgaccacaacaagatcgagtttatccaccctcaagctttcaacggcttaacgtctctgaggctactccatttggaaggaaatctcctccaccagctgcaccccagcaccttctccacgttcacatttttggattatttcagactctccaccataaggcacctctacttagcagagaacatggttagaactcttcctgccagcatgcttcggaacatgccgcttctggagaatctttacttgcagggaaatccgtggacctgcgattgtgagatgagatggtttttggaatgggatgcaaaatccagaggaattctgaagtgtaaaaaggacaaagcttatgaaggcggtcagttgtgtgcaatgtgcttcagtccaaagaagttgtacaaacatgagatacacaagctgaaggacatgacttgtctgaagccttcaatagagtcccctctgagacagaacaggagcaggagtattgaggaggagcaagaacaggaagaggatggtggcagccagctcatcctggagaaattccaactgccccagtggagcatctctttgaatatgaccgacgagcacgggaacatggtgaacttggtctgtgacatcaagaaaccaatggatgtgtacaagattcacttgaaccaaacggatcctccagatattgacataaatgcaacagttgccttggactttgagtgtccaatgacccgagaaaactatgaaaagctatggaaattgatagcatactacagtgaagttcccgtgaagctacacagagagctcatgctcagcaaagaccccagagtcagctaccagtacaggcaggatgctgatgaggaagctctttactacacaggtgtgagagcccagattcttgcagaaccagaatgggtcatgcagccatccatagatatccagctgaaccgacgtcagagtacggccaagaaggtgctactttcctactacacccagtattctcaaacaatatccaccaaagatacaaggcaggctcggggcagaagctgggtaatgattgagcctagtggagctgtgcaaagagatcagactgtcctggaagggggtccatgccagttgagctgcaacgtgaaagcttctgagagtccatctatcttctgggtgcttccagatggctccatcctgaaagcgcccatggatgacccagacagcaagttctccattctcagcagtggctggctgaggatcaagtccatggagccatctgactcaggcttgtaccagtgcattgctcaagtgagggatgaaatggaccgcatggtatatagggtacttgtgcagtctccctccactcagccagccgagaaagacacagtgacaattggcaagaacccaggggagtcggtgacattgccttgcaatgctttagcaatacccgaagcccaccttagctggattcttccaaacagaaggataattaatgatttggctaacacatcacatgtatacatgttgccaaatggaactctttccatcccaaaggtccaagtcagtgacagtggttactacagatgtgtggctgtcaaccagcaaggggcagaccattttacggtgggaatcacagtgaccaagaaagggtctggcttgccatccaaaagaggcagacgcccaggtgcaaaggctctttccagagtcagagaagacatcgtggaggatgaagggggctcgggcatgggagatgaagagaacacttcaaggagacttctgcatccaaaggaccaagaggtgttcctcaaaacaaaggatgatgccatcaatggagacaagaaagccaagaaagggagaagaaagctgaaactctggaagcattcggaaaaagaaccagagaccaatgttgcagaaggtcgcagagtgtttgaatctagacgaaggataaacatggcaaacaaacagattaatccggagcgctgggctgatattttagccaaagtccgtgggaaaaatctccctaagggcacagaagtacccccattgattaaaaccacaagtcctccatccttgagtctagaagtcacaccaccttttcctgctatttctcccccctcagcatctcctgtgcagacagtaaccagtgctgaagaatcctcagcagatgtacctctacttggtgaagaagagcacgttttgggtaccatttcctcagccagcatggggctagaacacaaccacaatggagttattcttgttgaacctgaagtaacaagcacacctctggaggaagttgttgatgacctttccgagaagactgaggagataacttccactgaaggagacctgaaggggacagcagcccctacacttatatctgagccttatgaaccatctcctactctgcacacattagacacagtctatgaaaagcccacccatgaagagacggcaacagagggttggtctgcagcagatgttggatcgtcaccagagcccacatccagtgagtatgagcctccattggatgctgtctccttggctgagtctgagcccatgcaatactttgacccagatttggagactaagtcacaaccagatgaggataagatgaaagaagacacctttgcacaccttactccaacccccaccatctgggttaatgactccagtacatcacagttatttgaggattctactataggggaaccaggtgtcccaggccaatcacatctacaaggactgacagacaacatccaccttgtgaaaagtagtctaagcactcaagacaccttactgattaaaaagggtatgaaagagatgtctcagacactacagggaggaaatatgctagagggagaccccacacactccagaagttctgagagtgagggccaagagagcaaatccatcactttgcctgactccacactgggtataatgagcagtatgtctccagttaagaagcctgcggaaaccacagttggtaccctcctagacaaagacaccacaacagcaacaacaacaccaaggcaaaaagttgctccgtcatccaccatgagcactcacccttctcgaaggagacccaacgggagaaggagattacgccccaacaaattccgccaccggcacaagcaaaccccacccacaacttttgccccatcagagactttttctactcaaccaactcaagcacctgacattaagatttcaagtcaagtggagagttctctggttcctacagcttgggtggataacacagttaatacccccaaacagttggaaatggagaagaatgcagaacccacatccaagggaacaccacggagaaaacacgggaagaggccaaacaaacatcgatataccccttctacagtgagctcaagagcgtccggatccaagcccagcccttctccagaaaataaacatagaaacattgttactcccagttcagaaactatacttttgcctagaactgtttctctgaaaactgagggcccttatgattccttagattacatgacaaccaccagaaaaatatattcatcttaccctaaagtccaagagacacttccagtcacatataaacccacatcagatggaaaagaaattaaggatgatgttgccacaaatgttgacaaacataaaagtgacattttagtcactggtgaatcaattactaatgccataccaacttctcgctccttggtctccactatgggagaatttaaggaagaatcctctcctgtaggctttccaggaactccaacctggaatccctcaaggacggcccagcctgggaggctacagacaggcatacctgttaccacttctggggaaaatcttacagaccctccccttcttaaagagcttgaggatgtggatttcacttccgagtttttgtcctctttgacagtctccacaccatttcaccaggaagaagctggttcttccacaactctctcaagcataaaagtggaggtggcttcaagtcaggcagaaaccaccacccttgatcaagatcatcttgaaaccactgtggctattctcctttctgaaactagaccacagaatcacacccctactgctgcccggatgaaggagccagcatcctcgtccccatccacaattctcatgtctttgggacaaaccaccaccactaagccagcacttcccagtccaagaatatctcaagcatctagagattccaaggaaaatgttttcttgaattatgtggggaatccagaaacagaagcaaccccagtgaacaatgaaggaacacagcatatgtcagggccaaatgaattatcaacaccctcttccgaccaggatgcatttaacttgtctacaaagctggaattggaaaagcaagtatttggtagtaggagtctaccacgtggcccagatagccaacgccaggatggaagagttcatgcttctcatcaactaaccagagtccctgccaaacccatcctaccaacagcaacagtgaggctgcctgaaatgtccacacaaagcgcttccagatactttgtaacttcccagtcacctcgtcactggaccaacaaaccggaaataactacatatccttctggggctttgccagagaacaaacagtttacaactccaagattatcaagtacaacaattcctctcccattgcacatgtccaaacccagcattcctagtaagtttactgaccgaagaactgaccaattcaatggctactccaaagtgtttggaaataacaacatccctgaggcaagaaacccagttggaaagcctcccagtccaagaattcctcattattccaatggaagactccctttctttaccaacaagactctttcttttccacagttgggagtcacccggagaccccagatacccacttctcctgccccagtaatgagagagagaaaagttattccaggttcctacaacaggatacattcccatagcaccttccatctggactttggccctccggcacctccgttgttgcacactccgcagaccacgggatcaccctcaactaacttacagaatatccctatggtctcttccacccagagttctatctcctttataacatcttctgtccagtcctcaggaagcttccaccagagcagctcaaagttctttgcaggaggacctcctgcatccaaattctggtctcttggggaaaagccacaaatcctcaccaagtccccacagactgtgtccgtcaccgctgagacagacactgtgttcccctgtgaggcaacaggaaaaccaaagcctttcgttacttggacaaaggtttccacaggagctcttatgactccgaataccaggatacaacggtttgaggttctcaagaacggtaccttagtgatacggaaggttcaagtacaagatcgaggccagtatatgtgcaccgccagcaacctgcacggcctggacaggatggtggtcttgctttcggtcaccgtgcagcaacctcaaatcctagcctcccactaccaggacgtcactgtctacctgggagacaccattgcaatggagtgtctggccaaagggaccccagccccccaaatttcctggatcttccctgacaggagggtgtggcaaactgtgtcccccgtggagggccgcatcaccctgcacgaaaaccggaccctttccatcaaggaggcgtccttctcagacagaggcgtctataagtgcgtggccagcaatgcagccggggcggacagcctggccatccgcctgcacgtggcggcactgccccccgttatccaccaggagaagctggagaacatctcgctgcccccggggctcagcattcacattcactgcactgccaaggctgcgcccctgcccagcgtgcgctgggtgctcggggacggtacccagatccgcccctcgcagttcctccacgggaacttgtttgttttccccaacgggacgctctacatccgcaacctcgcgcccaaggacagcgggcgctatgagtgcgtggccgccaacctggtaggctccgcgcgcaggacggtgcagctgaacgtgcagcgtgcagcagccaacgcgcgcatcacgggcacctccccgcggaggacggacgtcaggtacggaggaaccctcaagctggactgcagcgcctcgggggacccctggccgcgcatcctctggaggctgccgtccaagaggatgatcgacgcgctcttcagttttgatagcagaatcaaggtgtttgccaatgggaccctggtggtgaaatcagtgacggacaaagatgccggagattacctgtgcgtagctcgaaataaggttggtgatgactacgtggtgctcaaagtggatgtggtgatgaaaccggccaagattgaacacaaggaggagaacgaccacaaagtcttctacgggggtgacctgaaagtggactgtgtggccaccgggcttcccaatcccgagatctcctggagcctcccagacgggagtctggtgaactccttcatgcagtcggatgacagcggtggacgcaccaagcgctatgtcgtcttcaacaatgggacactctactttaacgaagtggggatgagggaggaaggagactacacctgctttgctgaaaatcaggtcgggaaggacgagatgagagtcagagtcaaggtggtgacagcgcccgccaccatccggaacaagacttacttggcggttcaggtgccctatggagacgtggtcactgtagcctgtgaggccaaaggagaacccatgcccaaggtgacttggttgtccccaaccaacaaggtgatccccacctcctctgagaagtatcagatataccaagatggcactctccttattcagaaagcccagcgttctgacagcggcaactacacctgcttggtcaggaacagcgcgggagaggataggaagacggtgtggattcacgtcaacgtccagccacccaagatcaacggtaaccccaaccccatcaccactgtgcgggagatagcagccgggggcagtcggaaactgattgactgcaaagctgaaggcatccccaccccgagggtgttatgggcttttcccgagggtgtggttctgccagctccatactatggaaaccggatcactgtccatggcaacggttccctggacatcaggagtttgaggaagagcgactccgtccagctggtatgcatggcacgcaacgagggaggggaggccaggttgatcctgcagctcactgtcctggagcccatggagaaacccatcttccacgacccgatcagcgagaagatcacggccatggcgggccacaccatcagcctcaactgctctgccgcggggaccccgacacccagcctggtgtgggtccttcccaatggcaccgatctgcagagtggacagcagctgcagcgcttctaccacaaggctgacggcatgctacacattagcggtctctcctcggtggacgccggggcctaccgctgcgtggcccgcaatgccgctggccacacggagaggctggtctccctgaaggtgggactgaagccagaagcaaacaagcagtatcataacctggtcagcatcatcaatggtgagaccctgaagctcccctgcacccctcccggggctgggcagggacgtttctcctggacgctccccaatggcatgcatctggagggcccccaaaccctgggacgcgtttctcttctggacaatggcaccctcacggttcgtgaggcctcggtgtttgacaggggtacctatgtatgcaggatggagacggagtacggcccttcggtcaccagcatccccgtgattgtgatcgcctatcctccccggatcaccagcgagcccaccccggtcatctacacccggcccgggaacaccgtgaaactgaactgcatggctatggggattcccaaagctgacatcacgtgggagttaccggataagtcgcatctgaaggcaggggttcaggctcgtctgtatggaaacagatttcttcacccccagggatcactgaccatccagcatgccacacagagagatgccggcttctacaagtgcatggcaaaaaacattctcggcagtgactccaaaacaacttacatccacgtcttctgaaatgtggattccagaatgattgcttaggaactgacaacaaagcggggtttgtaagggaagccaggttggggaataggagctcttaaataatgtgtcacagtgcatggtggcctctggtgggtttcaagttgaggttgatcttgatctacaattgttgggaaaaggaagcaatgcagacacgagaaggagggctcagccttgctgagacactttcttttgtgtttacatcatgccaggggcttcattcagggtgtctgtgctctgactgcaatttttctttttttgcaaatgccactcgactgccttcataagcgtccataggatatctgaggaacattcatcaaaaataagccatagacatgaacaacacctcactaccccattgaagacgcatcacctagttaacctgctgcagtttttacatgatagactttgttccagattgacaagtcatctttcagttatttcctctgtcacttcaaaactccagcttgcccaataaggatttagaaccagagtgactgatatatatatatattttaattcagagttacatacatacagctaccattttatatgaaaaaagaaaaacatttcttcctggaactcactttttatataatgttttatatatatattttttcctttcaaatcagacgatgagactagaaggagaaatactttctgtcttattaaaattaataaattattggtctttacaagacttggatacattacagcagacatggaaatataattttaaaaaatttctctccaacctccttcaaattcagtcaccactgttatattaccttctccaggaaccctccagtggggaaggctgcgatattagatttccttgtatgcaaagtttttgttgaaagctgtgctcagaggaggtgagaggagaggaaggagaaaactgcatcataactttacagaattgaatctagagtcttccccgaaaagcccagaaacttctctgcagtatctggcttgtccatctggtctaaggtggctgcttcttccccagccatgagtcagtttgtgcccatgaataatacacgacctgttatttccatgactgctttactgtatttttaaggtcaatatactgtacatttgataataaaataatattctcccaaaaa

SEQ ID NO: 151953 - DNA, 5661 bp, Homo sapiens
  Payload ID: 9914
  Gene Symbol: MXRA7
  Gene Name: matrix-remodelling associated 7
  Uniprot ID: P84157
  ENST ID: ENST00000355797
  CDS Start-End: 10-624
cgcggcgcgatggaggcgccggccgagctactggccgcgctgcctgcgctggccaccgcgctggcccttctgctcgcctggctactggtgcggcgtggggcggccgcgagcccggagcctgcccgcgcgcccccggaacccgcgcccccggccgaggccaccggggccccggcgccgtcccgcccctgcgcccccgagccggcggcctcgcccgcggggccggaggagcctggagagcccgcggggctgggggagctcggggagcctgcgggaccgggggagcccgaagggccaggggatcccgcggcggcgccagcggaggcggaggagcaggcggtggaggcgaggcaggaagaggagcaggacttggatggtgagaaggggccatcatcggaagggcctgaggaggaggacggagaaggcttctccttcaaatacagccccgggaagctgaggggaaaccagtacaagaagatgatgaccaaagaggagctggaggaggagcagagagttcagaaggaacagctggctgccatcttcaagctcatgaaagacaacaaggagacgtttggcgagatgtccgacggcgacgtgcaggagcagctccggctctacgacatgtagactgcgcccacgggatgcacagcggccatgcctgatgctgtccccacccttgccccatgcccttgttctttccagacttctgtaggcctaattttcccttataaacatagatgcaggcgtacattctataggtacttgccgagttcttgcagtgtgtatattactttgcaggaatcaaaattgttttattcagaagacaaagtccctgacccctctggtttctgcttgctggtgaggttccagctgttattgggctctgaggccctctcctgatccaaatctttttttgtttgtttgagatggagtctcactctgtctcccaggctggagtgcagtggcgtgatcttggctcactgcaacctccacctccctgattcaagcgactctcctgcctcagcctcccgagtagctgggattgcaggcatgcaccatcacacctggctaattttgtattttcagtagagacagcgttttgccatgctggccaggctcgtctcgaactcctgacctcaggtgatccgcccaccttggcctcccaaagtgctgggattacacgcgtgagccaccatgcccggccaatactacactcttattctgccttacgaggatttctggaagcttctgtaactgtagggaagaaagctgtaggggagcatggtttttttgttttgtttttgtttttgagacgaggtctcactgtcacccaggctggagtgcagtggtgccatcatgactcactgcagccttgacctcccaggcgcacaaaatcctcctctcagcctgagtaactgggactacaggtgtgtaccactacatccagctaaaggagagcgtttttttctttttctttttgagacagagtctcactctggcgcctggtcactgtgcccttcaccttctgggttcaagtgattctcctgcctcagcctccctagtagctgggattacaggcatgcaccaccatacccagctaatttctgtatttttagtagagatggagtttcaccatgttggccaggctggtctcgaactcctgacctcaggtgatccacctgcctcggcctcccaaagtgctaggattacaggcgtgagccaccatgcccagctgggagcgttctttcagcaaaaagtctaattcagagactcaccttccatcctggcactaaacaatagtactagaggtaagatctgccaagaatttctctcacttaagcaggatacttactttaaatataattaggcaagacttatttgagtacttgcctaattgtatttaattagaactatgctggatgctgtagacagaagaaataaaatactcaacttggtccctatcttccagcaggttagaggcctttagggaagaaaagcctgtgtgcagggaaagagaacctcaccagaaagtattcaataaaatgccaaagtgatcttacagaacagtgcctgtgacaccggaggggattgttctgtctttgtgagtgaacatacaatgatggggataactggtcctcataccatgcaggtcccatttctgatcaccccactggcaggacaattcacagttcttgagcaaactgagttagggagggtatgctaacgacagaacctatgcaagttcttagaaatattttttgtttgctgaaataaagctcaatcaacacactaccttaaaaaaaaagtggagcagtggcatttccatgcctcatgctcaccatcatgaggttaacttcccgccgtcgcctcttgcctgccaggggtttttcgggagcccctctctgttccactctgattccttttgtttcttgctgaccattcactctctgtgtctgttgttggatccaaatacgagtgtttttctttctttttgtggtcagtgcttttttccttcttgaaattgttttaatgtgttttgtcaaaagcatttaaccatgttatgatttaagaattctctgttcacttgaggtcaggagttcaagaccagcctggccaatatggcaaaaccctgtctctactacaaatacaaaaattagccaggcgtggtagcgcacgcctgtaatcccagctactcaggagactgaggcaggagaatcgcttgaactcagaaggcggaggttccagtgagccatcgcgccactgcactctagcctgggtgacagagcaagactctgtctcaaaaaaaaaaaaaaaaaaaaaaaaaaattatttgttctgtctcaggtcttagggaccccttacctcagctaatgtctctgtcccctaaatgcacatcggtgggcagggcaaacccgtaggtgcccttatccctcccaaggctgcactgcaaagctcctgtgtttccattgcccactttcttctccctctcctttcttttctgattataccaaacaggaatgactcgtgtacttgagtcaaaatcctgatggcattgggaaaagtaaactgaaggaatttttgtacacttgtaccagctaagatgttctgactgcaacgacagaaaactccagctcaactggcttaaacaagaacagggctctctcacgtgagaagccaagagttagaacaactccaggcccagaatggtcggagctcaagctgcagttctcttagctcagtcttcctcgtactgtgggcttttattggagactagctctcctcatggtggcaagatggctgcaggagttcaggtatctcatccagaagcaagaaaagggcatgtcttgcttgcgtctctaggcgtaagggaactggtccagatgtccccgccccacatcccttcagatcccaattggccagaatatggcacgtgcccatgtttcaaccaatcatgggcaaggacatgggaccagcatgattggcctagacccctggagcctggggctgggcccagcatcccctgaatacatggccatctggaggagaaggtaactgaatttcactggggatctgtgataaaagggagcatgggtgttggggagacacctgttccagttgggtttcctatgaggtccaggacagggcttggtgggcactcggaagccagtgtctgaagtgctcagcatcctcctcttcctcggtggtgggtgtccaccgcccaggccccacccctggccttggacacttcatggaaacactgctgatttgctgtggtgttgggtggctcctatctattccccgtaagtgctggcctctgttgacaccatttctgctacctcatctgagattgttctcatcagctcacagagattcatttcagtgaatgaaccaaatctaagctaaaaagcataaaggagggcagaaagaaacagcagtgtgggagaaagagcgcaaacaccgagagaaagatgtctacctggcagccatgtcagagaatcaccagtatgtatgtcactgccaccaagaacctaagagccacagaggcctacagaagccaatcccaatggaactctctctgggtgtgggggttgagagaacctaaagcattcagctgcacagagcctctttccagcgatgggaaccagtctcaaagcctttacatctctcccctgccctccatcactgctgagaaccctgccccaggctggcctgcctacatgacacaaatagcagtggactgtcactcatcagtatctgcagttctgtttaccaaagcctgcttgctagagacgtttcagggcctccttccctcaaagcgtccactgtacctccatctggatacaattagctggctccccacttcctggactgacggtaaccaccttttccaatgaccctgaagaaaacatgcaatctaagctgctttaagagtaacctacaactgaggacaaattttctatcaactcccagtacccctctctgccgtggctgatttgttactggttttccttttttttttttaatttgaaaatgtaagtaattatactaagaccagatcactctgagattgttttattctaatttgtcctaaggacctgcctgtacttagagcctgatagaaagcccaagttgatctactgggcagctctctgggcctggaaggaagagcacacaacaagacttcaacagtgagcctggctaggtccaggcagaccatgatttctgaaagcaacagtatagtccacatggaatcaggctgctgatgaacagcagcgagaggctgcctctgaatcatatctgcagggtcacctgcgcctggtggaggcccacagtcatccattaggccccagtatcctatgtgggagtatccacgtctagtctctacttctcactgcaggagaggtggcagatgaggaggtttcctactttaaagaaagtagaagttgtttcctttcttccctcctcacagccttgagggggaggttgtgcccagcctgacagcagctgccttgcccaagattacatcctgttctgggggcagcccacctccaaaccaagtcactagtggggtacaaaggcctgccctctctgccaaaaggcaggtgctgatggaccattccagttctagagttcccaaagagacgtctttttggagagcggcagggtaccagaaatccttcactcaggctatagcatggccaccaattataagtaacttgaggcccacccagccaaacatgcctttccgggtctagtgctgggttccagaacaggaagcctggcagattcctactgccacagattctttttactattattattgtcaccttatttttcttttggtggaacccctctagggcttccaccggattctccaccatttacgctatcaattttatcagttttggttttatcgtttcagtgcttctttttgctaacggtagcagccaatatacatcatctctggagacaaatcacgccatagaaaatattgtagttttcctcatttttcttaacgccacagagtcagctgggctgtagtaccagcccggatgtaccagtttactcagccactccccctctcatggacatctgcatggtttccagtcttgcaaattcatacagtgccactacaaataaaaccttgcgcgtatgctgttttca

SEQ ID NO: 151954 - DNA, 1950 bp, Homo sapiens
  Payload ID: 9914
  Gene Symbol: MXRA7
  Gene Name: matrix-remodelling associated 7
  Uniprot ID: P84157
  ENST ID: ENST00000375036
  CDS Start-End: 59-592
ggggcgcggcgggctccctcggggtcccagctggcccgcactcggcggccgcggcgcgatggaggcgccggccgagctactggccgcgctgcctgcgctggccaccgcgctggcccttctgctcgcctggctactggtgcggcgtggggcggccgcgagcccggagcctgcccgcgcgcccccggaacccgcgcccccggccgaggccaccggggccccggcgccgtcccgcccctgcgcccccgagccggcggcctcgcccgcggggccggaggagcctggagagcccgcggggctgggggagctcggggagcctgcgggaccgggggagcccgaagggccaggggatcccgcggcggcgccagcggaggcggaggagcaggcggtggaggcgaggcaggaagaggagcaggacttggatggtgagaaggggccatcatcggaagggcctgaggaggaggacggagaaggcttctccttcaaatacagccccgggaagctgaggggaaaccagtacaagaagatgatgaccaaagaggagctggaggaggagcagaggattgagctgacctctgacctcacttccctgtagcaagttccttaggtcctgagccacaaatattcttgcaaatccttttgaactgaagaataacgaagttatccttagcgtcctcctaaaggcttttccttttggcatcttaaaagcttgagagataaaacggaaaccccagagaggagtctgggcaggctcccagggtgcatgctgcctccataaatctgctgagctctagaccctcaatcaggacttgtcccttggctagcaggatcctgggaacacctttggccctgccctgtgtagagatgttcatgtctgttcctgtgggtcactttgttaagctgaagagttttaagaggtagagctcagaccctggactgggatttttcttaccactcaaacttgctatccacacaccctgcacaccttagataaaaagaacattttaaaagcagagttcactttcactccagtctcccctcttttgccctcactgaagccaaaccacagaagactttgaggaatgagagacaaatgaggtagagctcacctgtgctcaccagctccgtcagggtggtcagccgacccctttccctgggaaccccacttctctctgtggctggcttggttgtcgggggtgagatgccatattgattacagggcagcaaagaaccagtaccaggaatttacttgaccattccccttatttttcatctagaggaatctcggattcagccctttcattgctaagacaccttttcactgaggttcttaccagctcagccaaatctccactctgctatagcagaagcaataatgtttgctttaaaaagatttcttgacctatgccttttcttagaaagtttgatagattagttagaacttcagatcatcagatcagtctcaaatgggtttcttggaattttatatttgacaatatttatactataccaaactcatttgcagttcttaggtttgttggttaaaacatttttttaaagcagtaagtttatagaaaatgttttcatttaatggaaggctggggaatgtccagcatcaacccctatggcatgcattcccaggggccttctcatctgggcctggaacctttggttcagggcttaggggagaacaggccacatggcaacagccacacagtcattgccttcaacacagagccacgtgtccccaaacagcaatagtcatgcccttgtccaggctgggatctaattgacacaataggtcgttgactccctcctagtagagctatctaggtttgtctggaaagtttccgaccctggcttataggcaccacacctcatgtactcctcatggcttggatctctgtattcagcctttgttcagtccaataaactttgagtagatgatctcaa

SEQ ID NO: 151955 - DNA, 1881 bp, Homo sapiens
  Payload ID: 9914
  Gene Symbol: MXRA7
  Gene Name: matrix-remodelling associated 7
  Uniprot ID: P84157
  ENST ID: ENST00000449428
  CDS Start-End: 71-583
gggcgcggcgacggggcgcggcgggctccctcggggtcccagctggcccgcactcggcggccgcggcgcgatggaggcgccggccgagctactggccgcgctgcctgcgctggccaccgcgctggcccttctgctcgcctggctactggtgcggcgtggggcggccgcgagcccggagcctgcccgcgcgcccccggaacccgcgcccccggccgaggccaccggggccccggcgccgtcccgcccctgcgcccccgagccggcggcctcgcccgcggggccggaggagcctggagagcccgcggggctgggggagctcggggagcctgcgggaccgggggagcccgaagggccaggggatcccgcggcggcgccagcggaggcggaggagcaggcggtggaggcgaggcaggaagaggagcaggacttggatggtgagaaggggccatcatcggaagggcctgaggaggaggacggagaaggcttctccttcaaatacagccccgggaagctgaggggaaaccagtacaagaagatgatgaccaaagaggagctggaggaggagcagagaactgaagaataacgaagttatccttagcgtcctcctaaaggcttttccttttggcatcttaaaagcttgagagataaaacggaaaccccagagaggagtctgggcaggctcccagggtgcatgctgcctccataaatctgctgagctctagaccctcaatcaggacttgtcccttggctagcaggatcctgggaacacctttggccctgccctgtgtagagatgttcatgtctgttcctgtgggtcactttgttaagctgaagagttttaagaggtagagctcagaccctggactgggatttttcttaccactcaaacttgctatccacacaccctgcacaccttagataaaaagaacattttaaaagcagagttcactttcactccagtctcccctcttttgccctcactgaagccaaaccacagaagactttgaggaatgagagacaaatgaggtagagctcacctgtgctcaccagctccgtcagggtggtcagccgacccctttccctgggaaccccacttctctctgtggctggcttggttgtcgggggtgagatgccatattgattacagggcagcaaagaaccagtaccaggaatttacttgaccattccccttatttttcatctagaggaatctcggattcagccctttcattgctaagacaccttttcactgaggttcttaccagctcagccaaatctccactctgctatagcagaagcaataatgtttgctttaaaaagatttcttgacctatgccttttcttagaaagtttgatagattagttagaacttcagatcatcagatcagtctcaaatgggtttcttggaattttatatttgacaatatttatactataccaaactcatttgcagttcttaggtttgttggttaaaacatttttttaaagcagtaagtttatagaaaatgttttcatttaatggaaggctggggaatgtccagcatcaacccctatggcatgcattcccaggggccttctcatctgggcctggaacctttggttcagggcttaggggagaacaggccacatggcaacagccacacagtcattgccttcaacacagagccacgtgtccccaaacagcaatagtcatgcccttgtccaggctgggatctaattgacacaataggtcgttgactccctcctagtagagctatctaggtttgtctggaaagtttccgaccctggcttataggcaccacacctcatgtactcctcatggcttggatctctgtattcagcctttgttcagtccaataaactttgagtagatgatctcaa

SEQ ID NO: 151956 - DNA, 3510 bp, Homo sapiens
  Payload ID: 9914
  Gene Symbol: MXRA7
  Gene Name: matrix-remodelling associated 7
  ENST ID: ENST00000592148
  CDS Start-End: 1573-2214
ctgctgacagtttctcgtgggcccttccaaaaaacaaaccttttctctgcattttcgagcacatgcgtgcatttccactttgccatttacagcaagatgactgcgctgctcacgtggggctgctgcttgcatttttccctcgatttatcttgatgtacttttcatgtcagcacctatcaacgcctcctttttttttttttttctttttttaagatgcagtcttgctgtgtcactaggctggagtgcaatggcgcaatcttggcttactgcaacctccacctcccgggttcaagcgattctcctgcctcaacctcctgagtagctgggattaaaggcacctgccacaacactcggctaatttttttttgtatttttagtagagacggggttttgccatgttggccaggctggtctcgaattcccaacctcagctgatccacccacctaggcctcccaaaattctgggattacaggcgtgagcgaccgcacccggtccccagttctgtcttttcaactgcacgcggtcagagtcattatataaaaatcctgatggacatttctccagtctggagcagatccctagaagtgggtttgctgtgtcaaatggagcggctcctcttcctgcccccggaagaggcctgcccactccgacctcagccatagagatactttgctgtgcaaaatttgggaaacgtcaggacacacaggcaccacttcgccatagatagcactaagtctgtgtgtacaaagtgcccaacagggaagacgctgtgttgcctgcgcagctccccccaggcagcattttgtgtagtcaaggaagtccctcaggccaggcacagtggctcactcctgtaatcccaacactctgggaggccgaggcaggcggatcacctgaggtcaggggttcgagaccagcccggccaacatggtgacatgccatctctactgaaaacacaaaaaaattagctgggcttgggtggcgggcgcccgtaatcccagctactcgggaggctgaggcaggagaatcgcttaaacccaggaggcagacgttgcagtgagccgagatcgcgccactgcacgccagcctgggcaacaagagccaaaactctgtctcagaaacacactcagaaaaaaacagaaaccaaacaaacaaaaagtcactcagaggagctcaaggcccctctgggtttgccacttccgacccgctgtggggcttgtaaaaactttgcctcccggcacagctcagtgttttgttagggagcctcccgtgagcggccgacgctggctgggctccatgggatcagctggggctgctcattcattcatttccacatctacccactgggcttccaagttgaagttcctggggctcccatgtcccctccccatgaccttcaatcccacagagcccatgggcacggcacgtcgctctcatcctctgacattcctgcaagctgaagtcacttcttccttccaccaaggccatcccgggccattcctctgatcatctgtttattgtgtctctgtgtgggagagaactggctgaagaggtggggctccagttttgggaacatggacactgagagagttggggatggaaaacaacatagaaggaagcaaagccagaggctgcgatggccatgctgcctggccctggtcccagacagacaccccagccagctttcctcttgcaccctttgtctgctggccgcagcgtcgcagtgggagtcctgggcccacttctccaaatggcacacagaagcctcaacaggcacccacctgggaaaggccaaggccgagggcttggggtgcacagtcaagaacacgcctcagctcagcatttgtgagccgagtcactttggcccatcgtttgtacacagcccccacctgctggttgaccatgaccacagggcaggcgctgccacagggcgtgggcaggctggaccttcgagggcctcctctgtctcccctaccttctgcccccccaccacttcccatcacccagtctgtgccaagggcactgaccctgtccttgtcttgcaggaagaggagcaggacttggatggtgagaaggggccatcatcggaagggcctgaggaggaggacggagaaggcttctccttcaaatacagccccgggaagctgaggggaaaccagtacaagaagatgatgaccaaagaggagctggaggaggagcagagaactgaagaataacgaagttatccttagcgtcctcctaaaggcttttccttttggcatcttaaaagcttgagagataaaacggaaaccccagagaggagtctgggcaggctcccagggtgcatgctgcctccataaatctgctgagctctagaccctcaatcaggacttgtcccttggctagcaggatcctgggaacacctttggccctgccctgtgtagagatgttcatgtctgttcctgtgggtcactttgttaagctgaagagttttaagaggtagagctcagaccctggactgggatttttcttaccactcaaacttgctatccacacaccctgcacaccttagataaaaagaacattttaaaagcagagttcactttcactccagtctcccctcttttgccctcactgaagccaaaccacagaagactttgaggaatgagagacaaatgaggtagagctcacctgtgctcaccagctccgtcagggtggtcagccgacccctttccctgggaaccccacttctctctgtggctggcttggttgtcgggggtgagatgccatattgattacagggcagcaaagaaccagtaccaggaatttacttgaccattccccttatttttcatctagaggaatctcggattcagccctttcattgctaagacaccttttcactgaggttcttaccagctcagccaaatctccactctgctatagcagaagcaataatgtttgctttaaaaagatttcttgacctatgccttttcttagaaagtttgatagattagttagaacttcagatcatcagatcagtctcaaatgggtttcttggaattttatatttgacaatatttatactataccaaactcatttgcagttcttaggtttgttggttaaaacatttttttaaagcagtaagtttatagaaaatgttttcatttaatggaaggctggggaatgtccagcatcaacccctatggcatgcattcccaggggccttctcatctgggcctggaacctttggttcagggcttaggggagaacaggccacatggcaacagccacacagtcattgccttcaacacagagccacgtgtccccaaacagcaatagtcatgcccttgtccaggctgggatctaattgacacaataggtcgttgactccctcctagtagagctatctaggtttgtctggaaagtttccgaccctggcttataggcaccacacctcatgtactcctcatggcttggatctctgtattcagcctttgttcagtccaataaactttgagtagatgatctc

SEQ ID NO: 151957 - DNA, 540 bp, Homo sapiens
  Payload ID: 9914
  Gene Symbol: MXRA7
  Gene Name: matrix-remodelling associated 7
  ENST ID: ENST00000585519
  CDS Start-End: 160-207
attgtgtctctgtgtgggagagaactggctgaagaggaagaggagcaggacttggatggtgagaaggggccatcatcggaagggcctgaggaggaggacggagaaggcttctccttcaaatacagccccgggaagctgaggggaaaccagtacaagaagatgatgaccaaagaggagctggaggaggagcagagaactgaagaataacgaagttatccttagcgtcctcctaaaggcttttccttttggcatcttaaaagcttgagagataaaacggaaaccccagagaggagtctgggcaggctcccagggtgcatgctgcctccataaatctgctgagctctagaccctcaatcaggacttgtcccttggctagcaggatcctgggaacacctttggccctgccctgtgtagagatgttcatgtctgttcctgtgggtcactttgttaagctgaagagttttaagaggtagagctcagaccctggactgggatttttcttaccactcaaacttgctatccacacaccctgcacacctt

SEQ ID NO: 151958 - DNA, 560 bp, Homo sapiens
  Payload ID: 9914
  Gene Symbol: MXRA7
  Gene Name: matrix-remodelling associated 7
  ENST ID: ENST00000589082
  CDS Start-End: 342-410
atctacccactgggcttccaagttgaagttcctggggctcccatgtcccctccccatgaccttcaatcccacagagcccatgggcacggcacgtcgctctcatcctctgacattcctgcaagctgaagtcacttcttccttccaccaaggccatcccgggccattcctctgatcatctgtttattgtgtctctgtgtgggagagaactggctgaagaggaagaggagcaggacttggatggtgagaaggggccatcatcggaagggcctgaggaggaggacggagaaggcttctccttcaaatacagccccgggaagctgaggggaaaccagtacaagaagatgatgaccaaagaggagctggaggaggagcagaggattgagctgacctctgacctcacttccctgtagcaagttccttaggtcctgagccacaaatattcttgcaaatccttttgaactgaagaataacgaagttatccttagcgtcctcctaaaggcttttccttttggcatcttaaaagcttgagagataaaacggaaaccccagagaggagtctg

SEQ ID NO: 151959 - DNA, 521 bp, Homo sapiens
  Payload ID: 9914
  Gene Symbol: MXRA7
  Gene Name: matrix-remodelling associated 7
  ENST ID: ENST00000588114
  CDS Start-End: 224-271
actctgtcctgtgctggacacaatggtttaccctggagagaagcccttcgggggaggaggaggcagccaggctgtgctcagaggcatttctctttgctgagaagaggagcaggacttggatggtgagaaggggccatcatcggaagggcctgaggaggaggacggagaaggcttctccttcaaatacagccccgggaagctgaggggaaaccagtacaagaagatgatgaccaaagaggagctggaggaggagcagagaactgaagaataacgaagttatccttagcgtcctcctaaaggcttttccttttggcatcttaaaagcttgagagataaaacggaaaccccagagaggagtctgggcaggctcccagggtgcatgctgcctccataaatctgctgagctctagaccctcaatcaggacttgtcccttggctagcaggatcctgggaacacctttggccctgccctgtgtagagatgttcatgtctgttcctgtgggtcactttgttaagctgaa

SEQ ID NO: 151960 - DNA, 2273 bp, Homo sapiens
  Payload ID: 9915
  Gene Symbol: MXRA8
  Gene Name: matrix-remodelling associated 8
  Uniprot ID: Q9BRK3
  ENST ID: ENST00000309212
  CDS Start-End: 32-1360
gtgggacaaagcctggggctgggcgggggccatggcgctgccatcccgaatcctgctttggaaacttgtgcttctgcagagctctgctgttctcctgcactcagggtcctcggtacccgccgctgctggcagctccgtggtgtccgagtccgcggtgagctgggaggcgggcgcccgggcggtgctgcgctgccagagcccgcgcatggtgtggacccaggaccggctgcacgaccgccagcgcgtgctccactgggacctgcgcggccccgggggtggccccgcgcggcgcctgctggacttgtactcggcgggcgagcagcgcgtgtacgaggcgcgggaccgcggccgcctggagctctcggcctcggccttcgacgacggcaacttctcgctgctcatccgcgcggtggaggagacggacgcggggctgtacacctgcaacctgcaccatcactactgccacctctacgagagcctggccgtccgcctggaggtcaccgacggccccccggccacccccgcctactgggacggcgagaaggaggtgctggcggtggcgcgcggcgcacccgcgcttctgacctgcgtgaaccgcgggcacgtgtggaccgaccggcacgtggaggaggctcaacaggtggtgcactgggaccggcagccgcccggggtcccgcacgaccgcgcggaccgcctgctggacctctacgcgtcgggcgagcgccgcgcctacgggcccctttttctgcgcgaccgcgtggctgtgggcgcggatgcctttgagcgcggtgacttctcactgcgtatcgagccgctggaggtcgccgacgagggcacctactcctgccacctgcaccaccattactgtggcctgcacgaacgccgcgtcttccacctgacggtcgccgaaccccacgcggagccgcccccccggggctctccgggcaacggctccagccacagcggcgccccaggcccagaccccacactggcgcgcggccacaacgtcatcaatgtcatcgtccccgagagccgagcccacttcttccagcagctgggctacgtgctggccacgctgctgctcttcatcctgctactggtcactgtcctcctggccgcccgcaggcgccgcggaggctacgaatactcggaccagaagtcgggaaagtcaaaggggaaggatgttaacttggcggagttcgctgtggctgcaggggaccagatgctttacaggagtgaggacatccagctagattacaaaaacaacatcctgaaggagagggcggagctggcccacagccccctgcctgccaagtacatcgacctagacaaagggttccggaaggagaactgcaaatagggaggccctgggctcctggctgggccagcagctgcacctctcctgtctgtgctcctcggggcatctcctgatgctccggggctcaccccccttccagcggctggtcccgctttcctggaatttggcctgggcgtatgcagaggccgcctccacacccctctcccaggggcttggtggcagcatagcccccacccctgcggcctttgctcacgggtggccctgcccacccctggcacaaccaaaatcccactgatgcccatcatgccctcagacccttctgggctctgcccgctgggggcctgaagacattcctggaggacactcccatcagaacctggcagccccaaaactggggtcagcctcagggcaggagtcccactcctccagggctctgctcgtcgggggctgggagatgttcctggaggaggacactcccatcagaacttggcagccttgaagttggggtcagcctcggcaggagtcccactcctcctggggtgctgcctgccaccgagagctcccccacctgtaccaccatgtgggactccaggcaccatctgttctccccagggacctgctgacttgaatgccagcccttgctcctctgtgttgctttgggccacctggggctgcaccccttgccctttctctgccccatccctaccctagccttgctctcagccaccttgatagtcactgggctccctgtgacttctgaccctgacacccctcccttggactctgcctgggctggagtctagggctggggctacatttggcttctgtactggctgaggacaggggagggagtgaagttggtttggggtggcctgtgttgccactctcagcaccccacatttgcatctgctggtggacctgccaccatcacaataaagtccccatctgattttta

SEQ ID NO: 151961 - DNA, 2231 bp, Homo sapiens
  Payload ID: 9915
  Gene Symbol: MXRA8
  Gene Name: matrix-remodelling associated 8
  Uniprot ID: Q9BRK3
  ENST ID: ENST00000342753
  CDS Start-End: 291-1316
atgtcctcggaccttcttgtccctccaagggtgcggtcaccacccctccccaggcctgaccggtgaggggctgggcctctgctcccacactgcccctccccagcaggccagcaacgatgggggaggccaaggggcccggcaggagccagagggggcggtccccagaccgtagacaggcccaggcctccgtgatgtcaccgcgggtgctaaggagggggagggggtagggctgtttttctggagagagacttagagccgagtgggacaaagcctggggctgggcgggggccatggcgctgccatcccgaatcctgctttggaaacttgtgcttctgcagagctctgctgttctcctgcactcagcggtggaggagacggacgcggggctgtacacctgcaacctgcaccatcactactgccacctctacgagagcctggccgtccgcctggaggtcaccgacggccccccggccacccccgcctactgggacggcgagaaggaggtgctggcggtggcgcgcggcgcacccgcgcttctgacctgcgtgaaccgcgggcacgtgtggaccgaccggcacgtggaggaggctcaacaggtggtgcactgggaccggcagccgcccggggtcccgcacgaccgcgcggaccgcctgctggacctctacgcgtcgggcgagcgccgcgcctacgggcccctttttctgcgcgaccgcgtggctgtgggcgcggatgcctttgagcgcggtgacttctcactgcgtatcgagccgctggaggtcgccgacgagggcacctactcctgccacctgcaccaccattactgtggcctgcacgaacgccgcgtcttccacctgacggtcgccgaaccccacgcggagccgcccccccggggctctccgggcaacggctccagccacagcggcgccccaggcccagaccccacactggcgcgcggccacaacgtcatcaatgtcatcgtccccgagagccgagcccacttcttccagcagctgggctacgtgctggccacgctgctgctcttcatcctgctactggtcactgtcctcctggccgcccgcaggcgccgcggaggctacgaatactcggaccagaagtcgggaaagtcaaaggggaaggatgttaacttggcggagttcgctgtggctgcaggggaccagatgctttacaggagtgaggacatccagctagattacaaaaacaacatcctgaaggagagggcggagctggcccacagccccctgcctgccaagtacatcgacctagacaaagggttccggaaggagaactgcaaatagggaggccctgggctcctggctgggccagcagctgcacctctcctgtctgtgctcctcggggcatctcctgatgctccggggctcaccccccttccagcggctggtcccgctttcctggaatttggcctgggcgtatgcagaggccgcctccacacccctctcccaggggcttggtggcagcatagcccccacccctgcggcctttgctcacgggtggccctgcccacccctggcacaaccaaaatcccactgatgcccatcatgccctcagacccttctgggctctgcccgctgggggcctgaagacattcctggaggacactcccatcagaacctggcagccccaaaactggggtcagcctcagggcaggagtcccactcctccagggctctgctcgtcgggggctgggagatgttcctggaggaggacactcccatcagaacttggcagccttgaagttggggtcagcctcggcaggagtcccactcctcctggggtgctgcctgccaccgagagctcccccacctgtaccaccatgtgggactccaggcaccatctgttctccccagggacctgctgacttgaatgccagcccttgctcctctgtgttgctttgggccacctggggctgcaccccttgccctttctctgccccatccctaccctagccttgctctcagccaccttgatagtcactgggctccctgtgacttctgaccctgacacccctcccttggactctgcctgggctggagtctagggctggggctacatttggcttctgtactggctgaggacaggggagggagtgaagttggtttggggtggcctgtgttgccactctcagcaccccacatttgcatctgctggtggacctgccaccatcacaataaagtccccatctgatttttaga

SEQ ID NO: 151962 - DNA, 2001 bp, Homo sapiens
  Payload ID: 9915
  Gene Symbol: MXRA8
  Gene Name: matrix-remodelling associated 8
  Uniprot ID: Q9BRK3
  ENST ID: ENST00000445648
  CDS Start-End: 40-1392
agagccgagtgggacaaagcctggggctgggcgggggccatggcgctgccatcccgaatcctgctttggaaacttgtgcttctgcagagctctgctgttctcctgcactcagggtcctcggtacccgccgctgctggcagctccgtggtgtccgagtccgcggtgagctgggaggcgggcgcccgggcggtgctgcgctgccagagcccgcgcatggtgtggacccaggaccggctgcacgaccgccagcgcgtgctccactgggacctgcgcggccccgggggtggccccgcgcggcgcctgctggacttgtactcggcgggcgagcagcgcgtgtacgaggcgcgggaccgcggccgcctggagctctcggcctcggccttcgacgacggcaacttctcgctgctcatccgcgcggtggaggagacggacgcggggctgtacacctgcaacctgcaccatcactactgccacctctacgagagcctggccgtccgcctggaggtcaccgacggccccccggccacccccgcctactgggacggcgagaaggaggtgctggcggtggcgcgcggcgcacccgcgcttctgacctgcgtgaaccgcgggcacgtgtggaccgaccggcacgtggaggaggctcaacaggtggtgcactgggaccggcagccgcccggggtcccgcacgaccgcgcggaccgcctgctggacctctacgcgtcgggcgagcgccgcgcctacgggcccctttttctgcgcgaccgcgtggctgtgggcgcggatgcctttgagcgcggtgacttctcactgcgtatcgagccgctggaggtcgccgacgagggcacctactcctgccacctgcaccaccattactgtggcctgcacgaacgccgcgtcttccacctgacggtcgccgaaccccacgcggagccgcccccccggggctctccgggcaacggctccagccacagcggcgccccaggcccagaccccacactggcgcgcggccacaacgtcatcaatgtcatcgtccccgagagccgagcccacttcttccagcagctgggctacgtgctggccacgctgctgctcttcatcctgctactggtcactgtcctcctggccgcccgcaggcgccgcggaggctacgaatactcggaccagaagtcgggaaagtcaaaggggaaggatgttaacttggcggagttcgctgtggctgcaggggaccagatgctttacaggagtgaggacatccagctagcctcctctcctcccacagattacaaaaacaacatcctgaaggagagggcggagctggcccacagccccctgcctgccaagtacatcgacctagacaaagacccttctgggctctgcccgctgggggcctgaagacattcctggaggacactcccatcagaacctggcagccccaaaactggggtcagcctcagggcaggagtcccactcctccagggctctgctcgtcgggggctgggagatgttcctggaggaggacactcccatcagaacttggcagccttgaagttggggtcagcctcggcaggagtcccactcctcctggggtgctgcctgccaccgagagctcccccacctgtaccaccatgtgggactccaggcaccatctgttctccccagggacctgctgacttgaatgccagcccttgctcctctgtgttgctttgggccacctggggctgcaccccttgccctttctctgccccatccctaccctagccttgctctcagccaccttgatagtcactgggctccctgtgacttctgaccctgacacccctcccttggactctgcctgggctggagtctagggctggggctacatttggcttctgtactggctgaggacaggggagggagtgaagttggtttggggtggcctgtgttgccactctcagcaccccacatttgcatctgctggtggacctgccaccatcacaataaagtccccatctgattttt

SEQ ID NO: 151963 - DNA, 2728 bp, Homo sapiens
  Payload ID: 9915
  Gene Symbol: MXRA8
  Gene Name: matrix-remodelling associated 8
  Uniprot ID: Q9BRK3
  ENST ID: ENST00000477278
  CDS Start-End: 515-1816
aagaaggctggcggtgtttcctcttagaggggagaaactcagcctgggtaggagacccagccccacgcagggaaaactgtgctaacgcttccgatgtgcgtggcaggtgcggcggcggcgaatacggtttgtcctcgagcctaaccctgtctgtgttggtgtcagcagtggcccccctaccacacacacagggtccctggcgtcccaagaccactcctggcagccccgccactggctgcgcctggaagccgcgtcctcaggcctcgcctggcatttgctgtcacagaggttgcttccttgggtccgtccgtcctcgcccctccagcctgggcgccccccgacccctgtctcattccctccaccacatgcagcacagtccaggaggctggggtccaagagggccatggctggcacccggcttagtgctgagtccccagtgcccagcaagcctggcacccaggaggtggtcagcaaacgcttctgaacgacaggaagtgggactcttcagccatcgatgatccgctgtgcggccacaggctctgctgttctcctgcactcagggtcctcggtacccgccgctgctggcagctccgtggtgtccgagtccgcggtgagctgggaggcgggcgcccgggcggtgctgcgctgccagagcccgcgcatggtgtggacccaggaccggctgcacgaccgccagcgcgtgctccactgggacctgcgcggccccgggggtggccccgcgcggcgcctgctggacttgtactcggcgggcgagcagcgcgtgtacgaggcgcgggaccgcggccgcctggagctctcggcctcggccttcgacgacggcaacttctcgctgctcatccgcgcggtggaggagacggacgcggggctgtacacctgcaacctgcaccatcactactgccacctctacgagagcctggccgtccgcctggaggtcaccgacggccccccggccacccccgcctactgggacggcgagaaggaggtgctggcggtggcgcgcggcgcacccgcgcttctgacctgcgtgaaccgcgggcacgtgtggaccgaccggcacgtggaggaggctcaacaggtggtgcactgggaccggcagccgcccggggtcccgcacgaccgcgcggaccgcctgctggacctctacgcgtcgggcgagcgccgcgcctacgggcccctttttctgcgcgaccgcgtggctgtgggcgcggatgcctttgagcgcggtgacttctcactgcgtatcgagccgctggaggtcgccgacgagggcacctactcctgccacctgcaccaccattactgtggcctgcacgaacgccgcgtcttccacctgacggtcgccgaaccccacgcggagccgcccccccggggctctccgggcaacggctccagccacagcggcgccccaggcccagaccccacactggcgcgcggccacaacgtcatcaatgtcatcgtccccgagagccgagcccacttcttccagcagctgggctacgtgctggccacgctgctgctcttcatcctgctactggtcactgtcctcctggccgcccgcaggcgccgcggaggctacgaatactcggaccagaagtcgggaaagtcaaaggggaaggatgttaacttggcggagttcgctgtggctgcaggggaccagatgctttacaggagtgaggacatccagctagattacaaaaacaacatcctgaaggagagggcggagctggcccacagccccctgcctgccaagtacatcgacctagacaaagggttccggaaggagaactgcaaatagggaggccctgggctcctggctgggccagcagctgcacctctcctgtctgtgctcctcggggcatctcctgatgctccggggctcaccccccttccagcggctggtcccgctttcctggaatttggcctgggcgtatgcagaggccgcctccacacccctctcccaggggcttggtggcagcatagcccccacccctgcggcctttgctcacgggtggccctgcccacccctggcacaaccaaaatcccactgatgcccatcatgccctcagacccttctgggctctgcccgctgggggcctgaagacattcctggaggacactcccatcagaacctggcagccccaaaactggggtcagcctcagggcaggagtcccactcctccagggctctgctcgtcgggggctgggagatgttcctggaggaggacactcccatcagaacttggcagccttgaagttggggtcagcctcggcaggagtcccactcctcctggggtgctgcctgccaccgagagctcccccacctgtaccaccatgtgggactccaggcaccatctgttctccccagggacctgctgacttgaatgccagcccttgctcctctgtgttgctttgggccacctggggctgcaccccttgccctttctctgccccatccctaccctagccttgctctcagccaccttgatagtcactgggctccctgtgacttctgaccctgacacccctcccttggactctgcctgggctggagtctagggctggggctacatttggcttctgtactggctgaggacaggggagggagtgaagttggtttggggtggcctgtgttgccactctcagcaccccacatttgcatctgctggtggacctgccaccatcacaataaagtccccatctgattttt

SEQ ID NO: 151964 - DNA, 570 bp, Homo sapiens
  Payload ID: 9916
  Gene Symbol: MTCP1
  Gene Name: mature T-cell proliferation 1
  Uniprot ID: P56278
  ENST ID: ENST00000362018
  CDS Start-End: 164-487
gatttacaaaggaatgaatctgcatgaaagtttaccaacaagatccctgcctgccttttgcaggctctcctgcaaccatctacttcatttttgatctcaggaagaccagagctgaggcttaggtggagaaaagcagggctagaattggaacccaaagcccagaatggcaggagaggatgtgggggctccacccgatcacctctgggttcaccaagagggtatctaccgcgacgaataccagcgcacgtgggtggccgtcgtggaagaggagacgagtttcctaagggcacgagtccagcaaattcaggttcccttaggtgacgcagctaggccaagtcaccttcttacctcccagctacctctcatgtggcaactctacccggaggagcgctacatggataacaactctcgcttgtggcagatacagcatcatttaatggtcaggggagtacaggagctgttgcttaagcttttgcctgatgactaacctggtgctgggattctacgaagatatgctcctttgttctgttcagtatttggcaatcacttcatccactactgcagtgcacc

SEQ ID NO: 151965 - DNA, 2274 bp, Homo sapiens
  Payload ID: 9916
  Gene Symbol: MTCP1
  Gene Name: mature T-cell proliferation 1
  Uniprot ID: P56278
  ENST ID: ENST00000369476
  CDS Start-End: 581-904
ggggcggagggcggtggccggccgcggtccgggcgtcaggccgggcggcgggggcggcagggaggcggcgctctggggccgcaggcggacgtactctgtgagcggcgcccgggcgcctgggcaggcgcctcccgagtaccggcgcccattttgcccgcccgctaaggagacccgtgcgcggcctacacgcttgggggacagccctttaagacgacatctccgcgaacgccggcctcttgagccagggggacgctcttttgaaagtcagtcccaaaacagttaaggttttattttattttgttttatttccaagtcacagcccccgaatctcgtacaactctccctggaccacttccggttgccggcccgcgcctcataacttcggttcgagtgacctcggcccgggatgcccctcggctcaccccgggctcacgtcgcgatcctggcttgagtggcccagggtgggagacctggaagttttagcctagctgttctcaaggcggattaattagcccaagaaacattatattcatgcttaggtggagaaaagcagggctagaattggaacccaaagcccagaatggcaggagaggatgtgggggctccacccgatcacctctgggttcaccaagagggtatctaccgcgacgaataccagcgcacgtgggtggccgtcgtggaagaggagacgagtttcctaagggcacgagtccagcaaattcaggttcccttaggtgacgcagctaggccaagtcaccttcttacctcccagctacctctcatgtggcaactctacccggaggagcgctacatggataacaactctcgcttgtggcagatacagcatcatttaatggtcaggggagtacaggagctgttgcttaagcttttgcctgatgactaacctggtgctgggattctacgaagatatgctcctttgttctgttcagtatttggcaatcacttcatccactactgcagtgcacccacccttgggcctggggggagggagtgggttgaaaaactgctcaagaaacagaagtttagcaagggtcatgaagaatactgcaagtgaaactgcagagagaggttacgtaggcagaaagcaagtcaacaaaagcacttagtcaggatccgtaacttgaaattgactcctttggaaattgccatagaacccttaatggacatcatcggctggacctgggatctgatgaatcccacaaaagtcagcaccttctacagaacagatgccctgatcaccaaggacttggtactgatttagagagaagagagcagctcctagcagcatcaacatctatttgtcgcttatttgccctgcagcaattcacctgcctttccttctcccatcctgtaaatatcctaggttttgctccagtgtttcccatcccagtactgacctaatttggatctgctgagtatttagagggctctgaaaagagatatgcattgatgaaattagctacaaaggcttgtgggcctttttttctatctgaaatcgtgtcttcaaattactggaagttgctgatcaaaattgtgggctcttgaattcattctctgattacagatattttaaataagctggtttctataagaacttcaagaaaaaccattttagctgcttaactggcacctttctcaggaagtaataacaccaaatattgctgattcctaggaaaacatttactacttgtaaagaatttcctgagttaaagtagttataacagtttatatacattaaaagtaaggttttactttaaaaaaaaaagtcttgggaataatagctaccatgtattggagtcctttccaggcactattgtatgtactttatatactttatcacatttaatcctcctgtcaatgctttgaggtaggtatgattcccattttatatatgagtaataaaaaaagctcaaggagtttaatcatttatcaagggtttcttctgcgaatgatagagccaggctgcgccgtcggctcctctagcctaacgttggtttacagtattcaaaaagagttgattgaattcaaggttttttttccatgtaaagctatttatatcttccaagcctaatgaaatggatattataaaaatacagttgattcatcctatgtttgggaagagtatttttagtgtaattattttccagcaattgtaagggcatatactgcttgtctcagaagaaaattccacgtagaggggctttaaagtctttatggaaaaaagaaaaataaaaatcatttttcttgttttag

SEQ ID NO: 151966 - DNA, 472 bp, Homo sapiens
  Payload ID: 9916
  Gene Symbol: MTCP1
  Gene Name: mature T-cell proliferation 1
  ENST ID: ENST00000504061
  CDS Start-End: 1-30
ctgttgcttaagcttttgcctgatgactaacctgttttctggatatgccgcagaaggatccgtgccagaagcaagcctgtgagatacagaaatgtttacaagccaacagctacatggaatcaaagtgtcaggctgtcatccaagaactgcgtaagtgttgtgctcagtatcccaagggaagatctgtcgtctgttcaggatttgaaaaagaagaggaagaaaacctaacacggaagtctgcatcaaagtaaagttcttctgaagtgctgctccatgtttccaccaaatgaattttttttatcctcctgactcttcaggccaggtagcagcaaatagcaaatgaaaaagtcagctacaaaagttaatgaatatgccatctatgcagaacaggcagaaatataaacacattaaaagacaaatatgtagaatgtaatatactgagctgctaaaataaacctgtttaagagaaaaa

SEQ ID NO: 151967 - DNA, 5937 bp, Homo sapiens
  Payload ID: 9917
  Gene Symbol: MTURN
  Gene Name: maturin, neural progenitor differentiation regulator homolog (Xenopus)
  Uniprot ID: Q8N3F0
  ENST ID: ENST00000324453
  CDS Start-End: 328-723
gggagcgcccaggaaaatccgggcgcccgcgggggtgccggccgctcctcccgccgccccgcgtcccggcccggccgcgccaacccccacggcggcccgcaagggggcggggggaggcggggcggaggaggagccgcgggcgcggcgccgcgctgtccccggccgccgcccgccccactccgcaccgcatgtaaacagtcccagccggcccagcccggccccggaggagcccgcgcaggccgagccgagcgccgcgctgcccgcccgggaggagggcgcctaggagcgggagggcgggcggcggcgggaggcgggcgcggggccgcgatggatttccagcagctggccgacgttgcggagaaatggtgctccaacacgcccttcgagctcatcgccaccgaggagaccgaacgcaggatggatttctacgccgaccccggcgtctccttctatgtgctgtgtccggacaacggctgcggcgacaattttcacgtgtggagtgagagcgaggactgcctgcctttcttgcagctagcacaggattacatctcctcctgcggcaagaagacgctccacgaagtcctggaaaaagtcttcaagtctttcagacctttactggggcttccggatgcagatgacgatgcgtttgaagagtacagtgctgacgtggaagaagaggagccagaggcggaccacccccagatgggggtcagccagcagtaaatctgggggctcccctgagaaggagagtgagccccacagtaacctaggtggggtcactgcccctcctgggttagcattttgcattagcacttcgaaataggacatctggctcccagcatccaaattaaaatgaaatacctttttaacgaccacaaaatatctgtgatgagctttgctcagaagtgacctgaatttcactcccgcttcagtggggtttctatggagttgtcttggtagcctttgccattttgaatttagagtccattttgtggctgactattctcttaagtttatgttggagaattaacattcgctgactcgaatgtagagaactctgaatgtattaaggataggttttgagtcctcacaggtgaccttactgagggaaagcatggcagagaagaaatgcagtctgcactttttatgtactttttaagtgtccgtaagtgaaaggttttgcttataaagcatgaattttaatatctagtcattaaactgcacaagtgcaaatacaagggcaggaaaggataatcacttagctttggactaagagggtaagagaggcccagaagcctttaagtgttttgccattactgagttacctgggtatgtagcgactggttcgtggttaggtgtaaatgttacttgcttgttcgactgtttcaaaacatgctaattccaaagccacttttgaagtctatagtggaaaatatagatggggtgaaagatataatgtattgatttttaaagctgtttataagccgtcccacgtataaaatgaaacattttaccttctctctttctaatgagatggccgcttgttaaatcatgaaaacatccagaattcaagtgccgcttaaactttgaagccatagataaatttgttagaaaagtaaaccaggattaaaagtttttaaaaatatggtagaatccttctttactttttaagtcttttatttaaaaaaaaaaagtcaaaaaaaggattccattgtgtaatttatttaaaaatttaatcacatgtttcgagggacttaattgtggtgtatttgtaaagggacacgaaggtaggaatcttttaatcgtgggttagcttggttaacagggaacgttttaataatcaagatactcagacaactcacagaaacaacttctgtaataactggaaatactgctgttatcgtttagccaacaattacttactggggacatcctttgtaatgctaacatggaattattcctggacccttctgcatccctggttttagttaacctaggatgcggaatgcctcctttacaacactagattaaacctagcatctggggtgggtacgtttaaacagtcacacatgtgcctgttaggttgtgaaagttttgaattaaaaacaagcagtagcagcagaggccacagaacttatgggagtcttgtatatcttccaggcatgtcggtgtaaacctgattgtctcgacattttctgtttaattgattggtgctgtgaggagttcggctgctcgtggtaaaacagcgtactccagttttaagtcatcgggtaaaataataggacagtgatttccatctgtgcttcagtacccactttgtgttcttttcttgaaaagtcatactaaaggttaatttcaagtaaaatgaatttccttccaagtagcctattagtaaaacacaacttagtgtttcatccattggggtgagcatatactgccctttgcagccctgcctgtgttctgattggctccattcatgagcaaaggtgattgtgagctgtatattacacaggtgtcgcccaggtttcgtaacctccactttaatgcagtaagccgcaagaatgacttctgcaagtgaaatgaggaagcttcactagcttgctccattggaaggtaaactgaaattttatacgttgaagcttaaaatctaaatttatgtatgtttggaaatggaatggacattaacataaaatgtattttatcaaaaaagtgtttagactttgaccaaatacatgttggtattatcatgttaatgttctctgtttataaaaattgagtggagatagatagactcggccattctgtgggctgatgagaattctgggctttgttttgcaccaggggtaggaaacagagaacatgtctgtatgttacttaatctccatagcaaaatcccaaacagcattagcagatcgaattgtttcttctaagacttcctttttctgaatgtgtgcacatcccttctcgtgctcacacacttgcccacacactcacttcttcctgcgctgtggctgctctaagcagggctgtgcatggtgcaaagctgcagtcagtgagcctggcagcctgtggtttctgttatggaaatggttccatggtgaaacacatccctgacccttcacagacttacacatttactcaccaggaggtggcagcggtgtgggaggaggagtgttgaccttggacgcaggagagacacctgggttctagttcaagtcggccaaggactgtgtgaccttgacaagtctaactggtctgtgaacaaggggcatttgcccttccagctgtaaacactgcccttctgtgcctgccttatgtgtgtgtgtgagtaaggagcaacagtcaaggaaacttttagggattcgagaagaaaatacatgtgggatcttgccaaggtgctgcctttaggatgctgacccctgcactaccttagaacatgttgatctgtgagtgcccaagcccctgagggctcgatctcatggggcagatgaaattctcttccttagaggaaagggaaaggtgaggccccagaggacttatctcagctgtacatgctctgcctgtggagacatggcttttctttgtgctgtggcagactggggctttggaagtggtgtatgtttaacttacctgagagtgagagatgtgtaggaagaatagctggaagaaagtgaaagatgagtgccagtacttttggcctgttatccagtagagagaaagtgacagtgaaagtaacgtgagagagaaagagtgtgtgtgtatatgtgagagagagaaagaaagagaaaggaatgcttgattgcttgttgttcactgggccagctctgaaatccaaaatcatgccttgataacattacaaaaccgtgatcctgggtttgagtgaatcctagagacattgttcttatggccgcctggtttccgcagcctgatcaccatatcgagcagacgtcaaggaatcagagtgaagtacggagccagggagggaggtgaggccccgtgtagtgcctgtcaccactgtggattcacctgcactcaggtgtccactcctgtctcccaggcccaaagcagcacatggtgcaatggaaaagtctcttatgtagggatcctccttgtgtcctggtgccagaattagatttccagtgtacttcaacgaaaacctctctcctttatagttgctgtcatctttcatgtataaacagaaaccgtctctagcacaatatatttctgaatattgtttctgtttcataagagcacaatgtacatggacctaggggagctgtggtcccaagtgtcattggaatttatattttaggaataggctttgcatgttaaaattcacaagttgggaaactggtatgaacagatctgatttcttacagagaggcatgaaggaataggcaggacttaacttggggtgggaggagatgaataagggagaatgggagagttggggtctgacagttaccacctgagccccaggaaaactgttttcattttcacggctgtctcactgggggcctgctttcctcaaaggaactgactgtatgttgagaggcaatgccttgtgttggcatggctttgccactttaaaagtgccccccagccaaggagaccaacaggaaccctgctcatctggtagggctctttccttcagtaaaaccagctgccagcctgagaagcctgtctttcccaaatgcaggcagatctgagaggggctccaggcacccggcaggtaaatcacaaagcaaacttgggtgtccttggcagcggggaggaagcaggagtgccccctcaggccagagggcagggccaacctcctcactgtgcttcaaggttgtagaaagagcacaattaatgcttaagcgatcacagacccctctcccctgcagtgggtgttagctccaaagagatgccattgctgatcacccagtcttcggagaagcctaaaatttctttgaattaaaaactgatcctttttcataaagacccagtcacttctcccagtttagtgataacaggtatgacacaagaagctgaagtcttttagattttatagagagtaattctgaaacctgccagaatgctggtagcctgtggtgtccatggcaatgggtgtccatggtaaaatatctatagcttctgctcactgggcaaatataaaagacaacatattatttaacataatatgttgtcttttatatttttatttaaatctggattacgaaaatatagtacccatgagcatttcatgttagaaaccccatttaaagcactataaggctgaataggcacaagcgattaaaagtagatgccaggccacataaaaataaatgttttaatttacttagagctgtattcaagttgtttgataccagacagaaagctgacagtctgttctttgtaaactgcctttccctgtttttctgttttgttttgtttctcaagtttcattttttactaagccccttctgacacctaggcagataaagataagagtagtgcgcagtacaaatgtcagctctgaagaggaggaagtaaatcttcaatgctagggcagatcttcactatccgtgatccagtcttaatttgagcatgagagcaaaatttagtcatctacacaagaagcaaaagcaaggaatagttgttgggtttttgttttttggttgttgtttttttttttttttaggcaagaagtgttgccggtagggtatgtgtgctttctttgccttcctatttcctttcaaagaaatctcttgtaaattacaaaactgtgaattgggttgccaaaaactgttgcccttcgttagatgcttcaaacagtgtaaatcctatactgcaccctgtccacctctgctccctcctccctcccctgagagtgaggacctcatccgaccatgtaattaccattcgcttgctattaaagagcctttcaaactc

SEQ ID NO: 151968 - DNA, 5605 bp, Homo sapiens
  Payload ID: 9917
  Gene Symbol: MTURN
  Gene Name: maturin, neural progenitor differentiation regulator homolog (Xenopus)
  Uniprot ID: Q8N3F0
  ENST ID: ENST00000324489
  CDS Start-End: 97-393
aggattttgaaggcaaaggctctggtttctccttccccatgtctgaaaaccgcccttagcctgcacaaggtgaacagtggaaatcattggtgaggaatggccacccactgccctctttactgtgtaggagcagatctgatgatgaacagagcaggtgagcacgtgtggagtgagagcgaggactgcctgcctttcttgcagctagcacaggattacatctcctcctgcggcaagaagacgctccacgaagtcctggaaaaagtcttcaagtctttcagacctttactggggcttccggatgcagatgacgatgcgtttgaagagtacagtgctgacgtggaagaagaggagccagaggcggaccacccccagatgggggtcagccagcagtaaatctgggggctcccctgagaaggagagtgagccccacagtaacctaggtggggtcactgcccctcctgggttagcattttgcattagcacttcgaaataggacatctggctcccagcatccaaattaaaatgaaatacctttttaacgaccacaaaatatctgtgatgagctttgctcagaagtgacctgaatttcactcccgcttcagtggggtttctatggagttgtcttggtagcctttgccattttgaatttagagtccattttgtggctgactattctcttaagtttatgttggagaattaacattcgctgactcgaatgtagagaactctgaatgtattaaggataggttttgagtcctcacaggtgaccttactgagggaaagcatggcagagaagaaatgcagtctgcactttttatgtactttttaagtgtccgtaagtgaaaggttttgcttataaagcatgaattttaatatctagtcattaaactgcacaagtgcaaatacaagggcaggaaaggataatcacttagctttggactaagagggtaagagaggcccagaagcctttaagtgttttgccattactgagttacctgggtatgtagcgactggttcgtggttaggtgtaaatgttacttgcttgttcgactgtttcaaaacatgctaattccaaagccacttttgaagtctatagtggaaaatatagatggggtgaaagatataatgtattgatttttaaagctgtttataagccgtcccacgtataaaatgaaacattttaccttctctctttctaatgagatggccgcttgttaaatcatgaaaacatccagaattcaagtgccgcttaaactttgaagccatagataaatttgttagaaaagtaaaccaggattaaaagtttttaaaaatatggtagaatccttctttactttttaagtcttttatttaaaaaaaaaaagtcaaaaaaaggattccattgtgtaatttatttaaaaatttaatcacatgtttcgagggacttaattgtggtgtatttgtaaagggacacgaaggtaggaatcttttaatcgtgggttagcttggttaacagggaacgttttaataatcaagatactcagacaactcacagaaacaacttctgtaataactggaaatactgctgttatcgtttagccaacaattacttactggggacatcctttgtaatgctaacatggaattattcctggacccttctgcatccctggttttagttaacctaggatgcggaatgcctcctttacaacactagattaaacctagcatctggggtgggtacgtttaaacagtcacacatgtgcctgttaggttgtgaaagttttgaattaaaaacaagcagtagcagcagaggccacagaacttatgggagtcttgtatatcttccaggcatgtcggtgtaaacctgattgtctcgacattttctgtttaattgattggtgctgtgaggagttcggctgctcgtggtaaaacagcgtactccagttttaagtcatcgggtaaaataataggacagtgatttccatctgtgcttcagtacccactttgtgttcttttcttgaaaagtcatactaaaggttaatttcaagtaaaatgaatttccttccaagtagcctattagtaaaacacaacttagtgtttcatccattggggtgagcatatactgccctttgcagccctgcctgtgttctgattggctccattcatgagcaaaggtgattgtgagctgtatattacacaggtgtcgcccaggtttcgtaacctccactttaatgcagtaagccgcaagaatgacttctgcaagtgaaatgaggaagcttcactagcttgctccattggaaggtaaactgaaattttatacgttgaagcttaaaatctaaatttatgtatgtttggaaatggaatggacattaacataaaatgtattttatcaaaaaagtgtttagactttgaccaaatacatgttggtattatcatgttaatgttctctgtttataaaaattgagtggagatagatagactcggccattctgtgggctgatgagaattctgggctttgttttgcaccaggggtaggaaacagagaacatgtctgtatgttacttaatctccatagcaaaatcccaaacagcattagcagatcgaattgtttcttctaagacttcctttttctgaatgtgtgcacatcccttctcgtgctcacacacttgcccacacactcacttcttcctgcgctgtggctgctctaagcagggctgtgcatggtgcaaagctgcagtcagtgagcctggcagcctgtggtttctgttatggaaatggttccatggtgaaacacatccctgacccttcacagacttacacatttactcaccaggaggtggcagcggtgtgggaggaggagtgttgaccttggacgcaggagagacacctgggttctagttcaagtcggccaaggactgtgtgaccttgacaagtctaactggtctgtgaacaaggggcatttgcccttccagctgtaaacactgcccttctgtgcctgccttatgtgtgtgtgtgagtaaggagcaacagtcaaggaaacttttagggattcgagaagaaaatacatgtgggatcttgccaaggtgctgcctttaggatgctgacccctgcactaccttagaacatgttgatctgtgagtgcccaagcccctgagggctcgatctcatggggcagatgaaattctcttccttagaggaaagggaaaggtgaggccccagaggacttatctcagctgtacatgctctgcctgtggagacatggcttttctttgtgctgtggcagactggggctttggaagtggtgtatgtttaacttacctgagagtgagagatgtgtaggaagaatagctggaagaaagtgaaagatgagtgccagtacttttggcctgttatccagtagagagaaagtgacagtgaaagtaacgtgagagagaaagagtgtgtgtgtatatgtgagagagagaaagaaagagaaaggaatgcttgattgcttgttgttcactgggccagctctgaaatccaaaatcatgccttgataacattacaaaaccgtgatcctgggtttgagtgaatcctagagacattgttcttatggccgcctggtttccgcagcctgatcaccatatcgagcagacgtcaaggaatcagagtgaagtacggagccagggagggaggtgaggccccgtgtagtgcctgtcaccactgtggattcacctgcactcaggtgtccactcctgtctcccaggcccaaagcagcacatggtgcaatggaaaagtctcttatgtagggatcctccttgtgtcctggtgccagaattagatttccagtgtacttcaacgaaaacctctctcctttatagttgctgtcatctttcatgtataaacagaaaccgtctctagcacaatatatttctgaatattgtttctgtttcataagagcacaatgtacatggacctaggggagctgtggtcccaagtgtcattggaatttatattttaggaataggctttgcatgttaaaattcacaagttgggaaactggtatgaacagatctgatttcttacagagaggcatgaaggaataggcaggacttaacttggggtgggaggagatgaataagggagaatgggagagttggggtctgacagttaccacctgagccccaggaaaactgttttcattttcacggctgtctcactgggggcctgctttcctcaaaggaactgactgtatgttgagaggcaatgccttgtgttggcatggctttgccactttaaaagtgccccccagccaaggagaccaacaggaaccctgctcatctggtagggctctttccttcagtaaaaccagctgccagcctgagaagcctgtctttcccaaatgcaggcagatctgagaggggctccaggcacccggcaggtaaatcacaaagcaaacttgggtgtccttggcagcggggaggaagcaggagtgccccctcaggccagagggcagggccaacctcctcactgtgcttcaaggttgtagaaagagcacaattaatgcttaagcgatcacagacccctctcccctgcagtgggtgttagctccaaagagatgccattgctgatcacccagtcttcggagaagcctaaaatttctttgaattaaaaactgatcctttttcataaagacccagtcacttctcccagtttagtgataacaggtatgacacaagaagctgaagtcttttagattttatagagagtaattctgaaacctgccagaatgctggtagcctgtggtgtccatggcaatgggtgtccatggtaaaatatctatagcttctgctcactgggcaaatataaaagacaacatattatttaacataatatgttgtcttttatatttttatttaaatctggattacgaaaatatagtacccatgagcatttcatgttagaaaccccatttaaagcactataaggctgaataggcacaagcgattaaaagtagatgccaggccacataaaaataaatgttttaatttacttagagctgtattcaagttgtttgataccagacagaaagctgacagtctgttctttgtaaactgcctttccctgtttttctgttttgttttgtttctcaagtttcattttttactaagccccttctgacacctaggcagataaagataagagtagtgcgcagtacaaatgtcagctctgaagaggaggaagtaaatcttcaatgctagggcagatcttcactatccgtgatccagtcttaatttgagcatgagagcaaaatttagtcatctacacaagaagcaaaagcaaggaatagttgttgggtttttgttttttggttgttgtttttttttttttttaggcaagaagtgttgccggtagggtatgtgtgctttctttgccttcctatttcctttcaaagaaatctcttgtaaattacaaaactgtgaattgggttgccaaaaactgttgcccttcgttagatgcttcaaacagtgtaaatcctatactgcaccctgtccacctctgctccctcctccctcccctgagagtgaggacctcatccgaccatgtaattaccattcgcttgctattaaagagcctttcaaac

SEQ ID NO: 151969 - DNA, 843 bp, Homo sapiens
  Payload ID: 9917
  Gene Symbol: MTURN
  Gene Name: maturin, neural progenitor differentiation regulator homolog (Xenopus)
  Uniprot ID: Q8N3F0
  ENST ID: ENST00000409688
  CDS Start-End: 150-422
tccgcaccgcatgtaaacagtcccagccggcccagcccggccccggaggagcccgcgcaggccgagccgagcgccgcgctgcccgcccgggaggagggcgcctaggagcgggagggcgggcggcggcgggaggcgggcgcggggccgcgatggatttccagcagctggccgacgttgcggagaaatggtgctccaacacgcccttcgagctcatcgccaccgaggagaccgaacgcaggatggatttctacgccgaccccggcgtctccttctatgtgctgtgtccggacaacggctgcggcgacaattttttactggggcttccggatgcagatgacgatgcgtttgaagagtacagtgctgacgtggaagaagaggagccagaggcggaccacccccagatgggggtcagccagcagtaaatctgggggctcccctgagaaggagagtgagccccacagtaacctaggtggggtcactgcccctcctgggttagcattttgcattagcacttcgaaataggacatctggctcccagcatccaaattaaaatgaaatacctttttaacgaccacaaaatatctgtgatgagctttgctcagaagtgacctgaatttcactcccgcttcagtggggtttctatggagttgtcttggtagcctttgccattttgaatttagagtccattttgtggctgactattctcttaagtttatgttggagaattaacattcgctgactcgaatgtagagaactctgaatgtattaaggataggttttgagtcctcacaggtgaccttactgagggaaagcatggcagagaagaaatgcagtctgcacttt

SEQ ID NO: 151970 - DNA, 555 bp, Homo sapiens
  Payload ID: 9917
  Gene Symbol: MTURN
  Gene Name: maturin, neural progenitor differentiation regulator homolog (Xenopus)
  ENST ID: ENST00000434060
  CDS Start-End: 326-555
gcaagaatggctcatggttctggatttcactggggagaagcccacacagccttcctgctgggaccgcccaggccatacccaaagaaatgactccaaagacagtaagtgggccaggaagacaaaaggctgttctcttgccatgaatatgtgtatccaaccatcgttcagaagtaagaagtattatattatttgtatcaggcctttctcttgaggccacccagattttaaatattttcccatctgcatgagaaaaatgcttgaaagtgtcatgtaaactgacaatttaaatagaatagatagaaagatagaggatgggggtgggcagatgattccttgggtagaatggaactttctccaagttctggaggctctaatggacaagatgccaacctcgggagttttcctagccggacctcttgaatctgtcccaggccagcacgtgtggagtgagagcgaggactgcctgcctttcttgcagctagcacaggattacatctcctcctgcggcaagaagacgctccacgaagtcctggaaaaagtcttcaagtctttcag

SEQ ID NO: 151971 - DNA, 4994 bp, Homo sapiens
  Payload ID: 9918
  Gene Symbol: MAU2
  Gene Name: MAU2 sister chromatid cohesion factor
  Uniprot ID: Q9Y6X3
  ENST ID: ENST00000262815
  CDS Start-End: 180-2021
aaccaaacggcgtcgcccttttacaccttcccggagcggcagtcatcccaaatacaaactacatgttccaggatgctttgggcggcagatctcgcggaagccgcgaggagagcccggccccgtctcgcgcgcctgcttccgcctccctgtggcggcggcttgttgttgtggaggccaaaatggcggctcaggcggcggcagcggcccaggcggcggcggcccaggctgcgcaggccgaggcggccgactcgtggtacctggcgcttctgggcttcgctgagcacttccgcacttccagcccgcccaaaatccgcctgtgcgtgcactgcctgcaggccgtgttccccttcaagccgccgcagcgcatcgaggcccgtacacacctgcagctgggctccgttctctatcaccacaccaagaacagcgagcaggcgcgcagccacctggagaaggcgtggttgatatcacagcaaatcccgcagttcgaagatgttaaatttgaagcagcaagtctgttgtctgaattgtactgtcaagagaattccgttgatgcagcaaagccgctgctgcggaaggcgatccagatctcacagcagaccccatattggcactgccgcctgctcttccagctcgctcaactgcacacgcttgagaaggacctggtgtcggcctgtgacctcctgggtgtaggggccgagtacgcccgggtggtgggatctgaatacacacgggcgctgttcctcctcagcaaggggatgctgctgctgatggagcgaaagctgcaggaggtgcacccgctgctgaccctctgcgggcagatcgtggagaactggcaggggaaccccatccagaaggagtcgctgcgtgtcttcttcctggtgctccaggtcacccactatctggatgccgggcaggtgaagagcgtgaagccgtgtctgaagcagctgcagcagtgcatccagaccatctccacactgcacgatgatgagatcctgcccagcaaccccgctgacctcttccactggctgcccaaggagcacatgtgtgtgcttgtctacctggtgactgtgatgcactccatgcaggccggctacctggagaaggcgcagaagtacacggacaaggccctcatgcagctggagaagctcaagatgctggactgcagccccatcctgtcatccttccaagtgatcctgctggagcacatcatcatgtgccgccttgtcacgggtcacaaggccacggcgctgcaggagatctcccaggtctgccagctgtgccagcagtccccccggctcttctccaaccatgcagcacagctgcacacattgctgggcctgtactgtgtctctgtcaactgcatggacaacgcggaagcccagttcaccacggccctgcggctcaccaaccaccaggagctgtgggccttcatcgtcaccaacctggcgagtgtgtatatacgggaaggaaatagacaccaagaggtactctacagtctgctggagaggatcaacccggaccacagcttccctgtcagctcgcactgcctccgagcagccgccttctatgtgcgtgggctcttctccttcttccagggacgctacaacgaggccaagcgatttctgcgggaaactctgaagatgtccaatgctgaggacctgaaccggctcacagcctgctccctcgtgcttctgggccacatcttctatgtgctgggaaaccacagggagagtaacaacatggtggtgcctgccatgcagctcgccagcaagatcccggacatgtcggtacagctgtggtcgtcagcactgctgagagacctgaataaagcctgtgggaacgccatggatgcccatgaagccgcccagatgcaccagaacttctcgcagcagctgctccaggaccacattgaggcctgcagcctccccgaacacaacctcatcacgtggacagacggtccaccccccgtgcagttccaagctcagaatggacccaacaccagcctggccagcctcctgtgaggccttgatggggccatccagctccgcagggcctgcgcgtctccggcttccacccagacggcactcaagcctgcccccgaggcgtgcttccttcctgattgtctctagagcttccaagtcctgggaatgtgcggggccagtccctgccctcccaggaggggtggtagccgttcccacctcgcagcaggacccccagtgcagaggctcacaggtggcacacaggcgctgtctctccagagccatccttcagagtggacctcagtgccagtcctgcctcagcatctgggtcacgtcggccaggagtagggtgcaggcctccagcaggtcctaatcctgtgtgccagggcaggcagtgccccaggggcaccacgcctgactctccatcacccaggccttgatgccgagcgggagtagagtgtttcctctgctcaaggcaatttccagagcccggatgccagtttctggcctgaatttggagggaagaagtaatggcgctagtgtgggacgaagcacagatcccagcacttttcccagctttctctccagcatcagtccctgcagcagctggggcctctggtcaggaaccctcagggacccaggaactcagcttccaaacatctgcaccttgaccggactcgccatcccgccgtgggggtgcaggtgattgtaaacacgggtgtgcatgtggatgcacacgggtgtgcggtgaagatctgtggagatggagctgggagctgaggctcctgttgcaccagccaccttcccccatcttgtggctgctgaggggcaggaagcgggggagtgggctcgtctcctaaatttaagatcacctcctcagctagcttagagtgcgtggcacgggccccccgcccccgagatctggagcccagggactttcttcctggcagatctgtggccttccctgctcagcctcttggtccccccactccctccaccgcctcaccttccctgctgggtctctggggcacagtgtgaaacccgcaccctagccaggccccagggagcctccgctgggcccagacagcagcgtttggttttatccacttttcttggataatcaggaggtgccccagtggtcacagtgtggcattccgagttggggcgggtggtcgggtcaagatagcagcagcaggtgtcagggctcaagacaccaccccctccagcttctggggcccaggagcctctccctgctacagggggtgggggtcctgctcagcagggtaggtggtggttttaggtcttgtcaccctcactcagtggaactgcctctgggagctttggcgtctgtgactaaagggacgctggattgctcaggtcagctgcttggggctcccaggctgggtgtgccttagccacaggcagggctgtcaataacccccttcctcactggccaccacctgacatcagcaccagtgacaggctggtcagagggcggggctggtgagggtttgtcctaagaggaccaccgccatctctgggtctccagggggagagcctggccctgtcctttgctacccagggctgcccccaggcccatgaagccaataggagagcgtgtggcactggcccacaaactgtccctgtcctgtcttcctcccgagccatggcctctgctagctccaccttgaaggagccccccacatcctcccctacatcccagagatgccaccacttgtgtctccacaatgtgctcctgcccacccgggttccgcactgtccgacccctgcacaccactcatgtcaccacggcgtgcatcatgttcatccccatctatttatttaagcctttctttgcttgtagggcattttgtatgtagagcagttgaaaacagaacctcagaacttaacatctgtcctgatgttaaagtgcttttcatgaccaccctgttatctatgtatatgtaaagttaaggatgagatcttaagtttacaattaaaaactcagtactcaatatttaatattctactcgagctttatggaagccaaatcatgtgcatgtgtgtgtgtgcgtgtgtgcaagctttgaacctccttccacagccgcatcttctcatgacacaaagcttttgataagtactttcctgtgggtcgctcagcgcctcatagcatctcattcaattgcaagaatagaggccagacacggtggcgcatgcctgtagtcccagctaactgggaggctgaggcaggaggatcacttgagcccaggagattgaggctgcagtgagcatgatcgcgacactgcactccagcctgggtgacggtgagactttgtctcaaaaaaaaaaaaaaaaacaatggaaggcagacagcaagtccctgaggacacatcacacagtgtcctgtagctaagtgtctaggaaaaaacaaaaactccaaacccttcagtggatgaggacaaggtcgcagaaaggcattctgttgacagatgaacagccgaaagctggccagaccctcctgtatgcctctgcccttgtcctgtgggttgagggggtctgaccaggaggccacctacagcaggaagtgaggctgccatgtttccttgagacacagctgcctctccccagctctgtccctgtagtcacctgccggtgggcgaggatcctctccctgggataagcactcccagccccgtttatcagaaacacaggcaaggaaattggaactgccacccagcccagcatggtggctcaattggttggttgcgttgtcagttgtctcttcgttttgttaaggtttttaataagtacgtttggcataatgtcttttaatgggtttgtaatatttgtaacggttttagcagcctataacttttcagctggtgcttttacttagggaaaaaaacaatttgtaaatacagaacattgtttaaaagacataaccatagaacatagcttcctgtttgtggattttgtttcctatatattcaaagtaaaatgacttacaggagccac

SEQ ID NO: 151972 - DNA, 551 bp, Homo sapiens
  Payload ID: 9918
  Gene Symbol: MAU2
  Gene Name: MAU2 sister chromatid cohesion factor
  ENST ID: ENST00000609122
  CDS Start-End: 1-551
aaaatccgcctgtgcgtgcactgcctgcaggccgtgttccccttcaagccgccgcagcgcatcgaggcccgtacacacctgcagctgggctccgttctctatcaccacaccaagaacagcgagcaggcgcgcagccacctggagaaggcgaattccgttgatgcagcaaagccgctgctgcggaaggcgatccagatctcacagcagaccccatattggcactgccgcctgctcttccagctcgctcaactgcacacgcttgagaaggacctggtgtcggcctgtgacctcctgggtgtaggggccgagtacgcccgggtggtgggatctgaatacacacgggcgctgttcctcctcagcaaggggatgctgctgctgatggagcgaaagctgcaggaggtgcacccgctgctgaccctctgcgggcagatcgtggagaactggcaggggaaccccatccagaaggagtcgctgcgtgtcttcttcctggtgctccaggtcacccactatctggatgccgggcaggtgaagagcgtgaagccgtgtctgaa

SEQ ID NO: 151973 - DNA, 707 bp, Homo sapiens
  Payload ID: 9918
  Gene Symbol: MAU2
  Gene Name: MAU2 sister chromatid cohesion factor
  ENST ID: ENST00000609060
  CDS Start-End: 1-707
gcgatccagatctcacagcagaccccatattggcactgccgcctgctcttccagctcgctcaactgcacacgcttgagaaggacctggtgtcggcctgtgacctcctgggtgtaggggccgagtacgcccgggtggtgggatctgaatacacacgggcgctgttcctcctcagcaaggggatgctgctgctgatggagcgaaagctgcaggaggtgcacccgctgctgaccctctgcgggcagatcgtggagaactggcaggggaaccccatccagaaggagtcgctgcgtgtcttcttcctggtgctccaggtcacccactatctggatgccgggcaggtgaagagcgtgaagccgtgtctgaagcagctgcagcagtgcatccagaccatctccacactgcacgatgatgagatcctgcccagcaaccccgctgacctcttccactggctgcccaaggagcacatgtgtgtgcttgtctacctggtgactgtgatgcactccatgcaggccggctacctggagaaggcgcagaagtacacggacaaggccctcatgcagctggagaagctcaagagtaagtcagtgctggactgcagccccatcctgtcatccttccaagtgatcctgctggagcacatcatcatgtgccgccttgtcacgggtcacaaggccacggcgctgcaggagatctcccaggtctgcca

SEQ ID NO: 151974 - DNA, 5587 bp, Homo sapiens
  Payload ID: 9919
  Gene Symbol: MXD1
  Gene Name: MAX dimerization protein 1
  Uniprot ID: Q05195
  ENST ID: ENST00000264444
  CDS Start-End: 261-926
gagtcggggataaacactccgcggcggtggcggctgctgctctgctccgggttctgtcactgtgtcggcggtgcccagctcactggccccctccctctcttgtcgagcgtggttgccagagaggctccctcagccctgctccgcggggtccacagcgggctccacagcgggctccatagcgggctccacagcggtccggcggcggcagcgagcccgtgggcagtgggggttggtcccgtggctccggcccccggtgcagaatggcggcggcggttcggatgaacatccagatgctgctggaggcggccgactatctggagcggcgggagagagaagctgaacatggttatgcctccatgttaccatacaataacaaggacagagatgccttaaaacggaggaacaaatccaaaaagaataacagcagtagcagatcaactcacaatgaaatggagaagaatagacgggctcatcttcgcttgtgcctggagaagttgaaggggctggtgccacttggacccgaatcaagtcgacacactacgttgagtttattaacaaaagccaaattgcacataaagaaacttgaagattgtgacagaaaagccgttcaccaaatcgaccagcttcagcgagagcagcgacacctgaagaggcagctggagaagctgggcattgagaggatccggatggacagcatcggctccaccgtctcctcggagcgctccgactccgacagggaagaaatcgacgttgacgtggagagcacggactatctcacaggtgatctggactggagcagcagcagtgtgagcgactctgacgagcggggcagcatgcagagcctcggcagtgatgagggctattccagcaccagcatcaagagaataaagctgcaggacagtcacaaggcgtgtcttggtctctaagagagtgggcactgcggctgtctccttgaaggttctccctgttggttctgattaggtaacgtattggacctgcccacaactcccttgcacgtaaacttcagtgtcccaccttgaccaaaatcagctttgtaactgttttcaaggaggtgcttaggattgtgggtttctgattgcatccactagcttctctttttctcgccataaaaatttgtctctgagagactatacattccaatcaatttgaagcatccaagaattcttagaccgaataagcaatgtccacatctcagcaatccccctctttgctctcctcgtgtcctctcccagacctttcttccagttttctggcttactgtgttacttgcctaggaggaatgtccaagtgtgtcttgtacttaggaaactgaaggaaacaaacttttgaaattgagatcctgatctcagaactccaaagtaagctttgaaagcagcatttaagagcacttaaccatggacctcaccaccagtgaggaagtcaggaatacctctagaaaacacgcccttcacaccgcgcatgctcattcccccgacgcgccgcgtgtggatgggagcagtatttctcactttaaaatggacaccttgatagtgtgtctctggggttgcacagctcatcaaagttccaaattgtttgttctcacaaacaaaacggtacaatctatttttgtgcgatgttcttgggacctcgctgtgttctgctatctcgaggcacattctcccctccaactttgttaatgctacttgtctctggaacatttttttttcctacctcagagataaatgagatctccatttcccacttaacacagtgattatccttttttccccccccaaaatagtgacatttggtccaattataatctattttcctattgaactttcagcaataactgagctgtggcactagcagagctagtagccattatcagtgaaagaaaaagtccacatttctactctctgttgcaggtgaacaggagaggatggtacactgttactagaactcctctccttattgattatttttggacacacccagaaacttctttatggaggcttttgggttgatagtttaaaaggctgatttttctttttggttatgatttctcccttaagtggtctccgactttgtagcatttttatttaagctaaaacagagcacatgtatatgtacataagacacattaaatctataaatactatttattcattttatataaactaatgtaatggaaaacaaattcttatgactttgtggttttatagatgttctagaaactttgtatgtaggtatctacaaaattagttcattcccctgaatatttttgcattcatatttttgaggtcttgatgttttcagcctctggcgaatctttttcattgaatttgaaccatttgtaaaatctgtgatgctgaagcagagtgtgtcacaaagtgatgagaacattactaaaatccacggacgcactgcgacctaagggctcaacggctgactcggcagcgggcagccaccccacgctcccctgcggtcactcgcacaccacagcctgaagctcccccagcgcctgcacctcgcacacagctaaggtcaaagttcaaacgcactccacacggaagctcattctatacccgaagagcagtctcagaaagcaagattacttttgtgttttttaaaaaatgattctttaatgtatttttctaaacattctgattggaagtagtggattcctaaatgattccaaagtcacctgtaattcttctgtttttgttttgttctgtcttttcttcattttggctttgggtggggggaggggcaggtgacacaaaggattttttttttttttttttaatttttggaatcttttccaataaccagctaaagatttgcactgaaatacaacttgtatgccttttgcatttttaaagcctgcttcctggatttaagcagagtgatagtgttcaaagagccagttcagcctgtaacatatttgaaaaagatatgtctgcactttgaggtcccttttgaatgccattcactagacctctcaagcattttgtttcattgctacatccaagcgcctcacaagtccacaatgcgggacagcatcaaaagctcaagactttggaaaaagcttgtgggcttgcactgggggagggaagggaacaaaatttgtgtacttctttgtttaatttagaaataaggcatccaagagatgccattattttctgtgtttcaattgttgtgcctttgagttaaactgcatttttgtcttttggttgaaatctgaaatgtactgtcccaatataaaacagtaattatttgacctttgcactgtttgtctggtccttttcagtttgattgcatataaatgtggaacttgatagatctctatatttttaatgcacttgtgataaactggcagcagggttagacattactttcaaagcttgaggtagaccgagtcagcatgctagacaggcttctctctctaaccaaaactgtaatcttcaggaccagcaaactcagcccaaggcagctaatccccccaaccccatcctccgcgccccgtgcggctgatcggcagccctgattcgccaatttgtcctctctcattcactgatccaccagcctgactgctaagagctatagtctttttagttgttttgtctttttaagcaagatgaaaacctttctattagggattttggggttgggaggggatgggcagagatataaaccccagcctttaagactttgacaattgtacgtaaatacagatgtgtataaatataggcacatgcatatttttatgtgaaagttgattttaaaaaactaaaaaaatctaaactgcactcttattgataccatcataacgcaagtgggaaaaataagagtacgcagtctaatttaatttcatgcagtgggaaaatatatatgtgtgcttctgtaacatcctgaaaacatagctttccatcccctgttggctttgaatggtgggccgagcacccaggtcgtctgtattttggttttcttttgctaagcagagatcttgaattcttcaaggtgctgatagcaactgctggctcctttctgtagtcacacacctaatgctagtttagtgattcaaaatgcatcacatttttaggcaggacctagattttccctgtcaacctaagatgaaaataatttcagtgttgattcagaactgaacattaagtaggccctcgtcctgcagttggccacttgagtgttttgttttgtttttattttttaaggtgggcattttcctttaacctctactttttcaaaagcaacaaaggggcctcaacctgagtttcctatgggcctctcttctgcatccccaaagcggccaagagcaaatcctgggggataagaaaaaagtgtaaactaggtaggattgtgatgctcaaaataaccatctagcaatatcttggagcttgagaatagattttgtgggcttatttcttcttgcctcttccccatcctttcaagagagaacttatttttgaaaagtatctatatatacacacacacacacacacacacatattattatttaggtttttataccatactgtattggcgagaataccactatcattgtcctttacagtctatttcttcccccaagtcttggtctttttttattttctattttttcatgaaccacacaggagactttaacatcctggtcttttctgtttcttctttgtttccccaagtttgtctgtccccctttgccttccctgagtgttgaacatcaggtagtaaaaggctaaacgcaatttcttgcatgtcaatctattctttttctatgtttgactctgatgcagtgtgtttagcgtgtctagtagctggctactcctatttaaaaactcttcctggtagaagacaacccaaagacccttttcgatgaggtggtttctcattctacatcctctgatctctatagactgtaggatgctttgctttcaaagataactgggttagagggtggggtgtgcaataggtgatttatcatggtttttttcattatcaatattacatggatgattttctcagattcttctgaaagaagaaattgacaggcactgctagattcagctattgaatggctgaagagattgagtatttgaccttctctcaaaatcataaagtgagaattcataaggcacccaatgttaagatttatccagatttttacattttgatttcttctctctgtggggtggcaagttgagggagcattcttcattttagcttttacctgacaaccaaacttgcctttaccccatccctagaattggtgctcttggaatattgctgttaccatcatttttggggggccatcttcctaatgctacacacagcctgacaggggagcagcagatgaaagggtatgctattctgtttccagatgtttctttatgtaaatatgacgccaatgtaaatcctgtgtcaagatcatagagaatggtgctttttactacagttagcacatgcatttttagaaactactacatgttttagagaatctttgctgtgtatatgtaaactgtattgttcaactgttaacaaataataaattatttcattattaaagaaa

SEQ ID NO: 151975 - DNA, 982 bp, Homo sapiens
  Payload ID: 9919
  Gene Symbol: MXD1
  Gene Name: MAX dimerization protein 1
  ENST ID: ENST00000409442
  CDS Start-End: 319-540
gctctgctccgggttctgtcactgtgtcggcggtgcccagctcactggccccctccctctcttgtcgagcgtggttgccagagaggctccctcagccctgctccgcggggtccacagcgggctccacagcgggctccatagcgggctccacagcggtccggcggcggcagcgagcccgtgggcagtgggggttggtcccgtggctccggcccccggtgcagaatggcggcggcggttcggatgaacatccagatgctgctggaggcggccgactatctggagcggcgggagagagaagctgaacatggttatgcctccatgttaccatacaataacaaggacagagatgccttaaaacggaggaacaaatccaaaaagaataacagcagtagcagacgggctcatcttcgcttgtgcctggagaagttgaaggggctggtgccacttggacccgaatcaagtcgacacactacgttgagtttattaacaaaagccaaattgcacataaaggacaagtacccccagcactggcgatgctgaagagtcagacgaagccaggagtcactggccagtcgacttcctgtctcagggagaagcttgatgagtggcaccgaaaggcgtctgaggaagtgtggcgcattccactgctagaagggaagatgcgggggccattgcccatttagagatctccctgtggggcccaacaactacccctttgacttgcagaaacttgaagattgtgacagaaaagccgttcaccaaatcgaccagcttcagcgagagcagcgacacctgaagaggcagctggagaagctgggcattgagaggatccggatggacagcatcggctccaccgtctcctcggagcgctccgactccgacagggaagaaatcgacgttgacgtggagagcacggactatctcacaggtgatctggactggagcagcagcagtgtgagcgactctgacgagcggggcagca

SEQ ID NO: 151976 - DNA, 860 bp, Homo sapiens
  Payload ID: 9919
  Gene Symbol: MXD1
  Gene Name: MAX dimerization protein 1
  ENST ID: ENST00000435990
  CDS Start-End: 316-860
aaagaagaggaagaagattatttcaggtagagggaagagctcatgaaaatgccatggtaagaaggtggatggctctgtaaatgcctatgccataaatgtctctcagaagaggaagtacaggcagtacatgaatcgaaaaggtggattcaacagacctttggatttcattgcatgagaattgaagtgttgaaggatgattttttttcccctcatcttggtcagagagtggattttgtattttgtatttaacttgcattcaaaaaacaggatctcagttctcctttcttgtaaaaagctgaacatggttatgcctccatgttaccatacaataacaaggacagagatgccttaaaacggaggaacaaatccaaaaagaataacagcagtagcagatcaactcacaatgaaatggagaagaatagacgggctcatcttcgcttgtgcctggagaagttgaaggggctggtgccacttggacccgaatcaagtcgacacactacgttgagtttattaacaaaagccaaattgcacataaagaaacttgaagattgtgacagaaaagccgttcaccaaatcgaccagcttcagcgagagcagcgacacctgaagaggcagctggagaagctgggcattgagaggatccggatggacagcatcggctccaccgtctcctcggagcgctccgactccgacagggaagaaatcgacgttgacgtggagagcacggactatctcacaggtgatctggactggagcagcagcagtgtgagcgactctgacgagcggggcagcatgcagagcctcggcagtgatgagggctattccagcaccagcatcaagagaataaagctgcaggacag

SEQ ID NO: 151977 - DNA, 5580 bp, Homo sapiens
  Payload ID: 9919
  Gene Symbol: MXD1
  Gene Name: MAX dimerization protein 1
  Uniprot ID: Q05195
  ENST ID: ENST00000540449
  CDS Start-End: 291-926
aagagaaggggctgggggcggggagatggtgagtcggggataaacactccgcggcggtggcggctgctgctctgctccgggttctgtcactgtgtcggcggtgcccagctcactggccccctccctctcttgtcgagcgtggttgccagagaggctccctcagccctgctccgcggggtccacagcgggctccacagcgggctccatagcgggctccacagcggtccggcggcggcagcgagcccgtgggcagtgggggttggtcccgtggctccggcccccggtgcagaatggcggcggcggttcggatgaacatccagatgctgctggaggcggccgactatctggagcggcgggagagagaagctgaacatggttatgcctccatgttaccatacaataacaaggacagagatgccttaaaacggaggaacaaatccaaaaagaataacagcagtagcagacgggctcatcttcgcttgtgcctggagaagttgaaggggctggtgccacttggacccgaatcaagtcgacacactacgttgagtttattaacaaaagccaaattgcacataaagaaacttgaagattgtgacagaaaagccgttcaccaaatcgaccagcttcagcgagagcagcgacacctgaagaggcagctggagaagctgggcattgagaggatccggatggacagcatcggctccaccgtctcctcggagcgctccgactccgacagggaagaaatcgacgttgacgtggagagcacggactatctcacaggtgatctggactggagcagcagcagtgtgagcgactctgacgagcggggcagcatgcagagcctcggcagtgatgagggctattccagcaccagcatcaagagaataaagctgcaggacagtcacaaggcgtgtcttggtctctaagagagtgggcactgcggctgtctccttgaaggttctccctgttggttctgattaggtaacgtattggacctgcccacaactcccttgcacgtaaacttcagtgtcccaccttgaccaaaatcagctttgtaactgttttcaaggaggtgcttaggattgtgggtttctgattgcatccactagcttctctttttctcgccataaaaatttgtctctgagagactatacattccaatcaatttgaagcatccaagaattcttagaccgaataagcaatgtccacatctcagcaatccccctctttgctctcctcgtgtcctctcccagacctttcttccagttttctggcttactgtgttacttgcctaggaggaatgtccaagtgtgtcttgtacttaggaaactgaaggaaacaaacttttgaaattgagatcctgatctcagaactccaaagtaagctttgaaagcagcatttaagagcacttaaccatggacctcaccaccagtgaggaagtcaggaatacctctagaaaacacgcccttcacaccgcgcatgctcattcccccgacgcgccgcgtgtggatgggagcagtatttctcactttaaaatggacaccttgatagtgtgtctctggggttgcacagctcatcaaagttccaaattgtttgttctcacaaacaaaacggtacaatctatttttgtgcgatgttcttgggacctcgctgtgttctgctatctcgaggcacattctcccctccaactttgttaatgctacttgtctctggaacatttttttttcctacctcagagataaatgagatctccatttcccacttaacacagtgattatccttttttccccccccaaaatagtgacatttggtccaattataatctattttcctattgaactttcagcaataactgagctgtggcactagcagagctagtagccattatcagtgaaagaaaaagtccacatttctactctctgttgcaggtgaacaggagaggatggtacactgttactagaactcctctccttattgattatttttggacacacccagaaacttctttatggaggcttttgggttgatagtttaaaaggctgatttttctttttggttatgatttctcccttaagtggtctccgactttgtagcatttttatttaagctaaaacagagcacatgtatatgtacataagacacattaaatctataaatactatttattcattttatataaactaatgtaatggaaaacaaattcttatgactttgtggttttatagatgttctagaaactttgtatgtaggtatctacaaaattagttcattcccctgaatatttttgcattcatatttttgaggtcttgatgttttcagcctctggcgaatctttttcattgaatttgaaccatttgtaaaatctgtgatgctgaagcagagtgtgtcacaaagtgatgagaacattactaaaatccacggacgcactgcgacctaagggctcaacggctgactcggcagcgggcagccaccccacgctcccctgcggtcactcgcacaccacagcctgaagctcccccagcgcctgcacctcgcacacagctaaggtcaaagttcaaacgcactccacacggaagctcattctatacccgaagagcagtctcagaaagcaagattacttttgtgttttttaaaaaatgattctttaatgtatttttctaaacattctgattggaagtagtggattcctaaatgattccaaagtcacctgtaattcttctgtttttgttttgttctgtcttttcttcattttggctttgggtggggggaggggcaggtgacacaaaggattttttttttttttttttaatttttggaatcttttccaataaccagctaaagatttgcactgaaatacaacttgtatgccttttgcatttttaaagcctgcttcctggatttaagcagagtgatagtgttcaaagagccagttcagcctgtaacatatttgaaaaagatatgtctgcactttgaggtcccttttgaatgccattcactagacctctcaagcattttgtttcattgctacatccaagcgcctcacaagtccacaatgcgggacagcatcaaaagctcaagactttggaaaaagcttgtgggcttgcactgggggagggaagggaacaaaatttgtgtacttctttgtttaatttagaaataaggcatccaagagatgccattattttctgtgtttcaattgttgtgcctttgagttaaactgcatttttgtcttttggttgaaatctgaaatgtactgtcccaatataaaacagtaattatttgacctttgcactgtttgtctggtccttttcagtttgattgcatataaatgtggaacttgatagatctctatatttttaatgcacttgtgataaactggcagcagggttagacattactttcaaagcttgaggtagaccgagtcagcatgctagacaggcttctctctctaaccaaaactgtaatcttcaggaccagcaaactcagcccaaggcagctaatccccccaaccccatcctccgcgccccgtgcggctgatcggcagccctgattcgccaatttgtcctctctcattcactgatccaccagcctgactgctaagagctatagtctttttagttgttttgtctttttaagcaagatgaaaacctttctattagggattttggggttgggaggggatgggcagagatataaaccccagcctttaagactttgacaattgtacgtaaatacagatgtgtataaatataggcacatgcatatttttatgtgaaagttgattttaaaaaactaaaaaaatctaaactgcactcttattgataccatcataacgcaagtgggaaaaataagagtacgcagtctaatttaatttcatgcagtgggaaaatatatatgtgtgcttctgtaacatcctgaaaacatagctttccatcccctgttggctttgaatggtgggccgagcacccaggtcgtctgtattttggttttcttttgctaagcagagatcttgaattcttcaaggtgctgatagcaactgctggctcctttctgtagtcacacacctaatgctagtttagtgattcaaaatgcatcacatttttaggcaggacctagattttccctgtcaacctaagatgaaaataatttcagtgttgattcagaactgaacattaagtaggccctcgtcctgcagttggccacttgagtgttttgttttgtttttattttttaaggtgggcattttcctttaacctctactttttcaaaagcaacaaaggggcctcaacctgagtttcctatgggcctctcttctgcatccccaaagcggccaagagcaaatcctgggggataagaaaaaagtgtaaactaggtaggattgtgatgctcaaaataaccatctagcaatatcttggagcttgagaatagattttgtgggcttatttcttcttgcctcttccccatcctttcaagagagaacttatttttgaaaagtatctatatatacacacacacacacacacacacatattattatttaggtttttataccatactgtattggcgagaataccactatcattgtcctttacagtctatttcttcccccaagtcttggtctttttttattttctattttttcatgaaccacacaggagactttaacatcctggtcttttctgtttcttctttgtttccccaagtttgtctgtccccctttgccttccctgagtgttgaacatcaggtagtaaaaggctaaacgcaatttcttgcatgtcaatctattctttttctatgtttgactctgatgcagtgtgtttagcgtgtctagtagctggctactcctatttaaaaactcttcctggtagaagacaacccaaagacccttttcgatgaggtggtttctcattctacatcctctgatctctatagactgtaggatgctttgctttcaaagataactgggttagagggtggggtgtgcaataggtgatttatcatggtttttttcattatcaatattacatggatgattttctcagattcttctgaaagaagaaattgacaggcactgctagattcagctattgaatggctgaagagattgagtatttgaccttctctcaaaatcataaagtgagaattcataaggcacccaatgttaagatttatccagatttttacattttgatttcttctctctgtggggtggcaagttgagggagcattcttcattttagcttttacctgacaaccaaacttgcctttaccccatccctagaattggtgctcttggaatattgctgttaccatcatttttggggggccatcttcctaatgctacacacagcctgacaggggagcagcagatgaaagggtatgctattctgtttccagatgtttctttatgtaaatatgacgccaatgtaaatcctgtgtcaagatcatagagaatggtgctttttactacagttagcacatgcatttttagaaactactacatgttttagagaatctttgctgtgtatatgtaaactgtattgttcaactgttaacaaataataaattatttcattatt

SEQ ID NO: 151978 - DNA, 1534 bp, Homo sapiens
  Payload ID: 9920
  Gene Symbol: MXD3
  Gene Name: MAX dimerization protein 3
  Uniprot ID: Q9BW11
  ENST ID: ENST00000423571
  CDS Start-End: 66-1232
aaaagtgctgcagccgcttgctccggccggcaccctaggccggcccgccgccagctgtcgccgacatggaacccttggccagcaacatccaggtcctgctgcaggcggccgagttcctggagcgccgtgagagagaggccgagcatggttatgcgtccctgtgcccgcatcgcagtccaggccccatccacaggaggaagaagcgacccccccaggctcctggcgcgcaggacagcgggcggtcagtgcacaatgaactggagaagcgcaggagggcccagttgaagcggtgcctggagcggctgaagcagcagatgcccctgggggccgactgtgcccggtacaccacgctgagcctgctgcgccgtgccaggatgcacatccagaagctggaggatcaggagcagcgggcccgacagctcaaggagaggctgcgcagcaagcagcagagcctgcagcggcagctggagcagctccgggggctggcaggggcggccgagcgggagcggctgcgggcggacagtctggactcctcaggcctctcctctgagcgctcagactcagaccaaggtgagtgccccgaggctgaggggttgtgtggccctcggggcgagccaggtcttctgaccggacccctccccgcgcagaggagctggaggtggatgtggagagcctggtgtttgggggtgaggccgagctgctgcggggcttcgtcgccggccaggagcacagctactcgcacggcggcggcgcctggctatgatgttcctcacccagggcgggcctctgccctctactcgtgccaggcccacttgccaggcaggagccctccccaagccttcagggctgctcggagtcacctgttggaatggactaaaaggacccttgtgtgggaacaggtgctccccaaacaccctgctgctggctgccaggcaggccctctggaagggaaggggcaggactcatcaggacctccctggacccctgcagggcaggcagcttgggcccgagcccaagcatttggctctgctgcccccaaggggacaggaagcctcttgggcctcttcccttcctggacaaggccccctgcctttgcctcacataaactgtacagtattttcattaaaagcctctttcataacttcccgtccatagtcttgcctaatgaaaacgggggaactcccaaccacagacccactggaagaggaaataatatcagttcccatcactgacactgttggccgtgccaggcagtgcacttaattctcacaacttgaggctgttctgtctccacttcacggatggtagaaatgaggctgagtgacgtgactcgcctgaggtccaaaaacagtgaagccaagattcaaaccagagccttccgactccagagctggggccaactgaattcaacaagtatttattgagtgtctattatgtgctagatactgagacacatcagagaacaaaaccaaaagccctgcccttgtcgggcttacagtctagcacttaccgccagttaacctgcaggctacct

SEQ ID NO: 151979 - DNA, 1483 bp, Homo sapiens
  Payload ID: 9920
  Gene Symbol: MXD3
  Gene Name: MAX dimerization protein 3
  Uniprot ID: Q9BW11
  ENST ID: ENST00000439742
  CDS Start-End: 480-1100
cggccggaggccccgcccccgcggcacccacgtgcagcggctgggcccggcgctttcaggggaccaccaggcccccagagcgccgtgctatgttgggggctagtcactagcacggggctggaagctgagatcaaagacgccaatgagccggcgtgggtggatgagtgaggcgggcaagaagcagcaccggttagcctgagggttcgctccagggccaggcctggagccagcgcccttacctgcccctggaaagtctgagaccactcggggcggggcggctgccggagggtgggctgcggctccgtggcgggttccagaggggcggagccaagggctgggcgttcccgcgggcggggcgtcccgggggcggggcgggcccctgtgtttgttgcaccgtgtcagttactttgtaacaaaagtgctgcagccgcttgctccggccggcaccctaggccggcccgccgccagctgtcgccgacatggaacccttggccagcaacatccaggtcctgctgcaggcggccgagttcctggagcgccgtgagagagaggccgagcatggttatgcgtccctgtgcccgcatcgcagtccaggccccatccacaggaggaagaagcgacccccccaggctcctggcgcgcaggacagcgggcggtcagtgcacaatgaactggagaagcgcaggagggcccagttgaagcggtgcctggagcggctgaagcagcagatgcccctgggggccgactgtgcccggtacaccacgctgagcctgctgcgccgtgccaggatgcacatccagaagctggaggatcaggagcagcgggcccgacagctcaaggagaggctgcgcagcaagcagcagagcctgcagcggcagctggagcagctccgggggctggcaggggcggccgagcgggagcggctgcgggcggacagtctggactcctcaggcctctcctctgagcgctcagactcagaccaagaggagctggaggtggatgtggagagcctggtgtttgggggtgaggccgagctgctgcggggcttcgtcgccggccaggagcacagctactcgcacggcggcggcgcctggctatgatgttcctcacccagggcgggcctctgccctctactcgtgccaggcccacttgccaggcaggagccctccccaagccttcagggctgctcggagtcacctgttggaatggactaaaaggacccttgtgtgggaacaggtgctccccaaacaccctgctgctggctgccaggcaggccctctggaagggaaggggcaggactcatcaggacctccctggacccctgcagggcaggcagcttgggcccgagcccaagcatttggctctgctgcccccaaggggacaggaagcctcttgggcctcttcccttcctggacaaggccccctgcctttgcctcacataaactgtacagtattttcattaaaagcctctttcataacttcc

SEQ ID NO: 151980 - DNA, 2269 bp, Homo sapiens
  Payload ID: 9920
  Gene Symbol: MXD3
  Gene Name: MAX dimerization protein 3
  Uniprot ID: Q9BW11
  ENST ID: ENST00000427908
  CDS Start-End: 69-650
aacaaaagtgctgcagccgcttgctccggccggcaccctaggccggcccgccgccagctgtcgccgacatggaacccttggccagcaacatccaggtcctgctgcaggcggccgagttcctggagcgccgtgagagagaggccgagcatggttatgcgtccctgtgcccgcatcgcagtccaggccccatccacaggaggaagaagcgacccccccaggctcctggcgcgcaggacagcgggcggtcagtgcacaatgaactggagaagcgcaggagggcccagttgaagcggtgcctggagcggctgaagcagcagatgcccctgggggccgactgtgcccggtacaccacgctgagcctgctgcgccgtgccaggatgcacatccagaagctggaggatcaggagcagcgggcccgacagctcaaggagaggctgcgcagcaagcagcagagcctgcagcggcagctggagcagctccgggggctggcaggggcggccgagcgggagcggctgcgggcggacagtctggactcctcaggcctctcctctgagcgctcagactcagaccaagtcttgcctaatgaaaacgggggaactcccaaccacagacccactggaagaggaaataatatcagttcccatcactgacactgttggccgtgccaggcagtgcacttaattctcacaacttgaggctgttctgtctccacttcacggatggtagaaatgaggctgagtgacgtgactcgcctgaggtccaaaaacagtgaagccaagattcaaaccagagccttccgactccagagctggggccaactgaattcaacaagtatttattgagtgtctattatgtgctagatactgagacacatcagagaacaaaaccaaaagccctgcccttgtcgggcttacagtctagcacttaccgccagttaacctgcaggctacctggagccccgggcaagtcaccgcacctctgtgcctcggtcctcagctgcccaatgggagaataagcagacctggctcagacatgaatcatgtgcttggtgtactgcagatgccaaactgcatccccacaacccaccacgtagacagcagacagggctggaagttgatttttaatgataaagtacaatgaagggagggcagagaggctaagcctagctgtctggggtgctgtggtggtggtagactggctacacaaactgttgctgctgctgctgcttcttggtggccgccttgctggcgaggtccttggccttctctgtagctgccagtgccgtctcctttgccttctccttggcttccttggctgtctcaacaagtgttttggaaggggcctcgcctgtcgcgaacggcaggtggctgcctttagaagatgcctgaaagaccaacctaatttccctcccccatgacaccaatctcctctgggccaggctccactaaaaaggtggtattcaccctcctcccacccccagtacagacaaggagtcccagctcagagcagggcaatgactaacccagactccacgcccgctaggctgaatgagcctctccctatgaggaatatccacatacccagaaactcaccttgcagcttagccaagatatattcaaaacccttcatagtcttggtcacgttgcttttgaatcgggcaagaccaaattcctggcatgagatgagaatgggaaggatactgagttgcccactgaccccagcccagccccaacaccgaaagcactgggtcccagagccccagcagccccaacaacactgctcacctggacagctctggagacaccaaataagctagaggagacccaggcttcccggcggatttcagtccagccactgttgtcagagttcacacagtaaacacatcgttcctccaccacctatgcagaggccaaccacaatcgtggaacagtctttcattttgccaacttgcacataaatctgactccctgtcacttttcatgaggcgaagcaatacaatgaaaatccattccttcccctgactgcacctccaagtggcactgacagaacaagaagccataaataaggtcgttttgctctcgaaaacctctcttctgactcttaaactagaaggcaaaaggtctctctcttgagatcaacaaagggccttccagcccatcctgctcctggattttgttttgtgcatctagacgcatgcagtgttttagccgccttccaccagctgcagctctggagcttcctgacagtccaaataaaaacatttgcccgg

SEQ ID NO: 151981 - DNA, 861 bp, Homo sapiens
  Payload ID: 9920
  Gene Symbol: MXD3
  Gene Name: MAX dimerization protein 3
  Uniprot ID: Q9BW11
  ENST ID: ENST00000513063
  CDS Start-End: 88-708
gaaaaggccatttcgcgtgcctccaggtgctgcagccgcttgctccggccggcaccctaggccggcccgccgccagctgtcgccgacatggaacccttggccagcaacatccaggtcctgctgcaggcggccgagttcctggagcgccgtgagagagaggccgagcatggttatgcgtccctgtgcccgcatcgcagtccaggccccatccacaggaggaagaagcgacccccccaggctcctggcgcgcaggacagcgggcggtcagtgcacaatgaactggagaagcgcaggagggcccagttgaagcggtgcctggagcggctgaagcagcagatgcccctgggggccgactgtgcccggtacaccacgctgagcctgctgcgccgtgccaggatgcacatccagaagctggaggatcaggagcagcgggcccgacagctcaaggagaggctgcgcagcaagcagcagagcctgcagcggcagctggagcagctccgggggctggcaggggcggccgagcgggagcggctgcgggcggacagtctggactcctcaggcctctcctctgagcgctcagactcagaccaagaggagctggaggtggatgtggagagcctggtgtttgggggtgaggccgagctgctgcggggcttcgtcgccggccaggagcacagctactcgcacggcggcggcgcctggctatgatgttcctcacccagggcgggcctctgccctctactcgtgccaggcccacttgccaggcaggagccctccccaagccttcagggctgctcggagtcacctgttggaatggactaaaaggacccttgtgtgggaacaggtgctccccaaacaccc

SEQ ID NO: 151982 - DNA, 440 bp, Homo sapiens
  Payload ID: 9920
  Gene Symbol: MXD3
  Gene Name: MAX dimerization protein 3
  ENST ID: ENST00000502529
  CDS Start-End: 67-440
caaaagtgctgcagccgcttgctccggccggcaccctaggccggcccgccgccagctgtcgccgacatggaacccttggccagcaacatccaggtcctgctgcaggcggccgagttcctggagcgccgtgagagagaggccgagcatggttatgcgtccctgtgcccgcatcgcagtccaggccccatccacaggaggaagaagcgacccccccaggctcctggcgcgcaggacagcgggcggagggcccagttgaagcggtgcctggagcggctgaagcagcagatgcccctgggggccgactgtgcccggtacaccacgctgagcctgctgcgccgtgccaggatgcacatccagaagctggaggatcaggagcagcgggcccgacagctcaaggagaggctgcgcagcaagcagcagagcctgcagcggcagctgga

SEQ ID NO: 151983 - DNA, 555 bp, Homo sapiens
  Payload ID: 9920
  Gene Symbol: MXD3
  Gene Name: MAX dimerization protein 3
  ENST ID: ENST00000513169
  CDS Start-End: 332-555
ccgcttgctccggccggcaccctaggccggcccgccgccagctgtcgccgacatggaacccttggccagcaacatccaggtcctgctgcaggcggccgagttcctggagcgccgtgagagagcctgacgcgggcggggactctctctggcagaggccgagcatggttatgcgtccctgtgcccgcatcgcagtccaggccccatccacaggaggaagaagcgacccccccaggctcctggcgcgcaggacagcgggcggtcagtgcacaatgaactggagaagcgcaggagggcccagttgaagcggtgcctggagcggctgaagcagcagatgcccctgggggccgactgtgcccggtacaccacgctgagcctgctgcgccgtgccaggatgcacatccagaagctggaggatcaggagcagcgggcccgacagctcaaggagaggctgcgcagcaagcagcagagcctgcagcggcagctggagcagctccgggggctggcaggggcggccgagcgggagcggctgcgggcggacagtctggactcctcagg

SEQ ID NO: 151984 - DNA, 4056 bp, Homo sapiens
  Payload ID: 9921
  Gene Symbol: MXD4
  Gene Name: MAX dimerization protein 4
  Uniprot ID: Q14582
  ENST ID: ENST00000337190
  CDS Start-End: 315-944
atcccagcccagctctgcatctgtcaacattctcggcccggcccgaggcgctcgacccgtccccattggccccagcccggcccggcgcccgcccccggggcgcgaacgccgcctcccattggctctgcgggccgccgctctcccttatgtgtcaatttgagggcctgaggcggagggtggcggccgagcgccggagtccgcggagtctggaagtgcggcggccgggcgcgcggggtgggcggcgagcggagccggccggagcgggccgggcagcggccgccgccgtcccggggcggacgggcgcgggcgggaggatggagctgaactccctgctgatcctgctggaggcggccgagtacctggagcgcagggatcgagaggccgagcacggctacgcctcggtgctgcccttcgacggcgacttcgccagggagaaaacaaaggcggccggcctggtgcgcaaggccccgaacaacaggtcttcacacaacgagctagaaaagcacagacgagccaaactcaggctgtaccttgagcagctcaagcaactggtgcccctgggccccgacagcacccgccacaccacgctgagcctcctgaagcgggccaaggtgcacatcaagaaactggaggagcaggaccgccgggcactgagcatcaaggagcagctgcagcaggagcatcgtttcctgaagcggcgcctggagcagctgtcggtgcagagcgtggagcgcgtgcgcacagatagcacgggctctgctgtctccacggacgactcagagcaagaagtggacatagagggcatggagtttggccctggtgagctggacagtgttggcagcagcagtgacgcggacgaccactacagcctgcagagtggcaccggcggcgacagtggcttcgggccccactgccggcggctgggccgccccgccctctcgtaggcccgtgccctctgctccttggcctgcctgcccgccagccacgcgtgtcagccctccagttctccttcagttgacgccagcctctccacaggcccactgctgtgccattctggaagctccagctgctgctgggctgcctggcactgcccgcttgccggtcagggcctgccgagctgcctgccccttccagctgggcagagtcccctgcaaggaggcagggcccagcttccacatccggagccctggtcagcatagccgcccacggtctgttctcagattcctaatcattccagaagtattaaacgtcattgctgcaaacctcggcaggtgccgtgtgaggggcttaatgaccaccacagggagctcagaccccaaccctggatcccaggagaaaggagtggaccgaggaaggaaggaaggcaaggctgtctgtccatccgtccgtctgtccacctacctgtcagtccacataggctcctggcgtggacaaggggtctgtgaagggcgggaactgggtgagcacctggggcaggtgggtggttaaggtccttcccacttcgcaggtgtcagaacctagggctgggctctcggggccaggcaggccagcccagcccacgccgagctgggcagcgtctgctctggtaggactgtcagacgcacacgcgcacgcacctagacacacccactcatgtacatgctcacacatgcagacacacctgggcgtcccgaggtcacatgttctggggatgatggccttcaggggtcatctggcaaacagcccctgggctgtgcctggatccccctctagctcctgctcacccacgcccacccagtagtcctgcctgtctgcacaggagaggggcttctcttcctggctggggctggggtgaactggaggctggttaagttgcagccgctgggtcctcgggggcttactcatctcccttttttaaacaaaaagcaaaaaagtaaaatgctgcactgcccagcagcccggttagggctcctggagccaccttaggaaagggcttctcatgagctctgctgcggcagcttcagctggcagagaggctttcccagaaaaaaaaaaaaaaccatttttaaaaagaagaaagcctaaagactctcggcctagggacgtccgtgtgtgccgcctctgtttcctgtaccagatttttgtattctattttcctagctgttgttgcgtccttgtttgctgaggggtgggagccacccagcgtctcagggacctgtccctccgtcacgtcgtcaaagtgtgccttgtgtcttgtgtcaggccttgcccttcccaccagcatgtccctcgtggctcagggtgccccaggcctgcccagctagtgctgtcctcccatctcctgtgggcagcccctcccggcagccagggcttcctggaggcgatgcagccaggcccctgtgggtggcacggaggggctgtgacctggtccccagtgttgccctccccagtggctggcaggggcctgcttgctcactagagagatggattctcacctgtcacctgactcgagccccctgcttcctggcctaggcgagggttccaggtttcagacactggcagccaatgaagactgtgctcgctgggtggtgcaggcctggcaccaggaggcttgcacccgcctttccttcctgacgtcctctgtccttggggctggcccatagcagtgcctgccgtgcctctggtacatctgtagccaattcccatatcatggggaaaattcgtgtctattttcagtcgtacgcatagacgccccaggatggggggcccactgtggcggaagggggtccctggaaacaactctggcacagaacctgccctgcaggctgtagggggcatggtgcctggagctgaggggcatccgaacgcgttgcgggtggttgtgaggaggcctgtctgcatctccttccggccccactggggtccaggggtgcccagaaaggagcttcccctgcctgcctgagtctgtccccccaggcttcatttcaaacaccgtggcacctccgagcaaggcgggccgtgtgtaaaagcttgcttccccagccagcactgcagggccctgaggtggtcgtgtccctgccctcaattcttgaagcaccagctccctgccccaccctccagtgcctgaggcagctaggggcttctgctctcatctctgaccagcagaatccacccggtgaccagtggtggcccctcagcccaccctcccggcagctcagcctgtggctcttgaggccgtggttcccacgtggactgggaggcagtctcagccacccggggtgctgttcagctgcccctccctgccatcagcaggtgggtgaggggttgcccactgggtgggggcccgtgctaggagtcaccacatgctccaacctcccactgctccctgtcaggggcccaggctgccatcactggaggctgcagggaccaagaggccatcaccgtgtctatagagagcagacagaagcagaacagagcccggggctcctgagcctctgcgtgtgccctcccagcccacaccagtgctctcggccactgagcacccagactcaggcttgggttccccagccttattggaaggcagctcccgcataccaggataacccccgcaaaccacatagcagacccccgccatcctcgcagagtgggagaggctgcagcaaggctttgcctctgcagaccccatcttagtggcacggtgcttgggcctgtgtccccgggtggtggaaccctgtaccggtctgtggccctagggtccctgctctgtctgccccggcccgtgctgtccgctgggtgaggcaggctcccccgtgccctgcctccctctgtcagggaacctgggaccccctccccactgcctgcacagaggaccctgaccctcggccagcagggtggccccaggtccatgttgggcactagggcaggttccgtgccagagtcgggggccacacgagggcctggtgccggtgaggggggcgtgcgctagagggggaaaggggcccccggccacctgtccaccgtgtgggccgtgctgtgtccttatgtcattgtaatataaatacagatttttatatctca

SEQ ID NO: 151985 - DNA, 561 bp, Homo sapiens
  Payload ID: 9921
  Gene Symbol: MXD4
  Gene Name: MAX dimerization protein 4
  ENST ID: ENST00000510822
  CDS Start-End: 43-366
gcggccgccgccgtcccggggcggacgggcgcgggcgggaggatggagctgaactccctgctgatcctgctggaggcggccgagtacctggagcgcagggatcgagaggccgagcacggctacgcctcggtgctgcccttcgacggcgacttcgccagggagaaaacaaaggcggccggcctggtgcgcaaggccccgaacaacagcggcatcctgggaggcccgggagccctggctggcctgtggggtcctgcctggacacggaaggtggcctggagctgggagcgaggtccccctgcctcgttatcctccaggcagatgctgtggcacaccctgtggtgctgggaattgtgtgcccgcgtctgaatgggcaagacaggtcttcacacaacgagctagaaaagcacagagaccgcatcccaggcactcagaggctgagccacatcctccactgctccccgcgggcactaacattgccgatgagacttggataaggaggggaccttgttctccatttcctcacttgatctttcacccgacaccacgtacgtaagtcctgtc

SEQ ID NO: 151986 - DNA, 624 bp, Homo sapiens
  Payload ID: 9921
  Gene Symbol: MXD4
  Gene Name: MAX dimerization protein 4
  ENST ID: ENST00000513380
  CDS Start-End: 1-247
gctgcccttcgacggcgacttcgccagggagaaaacaaaggcggccggcctggtgcgcaaggccccgaacaacaggtcttcacacaacgagctagaaaagcacaggtgttccgtgatttctaaagcggtctgttcacggacctcccctgcaccccaccccagagaccgcatcccaggcactcagaggctgagccacatcctccactgctccccgcgggcactaacattgccgatgagacttggataaggaggggaccttgttctccatttcctcacttgatctttcacccgacaccacgtacacgagccaaactcaggctgtaccttgagcagctcaagcaactggtgcccctgggccccgacagcacccgccacaccacgctgagcctcctgaagcgggccaaggtgcacatcaagaaactggaggagcaggaccgccgggcactgagcatcaaggagcagctgcagcaggagcatcgtttcctgaagcggcgcctggagcagctgtcggtgcagagcgtggagcgcgtgcgcacagatagcacgggctctgctgtctccacggacgactcagagcaagaagtggacatagagggcatggagtttggccctggtgagctggac

SEQ ID NO: 151987 - DNA, 2424 bp, Homo sapiens
  Payload ID: 9922
  Gene Symbol: MXI1
  Gene Name: MAX interactor 1, dimerization protein
  Uniprot ID: P50539
  ENST ID: ENST00000239007
  CDS Start-End: 219-905
ggtaaacaaaccacgcgcgggctgcccgcggcacggcgggcgcggctggcgcggctggggcggcaggggcggcggagagcgcgccgagccgcggccgagctggcccgcccgcccgtcgcacatgttccggaacggcgcccggccgtagccgcctgcggcgcctcctgtcggcccgagaagggagtgcggagaggcgccggtcgccacccgcggtgcccatggagcgggtgaagatgatcaacgtgcagcgtctgctggaggctgccgagtttttggagcgccgggagcgagagtgtgaacatggctacgcctcttcattcccgtccatgccgagcccccgactgcagcattcaaagcccccacggaggttgagccgggcacagaaacacagcagcgggagcagcaacaccagcactgccaacagatctacacacaatgagctggaaaagaatcgacgagctcatctgcgcctttgtttagaacgcttaaaagttctgattccactaggaccagactgcacccggcacacaacacttggtttgctcaacaaagccaaagcacacatcaagaaacttgaagaagctgaaagaaaaagccagcaccagctcgagaatttggaacgagaacagagatttttaaagtggcgactggaacagctgcagggtcctcaggagatggaacgaatacgaatggacagcattggatcaactatttcttcagatcgttctgattcagagcgagaggagattgaagtggatgttgaaagcacagagttctcccatggagaagtggacaatataagtaccaccagcatcagtgacattgatgaccacagcagcctgccgagtattgggagtgacgagggttactccagtgccagtgtcaaactttcattcacttcatagaacccagcatgacataacagtgcagggcaaaatattcactgggccaattcaatacaaacaatctcttaaattgggttcatgatgcagtctcctctttaaaacaaaacaaaacaaaacaaaactatacttgaacaaaagggtcagaggacctgtatttaagcaaatacttagcaaaaagtggggcagagcctcccaaggagaacaaatattcagaatattcatattggaaaaatcacaatttttaatggcagcagaaaacttgtgtgaaattttcttgatttgagttgattgagaagaggacattggagatgccatcctctttctcttttctagtttgctcatactacattgagtagacacatttaaggatggggttatgaacccttcctgagctttatggtcctaaaagcaaaataaaaactattcgaatgaaaagacaagaaaatcaggtattaatcttggatagctaataatgagctattaaaactcagcctgggacagtttatcatgaagcctgtggatgatcaatcctttattattattttttttttttgaaaaaagctcatttcatgctctgcaaaaggagagactcccatgaagccttttgaaagggatcatcatgcagctcaactttctgttggattccatgctaagcaagctaaccttatcctgcattgttagcactaggcacccagctgccacctctccatcctgctgcccttaggccacatgggagcagtccatgcatgacagcctctatcctacaaggcctatgagtatggattgggggggccaaaaggaaaaagctccatgtgcctctttgtctgcgtgggtcagaagagttgtgcacgcagattagcaggccaaggtctgagccacagcagcatttttatttcagattttgataactgtttatatgtgttgaaaaccaaaatgacatctttttaaagcttatccataaaaaaaaatagatgtcttttatagtggaaaaacacatggggaaaaaaatcatctattttgatgcagcatttgataatgataaaacacctcacacctcactctttatagtgcacaaaatgaatgaggtctgggctaggtagaaaaagggtcaatgctatttttgtttttagaatcattaccttttaccagcttttaaccatctgatatctatagtagacacactatcatagttaacatagtaagttcagcacttgtctcattttaatgtaaagatttgcttccattttcctacaggcagtctctctcttcctcacagtcccactgtgcaggtgctattgttactcttacgaatattttcagtaatgttattttcttctaagtgaaatttctagcctgcactttgatgtcatgtgttccctttgtctttcaaactccaaggttcccttgtggccctctcccttaccctgggaaggcctcttggagaccttacccctggctgtttggactttgtatactttaaataatttaactacccttaattacttaaaaaaaaaaaaaa

SEQ ID NO: 151988 - DNA, 3470 bp, Homo sapiens
  Payload ID: 9922
  Gene Symbol: MXI1
  Gene Name: MAX interactor 1, dimerization protein
  Uniprot ID: P50539
  ENST ID: ENST00000332674
  CDS Start-End: 205-1092
atacacacagactcacagcgagaccgacacacactcccatacactcacacacacaactgcaggcagcgaggctcgggaagtcaggccggcttttcgccccggcgccttctctgctccagccggccgggtctccctgggggcccggagctcggccgggccgcgcagccccgttagaggacgagctcggcggacccccgctcctccatgggcaaacgcgggcggccgcgcaaggaggcgcgctgcgagggcgcggggctggcccccgccgcgcccccggctgtgccccccgccgtggccgcgccccagcccccggccctgcccgaggaccccgctggggccaagcccaggtgccccttctcagacattttcaacaccagcgagaactcgatggagaagcacatcaacacttttctgcagaacgtgcagattctgctcgaggccgccagctacctggagcagatcgagaaagaaaacaaaaagtgtgaacatggctacgcctcttcattcccgtccatgccgagcccccgactgcagcattcaaagcccccacggaggttgagccgggcacagaaacacagcagcgggagcagcaacaccagcactgccaacagatctacacacaatgagctggaaaagaatcgacgagctcatctgcgcctttgtttagaacgcttaaaagttctgattccactaggaccagactgcacccggcacacaacacttggtttgctcaacaaagccaaagcacacatcaagaaacttgaagaagctgaaagaaaaagccagcaccagctcgagaatttggaacgagaacagagatttttaaagtggcgactggaacagctgcagggtcctcaggagatggaacgaatacgaatggacagcattggatcaactatttcttcagatcgttctgattcagagcgagaggagattgaagtggatgttgaaagcacagagttctcccatggagaagtggacaatataagtaccaccagcatcagtgacattgatgaccacagcagcctgccgagtattgggagtgacgagggttactccagtgccagtgtcaaactttcattcacttcatagaacccagcatgacataacagtgcagggcaaaatattcactgggccaattcaatacaaacaatctcttaaattgggttcatgatgcagtctcctctttaaaacaaaacaaaacaaaacaaaactatacttgaacaaaagggtcagaggacctgtatttaagcaaatacttagcaaaaagtggggcagagcctcccaaggagaacaaatattcagaatattcatattggaaaaatcacaatttttaatggcagcagaaaacttgtgtgaaattttcttgatttgagttgattgagaagaggacattggagatgccatcctctttctcttttctagtttgctcatactacattgagtagacacatttaaggatggggttatgaacccttcctgagctttatggtcctaaaagcaaaataaaaactattcgaatgaaaagacaagaaaatcaggtattaatcttggatagctaataatgagctattaaaactcagcctgggacagtttatcatgaagcctgtggatgatcaatcctttattattattttttttttttgaaaaaagctcatttcatgctctgcaaaaggagagactcccatgaagccttttgaaagggatcatcatgcagctcaactttctgttggattccatgctaagcaagctaaccttatcctgcattgttagcactaggcacccagctgccacctctccatcctgctgcccttaggccacatgggagcagtccatgcatgacagcctctatcctacaaggcctatgagtatggattgggggggccaaaaggaaaaagctccatgtgcctctttgtctgcgtgggtcagaagagttgtgcacgcagattagcaggccaaggtctgagccacagcagcatttttatttcagattttgataactgtttatatgtgttgaaaaccaaaatgacatctttttaaagcttatccataaaaaaaaatagatgtcttttatagtggaaaaacacatggggaaaaaaatcatctattttgatgcagcatttgataatgataaaacacctcacacctcactctttatagtgcacaaaatgaatgaggtctgggctaggtagaaaaagggtcaatgctatttttgtttttagaatcattaccttttaccagcttttaaccatctgatatctatagtagacacactatcatagttaacatagtaagttcagcacttgtctcattttaatgtaaagatttgcttccattttcctacaggcagtctctctcttcctcacagtcccactgtgcaggtgctattgttactcttacgaatattttcagtaatgttattttcttctaagtgaaatttctagcctgcactttgatgtcatgtgttccctttgtctttcaaactccaaggttcccttgtggccctctcccttaccctgggaaggcctcttggagaccttacccctggctgtttggactttgtatactttaaataatttaactacccttaattacttaaaaaaaaaaaaaagctttatgattttcataacttattgctgattttaatggattgttaatttcagtcctgtagttttattttatgtttagatagggctgggcaaggaaaaagaaaataaagacaaccatatttagcagtgcagttgagttgtgtgttaatgttagactatccctttgtgagtgacactttaacagcattcactgcttctatatatagtgtaccatcttggtcatacattacgcctcaacatatacttgtgctcttcctttgcctccagaagaagtttttccttgattgtgctatgtttcagtggaagaaattctttgaagtagatgtgagtgaaaaactgcatgcctttagaagcccagtatcagaacttgctacgtttcaggtgctagggacttaatgaaaaacaggacaaaacaattcctttttgtggcccaggtaaattatttctggtttcacttataattactaatggctgagtcaagatgttgtctctgtgtttgcttactcttgatcaagtgtgagacagtttgaagactgtgctaccatacaaagtgaatgaagccagtgactaagcttctgtttgttttgttattctcatggccttcgcttgcattatttgggccttcattcagatgaacttgaggtgccattttgttgcatatgtacaggattatgggctggaaagcatttgttataaacctatagtgcacattttaactgccccctaaattacccttccctgggtttgttttccttggggtggtgtagattgtatgagtaagaagtattaattttttaaaagacaaatcaactttgaagacacaaaagttaattggaagaaataaaaactgtgaacgaagaa

SEQ ID NO: 151989 - DNA, 2188 bp, Homo sapiens
  Payload ID: 9922
  Gene Symbol: MXI1
  Gene Name: MAX interactor 1, dimerization protein
  Uniprot ID: P50539
  ENST ID: ENST00000361248
  CDS Start-End: 121-669
catcgcccgaggcgtccgccctgcaaatctgccagcccccgagaggggtttggaaccttagcacccaagtctaagtcaacttcatagtgtgaacatggctacgcctcttcattcccgtccatgccgagcccccgactgcagcattcaaagcccccacggaggttgagccgggcacagaaacacagcagcgggagcagcaacaccagcactgccaacagacgagctcatctgcgcctttgtttagaacgcttaaaagttctgattccactaggaccagactgcacccggcacacaacacttggtttgctcaacaaagccaaagcacacatcaagaaacttgaagaagctgaaagaaaaagccagcaccagctcgagaatttggaacgagaacagagatttttaaagtggcgactggaacagctgcagggtcctcaggagatggaacgaatacgaatggacagcattggatcaactatttcttcagatcgttctgattcagagcgagaggagattgaagtggatgttgaaagcacagagttctcccatggagaagtggacaatataagtaccaccagcatcagtgacattgatgaccacagcagcctgccgagtattgggagtgacgagggttactccagtgccagtgtcaaactttcattcacttcatagaacccagcatgacataacagtgcagggcaaaatattcactgggccaattcaatacaaacaatctcttaaattgggttcatgatgcagtctcctctttaaaacaaaacaaaacaaaacaaaactatacttgaacaaaagggtcagaggacctgtatttaagcaaatacttagcaaaaagtggggcagagcctcccaaggagaacaaatattcagaatattcatattggaaaaatcacaatttttaatggcagcagaaaacttgtgtgaaattttcttgatttgagttgattgagaagaggacattggagatgccatcctctttctcttttctagtttgctcatactacattgagtagacacatttaaggatggggttatgaacccttcctgagctttatggtcctaaaagcaaaataaaaactattcgaatgaaaagacaagaaaatcaggtattaatcttggatagctaataatgagctattaaaactcagcctgggacagtttatcatgaagcctgtggatgatcaatcctttattattattttttttttttgaaaaaagctcatttcatgctctgcaaaaggagagactcccatgaagccttttgaaagggatcatcatgcagctcaactttctgttggattccatgctaagcaagctaaccttatcctgcattgttagcactaggcacccagctgccacctctccatcctgctgcccttaggccacatgggagcagtccatgcatgacagcctctatcctacaaggcctatgagtatggattgggggggccaaaaggaaaaagctccatgtgcctctttgtctgcgtgggtcagaagagttgtgcacgcagattagcaggccaaggtctgagccacagcagcatttttatttcagattttgataactgtttatatgtgttgaaaaccaaaatgacatctttttaaagcttatccataaaaaaaaatagatgtcttttatagtggaaaaacacatggggaaaaaaatcatctattttgatgcagcatttgataatgataaaacacctcacacctcactctttatagtgcacaaaatgaatgaggtctgggctaggtagaaaaagggtcaatgctatttttgtttttagaatcattaccttttaccagcttttaaccatctgatatctatagtagacacactatcatagttaacatagtaagttcagcacttgtctcattttaatgtaaagatttgcttccattttcctacaggcagtctctctcttcctcacagtcccactgtgcaggtgctattgttactcttacgaatattttcagtaatgttattttcttctaagtgaaatttctagcctgcactttgatgtcatgtgttccctttgtctttcaaactccaaggttcccttgtggccctctcccttaccctgggaaggcctcttggagaccttacccctggctgtttggactttgtatactttaaataatttaactacccttaattacttaaaaaaaaaaaaaa

SEQ ID NO: 151990 - DNA, 879 bp, Homo sapiens
  Payload ID: 9922
  Gene Symbol: MXI1
  Gene Name: MAX interactor 1, dimerization protein
  Uniprot ID: P50539
  ENST ID: ENST00000369612
  CDS Start-End: 240-818
ccctttagcggtggcagcccaaggggctgtagagatggcgcagaaagaccaggaactcggagactgtggtgtcgagagagaaaatgtctttctaagacttgttcgaagtacacaaaaatattgggcttaaagagactctttagaacagagagagttgaaagtaaaggggaatttttgaggcaagcgaagtcaatgaggtgaatgagtgtgaacatggctacgcctcttcattcccgtccatgccgagcccccgactgcagcattcaaagcccccacggaggttgagccgggcacagaaacacagcagcgggagcagcaacaccagcactgccaacagatctacacacaatgagctggaaaagaatcgacgagctcatctgcgcctttgtttagaacgcttaaaagttctgattccactaggaccagactgcacccggcacacaacacttggtttgctcaacaaagccaaagcacacatcaagaaacttgaagaagctgaaagaaaaagccagcaccagctcgagaatttggaacgagaacagagatttttaaagtggcgactggaacagctgcagggtcctcaggagatggaacgaatacgaatggacagcattggatcaactatttcttcagatcgttctgattcagagcgagaggagattgaagtggatgttgaaagcacagagttctcccatggagaagtggacaatataagtaccaccagcatcagtgacattgatgaccacagcagcctgccgagtattgggagtgacgagggttactccagtgccagtgtcaaactttcattcacttcatagaacccagcatgacataacagtgcagggcaaaatattcactgggccaattcaatacaaacaa

SEQ ID NO: 151991 - DNA, 889 bp, Homo sapiens
  Payload ID: 9922
  Gene Symbol: MXI1
  Gene Name: MAX interactor 1, dimerization protein
  ENST ID: ENST00000393134
  CDS Start-End: 128-784
cggccgagctggcccgcccgcccgtcgcacatgttccggaacggcgcccggccgtagccgcctgcggcgcctcctgtcggcccgagaagggagtgcggagaggcgccggtcgccacccgcggtgcccatggagcgggtgaagatgatcaacgtgcagcgtctgctggaggctgccgagtttttggagcgccgggagcgagagtgtgaacatggctacgcctcttcattcccgtccatgccgagcccccgactgcagcattcaaagcccccacggaggttgagccgggcacagaaacacagcagcgggagcagcaacaccagcactgccaacagacgagctcatctgcgcctttgtttagaacgcttaaaagttctgattccactaggaccagactgcacccggcacacaacacttggtttgctcaacaaagccaaagcacacatcaagaaacttgaagaagctgaaagaaaaagccagcaccagctcgagaatttggaacgagaacagagatttttaaagtggcgactggaacagctgcagggtcctcaggagatggaacgaatacgaatggacagcattggatcaactatttcttcagatcgttctgattcagagcgagaggagattgaagtggatgttgaaagcacagagttctcccatggagaagtggacaatataagtaccaccagcatcagtgacattgatgaccacagcagcctgccgagtattgggagtgacgagggttactccagtgccagtgtcaaactttcattcacttcatagaacccagcatgacataacagtgcagggcaaaatattcactgggccaattcaatacaaacaatctcttaaattgggttcatgatgcagtctcctctttaaaacaaa

SEQ ID NO: 151992 - DNA, 803 bp, Homo sapiens
  Payload ID: 9922
  Gene Symbol: MXI1
  Gene Name: MAX interactor 1, dimerization protein
  ENST ID: ENST00000453116
  CDS Start-End: 126-803
gtcaggccggcttttcgccccggcgccttctctgctccagccggccgggtctccctgggggcccggagctcggccgggccgcgcagccccgttagaggacgagctcggcggacccccgctcctccatgggcaaacgcgggcggccgcgcaaggaggcgcgctgcgagggcgcggggctggcccccgccgcgcccccggctgtgccccccgccgtggccgcgccccagcccccggccctgcccgaggaccccgctggggccaagcccaggtgccccttctcagacattttcaacaccagcgagaactcgatggagaagcacatcaacacttttctgcagaacgtgcagattctgctcgaggccgccagctacctggagcagatcgagaaagaaaacaaaaagtgtgaacatggctacgcctcttcattcccgtccatgccgagcccccgactgcagcattcaaagcccccacggaggttgagccgggcacagaaacacagcagcgggagcagcaacaccagcactgccaacagacgagctcatctgcgcctttgtttagaacgcttaaaagttctgattccactaggaccagactgcacccggcacacaacacttggtttgctcaacaaagccaaagcacacatcaagaaacttgaagaagctgaaagaaaaagccagcaccagctcgagaatttggaacgagaacagagatttttaaagtggcgactggaacagctgcagggtcctcaggagatggaacgaatacgaatggacagcattggatcaactatttcttcagatcgt

SEQ ID NO: 151993 - DNA, 634 bp, Homo sapiens
  Payload ID: 9922
  Gene Symbol: MXI1
  Gene Name: MAX interactor 1, dimerization protein
  ENST ID: ENST00000442296
  CDS Start-End: 281-634
gggtgctgggagataagaggaaggaggaacacggatgctggggggggtcaggggaagggacgaggccgggagaacactgagcgggggaaaaccggtggagaggggcctttgaatacctgcggggtgatgagatggggtccctttagcggtggcagcccaaggggctgtagagatggcgcagaaagaccaggaactcggagactgtggtgtcgagagagaaaatgtctttctaagacttgttcgaaagtgtgaacatggctacgcctcttcattcccgtccatgccgagcccccgactgcagcattcaaagcccccacggaggttgagccgggcacagaaacacagcagcgggagcagcaacaccagcactgccaacagatctacacacaatgagctggaaaagaatcgacgagctcatctgcgcctttgtttagaacgcttaaaagttctgattccactaggaccagactgcacccggcacacaacacttggtttgctcaacaaagccaaagcacacatcaagaaacttgaagaagctgaaagaaaaagccagcaccagctcgagaatttggaacgagaacagagatttttaaagtggcgactggaacagctgcagggtcctcaggagatggaa

SEQ ID NO: 151994 - DNA, 4996 bp, Homo sapiens
  Payload ID: 9923
  Gene Symbol: MNT
  Gene Name: MAX network transcriptional repressor
  Uniprot ID: Q99583
  ENST ID: ENST00000174618
  CDS Start-End: 407-2155
cggcggccgggggcagcgcggctccttcccttgttgtgtgtgtcggtgcctcctcgccatcttgttgcaaagccctttcttgtcggcgggactcccgggggccgcggggcgggaggcatcggaagggaggtagagagggaggggaagaagggaggcagtgccgccttttttttttttttgcatcccatttttttaaatttgcaattttatattttgcaaatattttgagagacattgatttttctccccgtgctcccccgttcttccctgcggagtgcgctgcgccgcccagccctgtcgccccccggaggtgatccctccctcctgcctgcccgccagcctgacctgtgcccggctcgcgggccgcagcctcggccccggcgcgcccccggcagctctcggcgcgatgagcatagagacgctactggaggcggcccgcttcctggaatggcaagcgcagcaacaacagagagcacgtgaggagcaggagcggcttcgcttggagcaggagcgagagcaggaacagaagaaggccaatagcctggccaggctggcacatacccttcctgtggaggaaccccgcatggaggcgccacccctgcctctgtctccaccggctcccccgccggcacccccaccaccacttgccacccctgccccactgactgtcatccctatccctgtggtgaccaactcccctcagcctctacccccacccccacccttgcccgcggcagcccagcctctgcccctggcgcctcgtcagccggccctggttggcgcccccggactcagcattaaggagcctgcccccctgcccagcaggccgcaggtgcccacccctgctcccctactgccggactcgaaggccaccattccacccaatggcagccccaagcctttgcagcccctccccacgcctgtcctgaccatagcgccacaccctggagtccagcctcagctggccccccagcagccgcccccacccacgctggggaccctgaagttggcaccagctgaagaagtcaaatccagtgaacagaagaagaggcccggggggatcggaaccagagaagtccacaacaaattggagaagaacaggagggcccatctgaaagagtgctttgagaccctgaagcggaacatccccaacgtggatgacaagaagacgtccaatctgagcgtgctgcggacggcgctgcggtacatccagtccctgaagaggaaggagaaggaatatgagcatgaaatggagcggctggcacgtgagaagattgccacgcagcagcggctggcagagctcaagcacgagctgagccagtggatggacgtactggagattgaccgcgtgctgcggcagacgggccagcccgaggatgaccaggcctccacctccaccgcctctgagggtgaggacaacatagacgaggatatggaggaggaccgggcgggcctgggcccacctaagctgagccatcgtccccagccggagctgctgaagtccaccctgccaccccccagcaccacccctgcgcctctgcctccacacccacaccctcacccccactccgtggccctacctcctgcccacctccccgtgcagcagcagcagccacagcagaagacccctctgccagcccctcctcccccaccggctgcccctgcccagacactggtgccagctccagcccatctggtggcgacggctgggggtggctccacggtcatcgcccacacagccaccactcacgcttcagtcatccagactgtgaaccacgttctgcaggggccaggcggcaagcacatcgcccacatcgccccctcggcccccagccctgcggtgcaactggcgcctgccacaccccccattgggcacatcactgtgcaccctgccaccctcaaccatgtggcccacctgggctcccagctgcccttgtacccgcagcccgtggcagtgagccacatcgcccacaccctctcgcaccagcaagtcaacggcacggccggcctggggcccccggctactgtcatggcaaagccggccgtgggggctcaggtggtgcaccacccccagctggtgggccagaccgtgctcaaccctgtgaccatggtcaccatgccctccttcccagtcagcacactcaagctggcttgaggacgaggccactcagaggcccccagtggggacagggagggggacctgtcccccactctctcacccaccagctccacacattccagccaggcccaggccagcccccccacccacccccaggcctcctaggggaagggggtgcaaagactctgagccaagggagggaagggccaccctgctgcactaggacttggtaagatgactctgagaaaatgcgagactctgatggaatgtgccacctgtccggcccagtgccagctccagtgccgctcctgcttcccctccctaccctcggaaatcagtgcgatgtggacgtcacgctccctgacttctcccccgccctgccccgccttcgtgtgctgctgctgctattgctgtctggtgaggtggcccaggcccccggctttcctccggagcctcatgttctcttcccaggcctttggaggggaaatggggaaagcagaactgaagccacttggcccagaaagctgcggattggggtgataaggggccttgctctgagcacaggtgacagatcataggaagtggctggtctggagtcccacccggacaggtggggcctcagcctggggctctctgacccggttgcagtcactgtgattcgttaccgtagatactacttaaaatgattctctaccaacaataaaccaaacccagccactgccaagcttcctgtgccctcaccccaatccctgccactgggctctggacctcaggagggcaggctgaggtggggaaggagggacttggctgtccttccccttccccgtcccctgcagcctgggtctggatgggaggagagccactgggcccctgtccccagtccccagtccccagccctgggcttggctcttggcttccagaaggcagcaaagaggggcgctgtcctgcgttcagcccctgatctctgacctctgctgagtgctgggcactgctccaagggacaggtgggcctggcggcctgtgggtttgggtgcctcctgcagtttgggagacatggaccagcatctggtcttgtttccaggagcatagaagccacatcgttgagacatcaggaaggtaaaaacccagcggcttagccaagccctaagcctgtccccagaccaaccctgggacctatacagaacagagggccagagctagggctgctgcttctgctccagcccctttgcctctgtcctcccatcccctcaacaccctgcttctcccggggacgcttttgagtgggccctgcccggggagctgcagagcagcagcacctttctctgagaagaggtccttggttgggtcaaggacagggctgagcgtggaagggggaggagtcaggggctctgtgttaggatgcggctttctctgcctctgggcagcctgctttggcctttccttgtatgtgggtgtttattacaagtggctttgtgtcagacacgctcggctccccacctggacacacactcaccagtggcctttcagtgtagcgggaggaagccggtgtccctggatgtgaagctcacactgatgggctggggcaggggcctgggccggcgagggggccggggggaggggacagagctgaggatttcctggagtgccctgcaggcacagaggaggtcagcaaaggtcttgaatagattttctctggaaataaagaatccttagatgcctaaaaattcccttcctgttccctcctggtcctggacacctcccaggggactgttccttatttctctctcctggtgtgggtaaagggacagttacaaaccaggtcaccatcctcagaggctgagccctgtacccaccccagcacagccacctccgccagaccccgtggctctgggagagccagctttgctattcccattgtgacagcgatggcaggcctgacccacggggcagttagagcagcctcgtggagctcgcccctcccctcagcctgcccacctctccctgcatcctgaggccagtggcccccgggcctgcacagatacctcatcatccacccgctgcccctccccgtccctgtcccccagcatcgggggcctgcaaatctagtgccgaatgactatgtccagattggtgacgatgggtgttgctgtttttcttgtcgtttgtgaacgctgtgatgctgtgtgcccaagtgggcagtcaccacccagcccttccttgggcgtctcccccagagtgctgtcgggaccacatctgtcctcaccctgtgggaccgcctggccctccctccctagcccttccagcctgggacacacacacacacacacacacacacacacgcacgcacacgcacacatcttacctctcatgcgtgttttaccttttgatgttcagagtggctcactggctgggagtccttacctcggggagagggggaggttggttccttggggggccaaagaaggcagggaatgcctggagggtaactggggggccaccatgaccccttctctctccagaaacagctgcttctccccccatcccagggtcccacccccaacccccagaggtggcccttgtttacagtgaggactcggccactgtgtctctgtttcctgaaatataaactgtagcgaccccagactgtagagatttttatgtgtttggatacatctgctgtgtggaaaaaaaaaaaaactacaaaaaccctaattttgtacatactgtatttttactattgaactgtattctagtggctgttcatgctccaagactttagttaccgagacatgaatactatccatgtaataagcacttgcctggaataaaatataaaactgaaataaacctgcactgaaacctgagatggagctgcca

SEQ ID NO: 151995 - DNA, 606 bp, Homo sapiens
  Payload ID: 9923
  Gene Symbol: MNT
  Gene Name: MAX network transcriptional repressor
  ENST ID: ENST00000575394
  CDS Start-End: 393-494
agcgcggctccttcccttgttgtgtgtgtcggtgcctcctcgccatcttgttgcaaagccctttcttgtcggcgggactcccgggggccgcggggcgggaggcatcggaagggaggtagagagggaggggaagaagggaggcagtgccgccttttttttttttttgcatcccatttttttaaatttgcaattttatattttgcaaatattttgagagacattgatttttctccccgtgctcccccgttcttccctgcggagtgcgctgcgccgcccagccctgtcgccccccggaggtgatccctccctcctgcctgcccgccagcctgacctgtgcccggctcgcgggccgcagcctcggccccggcgcgcccccggcagctctcggcgcgatgagcatagagacgctactggaggcggcccgcttcctggaatggcaagcgcagcaacaacagagagcacgtgtccctgaagaggaaggagaaggaatatgagcatgaaatggagcggctggcacgtgagaagattgccacgcagcagcggctggcagagctcaagcacgagctgagccagtggatggacgtactggagattgaccgcgtgctg

SEQ ID NO: 151996 - DNA, 1420 bp, Homo sapiens
  Payload ID: 9924
  Gene Symbol: MBTD1
  Gene Name: mbt domain containing 1
  Uniprot ID: Q05BQ5
  ENST ID: ENST00000376381
  CDS Start-End: 98-1330
ctcacgagtggccctggagcaggaagtggtggagcagatcttccttgtttgggaggagcctgaggtggacctcgcgtcctgagtctggaaggcacctatggggacctgctggggtgatatctcagaaaatgtgagagtagaagttcccaatacagactgcagcctacctaccaaagtcttctggattgctggaattgtaaaattagcaggttacaatgcccttttaagatatgaaggatttgaaaatgactctggtctggacttctggtgcaatatatgtggttctgatatccatccagttggttggtgtgcagccagcggaaaacctcttgttcctcctagaactattcagcataaatatacaaactggaaagcttttctagtgaaacgacttactggtgccaaaacactgcctcctgatttctcccaaaaggtttcagagagtatgcagtatcctttcaaaccttgcatgagagtagaagtggttgacaagaggcatttgtgtcgaacacgagtagcagtggtggaaagtgtaattggaggaagattaagactagtgtatgaagaaagcgaagatagaacagatgacttctggtgccatatgcacagcccattaatacatcatattggttggtctcgaagcataggtcatcgattcaaaagatctgatattacaaagaaacaggatggacattttgatacaccaccacatttatttgctaaggtaaaagaagtagaccagagtggggaatggttcaaggaaggaatgaaattggaagctatagacccattaaatctttctacaatatgtgtcgcaaccattagaaaggtgctagctgacggattcctgatgattgggatcgatggctcagaagcagcagacggatctgactggttctgttaccatgcaacctctccttctattttccctgtcggtttctgtgaaattaacatgattgaacttactccacccagaggttacacaaaacttccttttaaatggtttgactacctcagggaaactggctccattgcagcaccagtaaaactatttaataaggatgttccaaatcacggatttcgtgtaggaatgaaattagaagcagtagatctcatggagccacgtttaatatgtgtagccacagtaactcgaattattcatcgtctcttgaggatacattttgatggatgggaagaagagtatgatcagtgggtagactgtgagtcacctgacctctatcctgtagggtggtgtcagttaactggatatcaactacagcctccagcatcacagtgtaagttggtatacagaaaaggtgtccttttgtaaaaatcagcaattctccagaggactatctcacataagtcatcttatgagctcacaggacaagaatatacctatgtctgattggttgccagg

SEQ ID NO: 151997 - DNA, 3224 bp, Homo sapiens
  Payload ID: 9924
  Gene Symbol: MBTD1
  Gene Name: mbt domain containing 1
  Uniprot ID: Q05BQ5
  ENST ID: ENST00000405860
  CDS Start-End: 220-729
tcccggggagaggcacctgcccccagcccggggagggggcgccgcgggctcggggagcacggacaacccctacccatgaggccctgatggaaaacacaaaggatctgagtcggaagagacattagaggtcatccaaagcagccgtcccctctgcagcctctctgacaagtgactgaacattcttcacgatctgaaaggaaaagaagagattctttcgggatgtttgacggttatgatagctgcagtgaggacacaagcagcagctccagctccgaagagagtgaggaagaagtcgctcctttaccttctaatctcccgattatcaaaaacaatgggcaagtctacacatacccagatggtaaatctggcatggctacctgtgagatgtgtgggatggttggcgtccgagatgctttttactctaaaacaaagcgtttctgtagcgtttcatgttcaagaagttactcgtcaaactccaagaaggcaagcattttggccagacttcagggtaagcctccaacaaagaaagcaaaagttcttcagaaacaacctttagttgctaagctagccgcatatgctcagtatcaagctaccttgcaaaatcaagcaaagacaaaagcagcagtctccatggaaggtttcagctggggtaactacatcaatagcaatagctttatagcagctccggttacctgttttaaacatggaaggagagtcgctcccagatagccctcacgagtggccctggagcaggaagtggtggagcagatcttccttgtttgggaggagcctgaggtggacctcgcgtcctgagtctggaaggcacctatggggacctgctggggtgatatctcagaaaatgtgagagtagaagttcccaatacagactgcagcctacctaccaaagtcttctggattgctggaattgtaaaattagcaggttacaatgcccttttaagatatgaaggatttgaaaatgactctggtctggacttctggtgcaatatatgtggttctgatatccatccagttggttggtgtgcagccagcggaaaacctcttgttcctcctagaactattcagcataaatatacaaactggaaagcttttctagtgaaacgacttactggtgccaaaacactgcctcctgatttctcccaaaaggtttcagagagtatgcagtatcctttcaaaccttgcatgagagtagaagtggttgacaagaggcatttgtgtcgaacacgagtagcagtggtggaaagtgtaattggaggaagattaagactagtgtatgaagaaagcgaagatagaacagatgacttctggtgccatatgcacagcccattaatacatcatattggttggtctcgaagcataggtcatcgattcaaaagatctgatattacaaagaaacaggatggacattttgatacaccaccacatttatttgctaaggtaaaagaagtagaccagagtggggaatggttcaaggaaggaatgaaattggaagctatagacccattaaatctttctacaatatgtgtcgcaaccattagaaaggtgctagctgacggattcctgatgattgggatcgatggctcagaagcagcagacggatctgactggttctgttaccatgcaacctctccttctattttccctgtcggtttctgtgaaattaacatgattgaacttactccacccagaggttacacaaaacttccttttaaatggtttgactacctcagggaaactggctccattgcagcaccagtaaaactatttaataaggatgttccaaatcacggatttcgtgtaggaatgaaattagaagcagtagatctcatggagccacgtttaatatgtgtagccacagtaactcgaattattcatcgtctcttgaggatacattttgatggatgggaagaagagtatgatcagtgggtagactgtgagtcacctgacctctatcctgtagggtggtgtcagttaactggatatcaactacagcctccagcatcacagtgtaagttggtatacagaaaaggtgtccttttgtaaaaatcagcaattctccagaggactatctcacataagtcatcttatgagctcacaggacaagaatatacctatgtctgattggttgccaggtaagacattaagactcaacaacaatatcacagaatcagaccatgtgtcccatggcaatgtgaatccaatagtcaattacataatgactatagaaacacaacagtcaccaaattaaactagacttactattttagtgagttaaaaattacatactaaaagtttattggtaggtaataaatgcttttgagtaaatagtggaaaatgtctcatgttgaggctatggttttgtaggaacaagtacccttattttcagagcatcatgtacttaagtataatggtcttggtaaagatagttcatataagttgtatctagacaactgtatcgtctaaattgtaaacaattatctagtaccaattttccctttttatttttcagcatcaagagaaaaccaatcagcttcatcaaaacagaagaaaaaggctaagtcccagcaatacaaaggacataagaaaagtgggtcaccacgtggtgttcacatacattttctaattgttaactaattggagtcacagtattcttggacagaaaatgatatatcttgtgagaactgatgattgtgcattatgtattatgcttaaaggtgcagtatgccataaaaggcaaacccttgcaataatgagaaacactgatattttactaacaggagaaattattaccacagtatttaaagtatacgtggtaaagaatagagtctgtgaatgattcttgaaataatatgtaaaacctactgaaagttaatcctttttaaaaactttatttaaaaagaaaaattagcagccaggtgcagtggctcacgcctgtaatcccagcactttaggaggccgaggctggcagatcacaaggtcaggagatcgagaccatcctggctaacacggtgaaaccctgtctccaccaaaaatacaaaaaatctgccgggcgtggtggcacacgcctgaagtcccagctactcaggaggctgaggcaagagaatcacttgaacccaggaggcagaggttgcagtgagccaagatcacgccactacattccagctgggcaacacagcaagactctgtctcaaaaaaaaaaaaaaaaa

SEQ ID NO: 151998 - DNA, 5099 bp, Homo sapiens
  Payload ID: 9924
  Gene Symbol: MBTD1
  Gene Name: mbt domain containing 1
  Uniprot ID: Q05BQ5
  ENST ID: ENST00000415868
  CDS Start-End: 64-1950
tctcttacttcaaagactgaacattcttcacgatctgaaaggaaaagaagagattctttcgggatgtttgacggttatgatagctgcagtgaggacacaagcagcagctccagctccgaagagagtgaggaagaagtcgctcctttaccttctaatctcccgattatcaaaaacaatgggcaagtctacacatacccagatggtaaatctggcatggctacctgtgagatgtgtgggatggttggcgtccgagatgctttttactctaaaacaaagcgtttctgtagcgtttcatgttcaagaagttactcgtcaaactccaagaaggcaagcattttggccagacttcagggtaagcctccaacaaagaaagcaaaagttcttcagaaacaacctttagttgctaagctagccgcatatgctcagtatcaagctaccttgcaaaatcaagcaaagacaaaagcagcagtctccatggaaggtttcagctggggtaactacatcaatagcaatagctttatagcagctccggttacctgttttaaacatgcacctatggggacctgctggggtgatatctcagaaaatgtgagagtagaagttcccaatacagactgcagcctacctaccaaagtcttctggattgctggaattgtaaaattagcaggttacaatgcccttttaagatatgaaggatttgaaaatgactctggtctggacttctggtgcaatatatgtggttctgatatccatccagttggttggtgtgcagccagcggaaaacctcttgttcctcctagaactattcagcataaatatacaaactggaaagcttttctagtgaaacgacttactggtgccaaaacactgcctcctgatttctcccaaaaggtttcagagagtatgcagtatcctttcaaaccttgcatgagagtagaagtggttgacaagaggcatttgtgtcgaacacgagtagcagtggtggaaagtgtaattggaggaagattaagactagtgtatgaagaaagcgaagatagaacagatgacttctggtgccatatgcacagcccattaatacatcatattggttggtctcgaagcataggtcatcgattcaaaagatctgatattacaaagaaacaggatggacattttgatacaccaccacatttatttgctaaggtaaaagaagtagaccagagtggggaatggttcaaggaaggaatgaaattggaagctatagacccattaaatctttctacaatatgtgtcgcaaccattagaaaggtgctagctgacggattcctgatgattgggatcgatggctcagaagcagcagacggatctgactggttctgttaccatgcaacctctccttctattttccctgtcggtttctgtgaaattaacatgattgaacttactccacccagaggttacacaaaacttccttttaaatggtttgactacctcagggaaactggctccattgcagcaccagtaaaactatttaataaggatgttccaaatcacggatttcgtgtaggaatgaaattagaagcagtagatctcatggagccacgtttaatatgtgtagccacagtaactcgaattattcatcgtctcttgaggatacattttgatggatgggaagaagagtatgatcagtgggtagactgtgagtcacctgacctctatcctgtagggtggtgtcagttaactggatatcaactacagcctccagcatcacagtcatcaagagaaaaccaatcagcttcatcaaaacagaagaaaaaggctaagtcccagcaatacaaaggacataagaaaatgacaacactgcagctgaaggaggagttgctggatggagaggattataatttccttcaaggagcgtctgatcaggaaagcaatggctctgccaacttctacatcaaacaagagccatgaggtggcttagaaactgagggcgggtggggaaggattttacacaggactgatttataatcaatccagctgtacagggggctactctactgggacattttgctaaacatagaagatttcagttccagatttttcaggtgggtgggggagctattttagtcgggggggcaggggggtgggaaattttcaatttataaagatggacaatttttgtgttgtatttgaagcttttgaaagaattttgtaatattttccaagtttggatttatgtgcattgttaacaagaactgaaattctaacttttttggtaacattaaagtttaggtagcaggattgaaggaaatgatttaagaaggatatagctgttaaatgcaaatgaactgtcattacaaatgaacctttttggtacctgttgggagattttgggatttttagaagttaggccagtcacatctccagcttcttttgctgcagaaatatgcaactgaactcctcatggaggggtcatcaccacaaaggtcatggaagggtcattatttctcttgttggcattttattgcagcccattttaaatgtttgtacagaaatatttttcattctgtgaaaatttatttggagttctgtatgaaactggaagaactctggatacttttatatgttctcttttaattaaaaaaatgattagaattatcctaacactaaagtgttaaactggaatggttgacaagatattcaggatctcagtctacacattgaggggttggggaaaatgtaatgttgtccttagtttattttcctttctaaaaaaaataccccacgaaagggattctgatcagttctctgccatttccctctatctgtgaaataacagcttcgtataaccacaaccaaaaacagatgttctgtattaggagaatcgaattgaaagttattcaaagccaaaataagtttagatttcaaaatcattccagctctgcttttatctatcctggatttggtagaaaactaatttgaaagagaatttaattttcttaaaattccatatatatatatatatatatatatatatatatatatatatatatatatatataaaattgtctttaattgtattcaggatttattttaataataaccgatttggaccattttgaacattccctgttttaaaattcatatgacttccttttaaaaaaaaaaaaaggatacaagggtaaactggtgaaaggtttgctctctgcattttctaactttctactgagttgtgactgaatgagagcgctctagcgtttaccagtgaggttcataaactaaactctcaggaattaattgcatctgttctagaagtgcttctgggtcttagcctggcctcttcagagtggtaatattgaccatctcctctggaatataggtagggctaattagaaattaatcaaaatgattaacctctacagtccttcagcctatggaatgctttaaaaaatgttaatggaaagccccaggagaccattttaggtaagacttttgtttgaattttaaaatgcatagaacgttaaaaaaaaccagcaatttattttctaaaatattgctctacttttgggaataatagcattggtaatacgcacaggtttacctcattctatgcaagaggggttaataacataaggttttataatagctactggaagtaaaatttgttactttatagtgtaagaatgtatggaatcgcatgtcaccatttcttaatactgactctttaggggcataaatgcagatcacatcaacgcaagttgattctcatgtgtcaaatatatgtgaattcagctgttaaattactggatatttatcttaacattgctgagagggacctactgtaaatgtgacatcctcacacttcccatatctttaactttgaaaaatcttcttgtaaacttaaagcctagaagtattccaaagcaagggttagagcagtctttattctcaggctcactgaattaaacccaggactaattccacagcacaggcacaagaagcctgttgtgtagtgtactctgccagtaccttggatttaggagctccatggggaactgactaaaccaggagagagaggatttggagctagtcagtcctggtaatctatgaaatgctcatttatacccaggtttcataagcttccaattctatagcaaacccaggctctgagtgttttagaatttcctaattcatgaagtgtttcttgtcttgatcccgtgaccaacagttgaaggttggtaaggacttttctacagtctgaacacaacctaaagccctctttcattgttcacacactaactcctactgccgacgaaccgaaaaataattaatgcagaggagatttatgtcttagccataactccagttgtacaactcaatcgccccattctcttttacggttcaaaatgtactgctgaccttgggtttgtttttgttttgttttgtttttcctgttaggatttatttggggacttttggtagtttaaactctttaaccttttccttgccgtgtatgaggaaagctaaagctgttatcaacttcttattctacgatactaacacgggttttcagtgtttgtttgtttttattattattattaattttgcgtgatgtgaataccctctcccatcaatatttgtattatggtgctatatattggtaatgatcctttaatattgggaagggattttaaaaatactgtgattaaactgggtttcttcctttgattttcatattttaaataaagccacagtcatttatacaaaagaaaagcatctgtccctgggcaaatcttttgaggacagaggtcaaagtaaactgcataaggtttttacatcatttctgtatgtatttgatatatagatcaatatctgtacaaatttaatcttttattttcttggtaactcgtgatcattgagaaagtgtttgaaactttctcatgaagtgtatatataatggcgtgaaaaattcctttggaaaaatttatgttcctttcatttttaccaaattgcaaattttcagcatggatgtgaaaagcattaaaattataactttgtgtacaagatgaaaataattcactaaatttgcccttttttacacaaaataaaatgttaaagtt

SEQ ID NO: 151999 - DNA, 534 bp, Homo sapiens
  Payload ID: 9924
  Gene Symbol: MBTD1
  Gene Name: mbt domain containing 1
  ENST ID: ENST00000586898
  CDS Start-End: 1-270
gatgttccaaatcacggatttcgtgtaggaatgaaattagaagcagtagatctcatggagccacgtttaatatgtgtagccacagtaactcgaattattcatcgtctcttgaggatacattttgatggatgggaagaagagtatgatcagtgggtagactgtgagtcacctgacctctatcctgtagggtggtgtcagttaactggatatcaactacagcctccagcatcacagtgtaagttggtatacagaaaaggtgtccttttgtaaaaatcagcaattctccagaggactatctcacataagtcatcttatgagctcacaggacaagaatatacctatgtctgattggttgccagcatcaagagaaaaccaatcagcttcatcaaaacagaagaaaaaggctaagtcccagcaatacaaaggacataagaaaagtgggtcaccacgtggtgttcacatacattttctaattgttaactaattggagtcacagtattcttggacagaaaatgatatatcttgtgagaactg

SEQ ID NO: 152000 - DNA, 5382 bp, Homo sapiens
  Payload ID: 9924
  Gene Symbol: MBTD1
  Gene Name: mbt domain containing 1
  Uniprot ID: Q05BQ5
  ENST ID: ENST00000586178
  CDS Start-End: 345-2231
ggagggagggctatgctaatgttgttgatatcctggggccacccgagttaaaggggggaaatccgggggctgctgcacccgccaccggtctgggcccagccgggggccccctgtagtcgccgcagtcccggggagaggcacctgcccccagcccggggagggggcgccgcgggctcggggagcacggacaacccctacccatgaggccctgatggaaaacacaaaggatctgagtcggaagagacattagaggtcatccaaagcagccgtcccctctgcagcctctctgacaagtgactgaacattcttcacgatctgaaaggaaaagaagagattctttcgggatgtttgacggttatgatagctgcagtgaggacacaagcagcagctccagctccgaagagagtgaggaagaagtcgctcctttaccttctaatctcccgattatcaaaaacaatgggcaagtctacacatacccagatggtaaatctggcatggctacctgtgagatgtgtgggatggttggcgtccgagatgctttttactctaaaacaaagcgtttctgtagcgtttcatgttcaagaagttactcgtcaaactccaagaaggcaagcattttggccagacttcagggtaagcctccaacaaagaaagcaaaagttcttcagaaacaacctttagttgctaagctagccgcatatgctcagtatcaagctaccttgcaaaatcaagcaaagacaaaagcagcagtctccatggaaggtttcagctggggtaactacatcaatagcaatagctttatagcagctccggttacctgttttaaacatgcacctatggggacctgctggggtgatatctcagaaaatgtgagagtagaagttcccaatacagactgcagcctacctaccaaagtcttctggattgctggaattgtaaaattagcaggttacaatgcccttttaagatatgaaggatttgaaaatgactctggtctggacttctggtgcaatatatgtggttctgatatccatccagttggttggtgtgcagccagcggaaaacctcttgttcctcctagaactattcagcataaatatacaaactggaaagcttttctagtgaaacgacttactggtgccaaaacactgcctcctgatttctcccaaaaggtttcagagagtatgcagtatcctttcaaaccttgcatgagagtagaagtggttgacaagaggcatttgtgtcgaacacgagtagcagtggtggaaagtgtaattggaggaagattaagactagtgtatgaagaaagcgaagatagaacagatgacttctggtgccatatgcacagcccattaatacatcatattggttggtctcgaagcataggtcatcgattcaaaagatctgatattacaaagaaacaggatggacattttgatacaccaccacatttatttgctaaggtaaaagaagtagaccagagtggggaatggttcaaggaaggaatgaaattggaagctatagacccattaaatctttctacaatatgtgtcgcaaccattagaaaggtgctagctgacggattcctgatgattgggatcgatggctcagaagcagcagacggatctgactggttctgttaccatgcaacctctccttctattttccctgtcggtttctgtgaaattaacatgattgaacttactccacccagaggttacacaaaacttccttttaaatggtttgactacctcagggaaactggctccattgcagcaccagtaaaactatttaataaggatgttccaaatcacggatttcgtgtaggaatgaaattagaagcagtagatctcatggagccacgtttaatatgtgtagccacagtaactcgaattattcatcgtctcttgaggatacattttgatggatgggaagaagagtatgatcagtgggtagactgtgagtcacctgacctctatcctgtagggtggtgtcagttaactggatatcaactacagcctccagcatcacagtcatcaagagaaaaccaatcagcttcatcaaaacagaagaaaaaggctaagtcccagcaatacaaaggacataagaaaatgacaacactgcagctgaaggaggagttgctggatggagaggattataatttccttcaaggagcgtctgatcaggaaagcaatggctctgccaacttctacatcaaacaagagccatgaggtggcttagaaactgagggcgggtggggaaggattttacacaggactgatttataatcaatccagctgtacagggggctactctactgggacattttgctaaacatagaagatttcagttccagatttttcaggtgggtgggggagctattttagtcgggggggcaggggggtgggaaattttcaatttataaagatggacaatttttgtgttgtatttgaagcttttgaaagaattttgtaatattttccaagtttggatttatgtgcattgttaacaagaactgaaattctaacttttttggtaacattaaagtttaggtagcaggattgaaggaaatgatttaagaaggatatagctgttaaatgcaaatgaactgtcattacaaatgaacctttttggtacctgttgggagattttgggatttttagaagttaggccagtcacatctccagcttcttttgctgcagaaatatgcaactgaactcctcatggaggggtcatcaccacaaaggtcatggaagggtcattatttctcttgttggcattttattgcagcccattttaaatgtttgtacagaaatatttttcattctgtgaaaatttatttggagttctgtatgaaactggaagaactctggatacttttatatgttctcttttaattaaaaaaatgattagaattatcctaacactaaagtgttaaactggaatggttgacaagatattcaggatctcagtctacacattgaggggttggggaaaatgtaatgttgtccttagtttattttcctttctaaaaaaaataccccacgaaagggattctgatcagttctctgccatttccctctatctgtgaaataacagcttcgtataaccacaaccaaaaacagatgttctgtattaggagaatcgaattgaaagttattcaaagccaaaataagtttagatttcaaaatcattccagctctgcttttatctatcctggatttggtagaaaactaatttgaaagagaatttaattttcttaaaattccatatatatatatatatatatatatatatatatatatatatatatatatatataaaattgtctttaattgtattcaggatttattttaataataaccgatttggaccattttgaacattccctgttttaaaattcatatgacttccttttaaaaaaaaaaaaaggatacaagggtaaactggtgaaaggtttgctctctgcattttctaactttctactgagttgtgactgaatgagagcgctctagcgtttaccagtgaggttcataaactaaactctcaggaattaattgcatctgttctagaagtgcttctgggtcttagcctggcctcttcagagtggtaatattgaccatctcctctggaatataggtagggctaattagaaattaatcaaaatgattaacctctacagtccttcagcctatggaatgctttaaaaaatgttaatggaaagccccaggagaccattttaggtaagacttttgtttgaattttaaaatgcatagaacgttaaaaaaaaccagcaatttattttctaaaatattgctctacttttgggaataatagcattggtaatacgcacaggtttacctcattctatgcaagaggggttaataacataaggttttataatagctactggaagtaaaatttgttactttatagtgtaagaatgtatggaatcgcatgtcaccatttcttaatactgactctttaggggcataaatgcagatcacatcaacgcaagttgattctcatgtgtcaaatatatgtgaattcagctgttaaattactggatatttatcttaacattgctgagagggacctactgtaaatgtgacatcctcacacttcccatatctttaactttgaaaaatcttcttgtaaacttaaagcctagaagtattccaaagcaagggttagagcagtctttattctcaggctcactgaattaaacccaggactaattccacagcacaggcacaagaagcctgttgtgtagtgtactctgccagtaccttggatttaggagctccatggggaactgactaaaccaggagagagaggatttggagctagtcagtcctggtaatctatgaaatgctcatttatacccaggtttcataagcttccaattctatagcaaacccaggctctgagtgttttagaatttcctaattcatgaagtgtttcttgtcttgatcccgtgaccaacagttgaaggttggtaaggacttttctacagtctgaacacaacctaaagccctctttcattgttcacacactaactcctactgccgacgaaccgaaaaataattaatgcagaggagatttatgtcttagccataactccagttgtacaactcaatcgccccattctcttttacggttcaaaatgtactgctgaccttgggtttgtttttgttttgttttgtttttcctgttaggatttatttggggacttttggtagtttaaactctttaaccttttccttgccgtgtatgaggaaagctaaagctgttatcaacttcttattctacgatactaacacgggttttcagtgtttgtttgtttttattattattattaattttgcgtgatgtgaataccctctcccatcaatatttgtattatggtgctatatattggtaatgatcctttaatattgggaagggattttaaaaatactgtgattaaactgggtttcttcctttgattttcatattttaaataaagccacagtcatttatacaaaagaaaagcatctgtccctgggcaaatcttttgaggacagaggtcaaagtaaactgcataaggtttttacatcatttctgtatgtatttgatatatagatcaatatctgtacaaatttaatcttttattttcttggtaactcgtgatcattgagaaagtgtttgaaactttctcatgaagtgtatatataatggcgtgaaaaattcctttggaaaaatttatgttcctttcatttttaccaaattgcaaattttcagcatggatgtgaaaagcattaaaattataactttgtgtacaagatgaaaataattcactaaatttgcccttttttacacaaaataaaatgttaaagttaa

SEQ ID NO: 152001 - DNA, 2826 bp, Homo sapiens
  Payload ID: 9925
  Gene Symbol: MCF2
  Gene Name: MCF.2 cell line derived transforming sequence
  Uniprot ID: P10911
  ENST ID: ENST00000338585
  CDS Start-End: 1-2826
atggcagaagcaaatccccggagaggcaagatgaggttcagaaggaatgcggcttccttccctgggaacttgcacttggttttggttttacgtcctaccagctttcttcaacgaacgttcacagacattggattttggtttagtcaggaggattttatgcttaaattaccagttgttatgctgagctcagttagtgatttgctgacatacattgatgacaagcaattaacccctgagttaggcggcaccttgcagtactgccacagtgaatggatcatcttcagaaatgctatagaaaattttgccctcacagtgaaagaaatggctcagatgttacagtcctttggaactgaactggctgagacagaactaccagatgatattccctcaatagaagaaattctggcaattcgtgctgaaaggtatcatctgttgaagaatgatattacagctgtaaccaaagaaggaaaaattctgctaacaaatctggaagtgcctgacactgaaggagctgtcagttcaagactagaatgtcatcggcaaataagtggtgactggcaaactattaataagttgctgactcaagtacatgatatggaaacagcttttgatggattttgggaaaaacatcaattaaaaatggagcagtatctgcaactatggaagtttgagcaggattttcaacagcttgtgactgaagttgaatttctattaaaccaacaagcagaactggctgatgtaacagggactatagctcaagtaaaacaaaaaataaaaaaattggaaaacttagatgaaaattctcaggagctattatcaaaggcccagtttgtgatattacatggacacaagcttgcagcaaatcaccattatgcacttgatttaatctgccagaggtgcaatgagctacgttacctttctgatattttggttaatgagataaaagcaaaacggatacaactcagcaggaccttcaaaatgcataaactcctacagcaggctcgtcaatgctgtgatgaaggggaatgtcttctagctaatcaggaaatagataagtttcagtctaaagaagatgctcagaaagctctccaagacattgaaaattttcttgaaatggctctaccctttataaattatgaacctgaaacactgcagtatgaatttgatgtaatattatctcctgagcttaaggttcaaatgaagactatacaactcaagcttgaaaacattcgaagtatatttgagaaccagcaggctggtttcaggaacctggcagataagcatgtgaggccaatccaatttgtggtacccacacctgaaaatttggtcacatctgggacaccatttttttcatctaaacaagtgggagttggatactctttctttcaagcatgtaaacttttttcaaaagggaagaagacttggagacaaaatcagagcaacttaaaaattgaagtggtgcctgattgtcaggagaagagaagttctggtccatcctccagtttggacaatggcaatagcttggatgttttaaagaaccacgtactaaatgaactgatacagactgagagagtttatgttcgagaactgtatactgttttgttgggttatagagcggagatggataatccagagatgtttgatcttatgccacctctcctgagaaataaaaaggacattctctttggaaacatggcagaaatatatgaattccataacgacattttcttgagcagcctggaaaattgtgctcatgctccagaaagagtgggaccttgtttcctggaaaggaaggatgattttcagatgtatgcaaaatattgtcagaataagcccagatcagaaacaatttggaggaagtattcagaatgcgcatttttccaggaatgtcaaagaaagttaaaacacagacttagactggattcctatttactcaaaccagtgcaacgaatcactaaatatcagttattgttgaaggagctattaaaatatagcaaagactgtgaaggatctgctctgttgaagaaggcactcgatgcaatgctggatttactgaagtcagttaatgattctatgcatcagattgcaataaatggctatattggaaacttaaatgaactgggcaagatgataatgcaaggtggattcagcgtttggatagggcacaagaaaggtgctacaaaaatgaaggatttggctagattcaaaccaatgcagcgacaccttttcttgtatgaaaaagccattgttttttgcaaaaggcgtgttgaaagtggagaaggctctgacagatacccgtcatacagttttaaacactgttggaaaatggatgaagttggaatcactgaatatgtaaaaggtgataaccgcaagtttgaaatctggtatggtgaaaaggaagaagtttatattgtccaggcttctaatgtagatgtgaagatgacgtggctaaaagaaataagaaatattttgttgaagcagcaggaacttttgacagttaaaaaaagaaagcaacaggatcaattaacagaacgggataagtttcagatttctcttcagcagaatgatgaaaagcaacagggagcttttataagtactgaggaaactgaattggaacacaccagcactgtggtggaggtctgtgaggcaattgcgtcagttcaggcagaagcaaatacagtttggactgaggcatcacaatctgcagaaatctctgaagaacctgcggaatggtcaagcaactatttctaccctacttatgatgaaaatgaagaagaaaataggcccctcatgagacctgtgtcggagatggctctcctatattga

SEQ ID NO: 152002 - DNA, 2583 bp, Homo sapiens
  Payload ID: 9925
  Gene Symbol: MCF2
  Gene Name: MCF.2 cell line derived transforming sequence
  Uniprot ID: P10911
  ENST ID: ENST00000370573
  CDS Start-End: 1-2583
atggcagaagcaaatccccggagaggcaagatgaggttcagaaggaatgcggcttccttccctgggaacttgcacttggttttggttttacgtcctaccagctttcttcaacgaacgttcacagacattggattttggtttagtcaggaggattttatgcttaaattaccagttgttatgctgagctcagttagtgatttgctgacatacattgatgacaagcaattaacccctgagttaggcggcaccttgcagtactgccacagtgaatggatcatcttcagaaatgctatagaaaattttgccctcacagtgaaagaaatggctcagatgttacagtcctttggaactgaactggctgagacagaactaccagatgatattccctcaatagaagaaattctggcaattcgtgctgaaaggtatcatctgttgaagaatgatattacagctgtaaccaaagaaggaaaaattctgctaacaaatctggaagtgcctgacactgaaggagctgtcagttcaagactagaatgtcatcggcaaataagtggtgactggcaaactattaataagttgctgactcaagtacatgatatggaaacagcttttgatggattttgggaaaaacatcaattaaaaatggagcagtatctgcaactatggaagtttgagcaggattttcaacagcttgtgactgaagttgaatttctattaaaccaacaagcagaactggctgatgtaacagggactatagctcaagtaaaacaaaaaataaaaaaattggaaaacttagatgaaaattctcaggagctattatcaaaggcccagtttgtgatattacatggacacaagcttgcagcaaatcaccattatgcacttgatttaatctgccagaggtgcaatgagctacgttacctttctgatattttggttaatgagataaaagcaaaacggatacaactcagcaggaccttcaaaatgcataaactcctacagcaggctcgtcaatgctgtgatgaaggggaatgtcttctagctaatcaggaaatagataagtttcagtctaaagaagatgctcagaaagctctccaagacattgaaaattttcttgaaatggctctaccctttataaattatgaacctgaaacactgcagtatgaatttgatgtaatattatctcctgagcttaaggttcaaatgaagactatacaactcaagcttgaaaacattcgaagtatatttgagaaccagcaggctggtttcaggaacctggcagataagcatgtgaggccaatccaatttgtggtacccacacctgaaaatttggtcacatctgggacaccatttttttcatctaaacaagggaagaagacttggagacaaaatcagagcaacttaaaaattgaagtggtgcctgattgtcaggagaagagaagttctggtccatcctccagtttggacaatggcaatagcttggatgttttaaagaaccacgtactaaatgaactgatacagactgagagagtttatgttcgagaactgtatactgttttgttgggttatagagcggagatggataatccagagatgtttgatcttatgccacctctcctgagaaataaaaaggacattctctttggaaacatggcagaaatatatgaattccataacgacattttcttgagcagcctggaaaattgtgctcatgctccagaaagagtgggaccttgtttcctggaaaggaaggatgattttcagatgtatgcaaaatattgtcagaataagcccagatcagaaacaatttggaggaagtattcagaatgcgcatttttccaggaatgtcaaagaaagttaaaacacagacttagactggattcctatttactcaaaccagtgcaacgaatcactaaatatcagttattgttgaaggagctattaaaatatagcaaagactgtgaaggatctgctctgttgaagaaggcactcgatgcaatgctggatttactgaagtcagttaatgattctatgcatcagattgcaataaatggctatattggaaacttaaatgaactgggcaagatgataatgcaaggtggattcagcgtttggatagggcacaagaaaggtgctacaaaaatgaaggatttggctagattcaaaccaatgcagcgacaccttttcttgtatgaaaaagccattgttttttgcaaaaggcgtgttgaaagtggagaaggctctgacagatacccgtcatacagttttaaacactgttggaaaatggatgaagttggaatcactgaatatgtaaaaggtgataaccgcaagtttgaaatctggtatggtgaaaaggaagaagtttatattgtccaggcttctaatgtagatgtgaagatgacgtggctaaaagaaataagaaatattttgttgaagcagcaggaacttttgacagttaaaaaaagaaagcaacaggatcaattaacagaacgggataagtttcagatttctcttcagcagaatgatgaagacctgtgtcggagatggctctcctatattgatgaagctactatgtcaaatggcaagtag

SEQ ID NO: 152003 - DNA, 3688 bp, Homo sapiens
  Payload ID: 9925
  Gene Symbol: MCF2
  Gene Name: MCF.2 cell line derived transforming sequence
  Uniprot ID: P10911
  ENST ID: ENST00000370576
  CDS Start-End: 211-2988
gatctgtcagctgactaatcagggatagtggtttttttttttttttcctccccagcattgctgccactgtgctaatggaagcagccacggcagctttgtttgatagagatttttggctgccgtttttaaatactacccaagaagcagctcgtatttcatcaacgttgcgttgacaattggaaaagaaaagtgtaattgcgtacaggcgaaatggcagaagcaaatccccggagaggcaagatgaggttcagaaggaatgcggcttccttccctgggaacttgcacttggttttggttttacgtcctaccagctttcttcaacgaacgttcacagacattggattttggtttagtcaggaggattttatgcttaaattaccagttgttatgctgagctcagttagtgatttgctgacatacattgatgacaagcaattaacccctgagttaggcggcaccttgcagtactgccacagtgaatggatcatcttcagaaatgctatagaaaattttgccctcacagtgaaagaaatggctcagatgttacagtcctttggaactgaactggctgagacagaactaccagatgatattccctcaatagaagaaattctggcaattcgtgctgaaaggtatcatctgttgaagaatgatattacagctgtaaccaaagaaggaaaaattctgctaacaaatctggaagtgcctgacactgaaggagctgtcagttcaagactagaatgtcatcggcaaataagtggtgactggcaaactattaataagttgctgactcaagtacatgatatggaaacagcttttgatggattttgggaaaaacatcaattaaaaatggagcagtatctgcaactatggaagtttgagcaggattttcaacagcttgtgactgaagttgaatttctattaaaccaacaagcagaactggctgatgtaacagggactatagctcaagtaaaacaaaaaataaaaaaattggaaaacttagatgaaaattctcaggagctattatcaaaggcccagtttgtgatattacatggacacaagcttgcagcaaatcaccattatgcacttgatttaatctgccagaggtgcaatgagctacgttacctttctgatattttggttaatgagataaaagcaaaacggatacaactcagcaggaccttcaaaatgcataaactcctacagcaggctcgtcaatgctgtgatgaaggggaatgtcttctagctaatcaggaaatagataagtttcagtctaaagaagatgctcagaaagctctccaagacattgaaaattttcttgaaatggctctaccctttataaattatgaacctgaaacactgcagtatgaatttgatgtaatattatctcctgagcttaaggttcaaatgaagactatacaactcaagcttgaaaacattcgaagtatatttgagaaccagcaggctggtttcaggaacctggcagataagcatgtgaggccaatccaatttgtggtacccacacctgaaaatttggtcacatctgggacaccatttttttcatctaaacaagggaagaagacttggagacaaaatcagagcaacttaaaaattgaagtggtgcctgattgtcaggagaagagaagttctggtccatcctccagtttggacaatggcaatagcttggatgttttaaagaaccacgtactaaatgaactgatacagactgagagagtttatgttcgagaactgtatactgttttgttgggttatagagcggagatggataatccagagatgtttgatcttatgccacctctcctgagaaataaaaaggacattctctttggaaacatggcagaaatatatgaattccataacgacattttcttgagcagcctggaaaattgtgctcatgctccagaaagagtgggaccttgtttcctggaaaggaaggatgattttcagatgtatgcaaaatattgtcagaataagcccagatcagaaacaatttggaggaagtattcagaatgcgcatttttccaggaatgtcaaagaaagttaaaacacagacttagactggattcctatttactcaaaccagtgcaacgaatcactaaatatcagttattgttgaaggagctattaaaatatagcaaagactgtgaaggatctgctctgttgaagaaggcactcgatgcaatgctggatttactgaagtcagttaatgattctatgcatcagattgcaataaatggctatattggaaacttaaatgaactgggcaagatgataatgcaaggtggattcagcgtttggatagggcacaagaaaggtgctacaaaaatgaaggatttggctagattcaaaccaatgcagcgacaccttttcttgtatgaaaaagccattgttttttgcaaaaggcgtgttgaaagtggagaaggctctgacagatacccgtcatacagttttaaacactgttggaaaatggatgaagttggaatcactgaatatgtaaaaggtgataaccgcaagtttgaaatctggtatggtgaaaaggaagaagtttatattgtccaggcttctaatgtagatgtgaagatgacgtggctaaaagaaataagaaatattttgttgaagcagcaggaacttttgacagttaaaaaaagaaagcaacaggatcaattaacagaacgggataagtttcagatttctcttcagcagaatgatgaaaagcaacagggagcttttataagtactgaggaaactgaattggaacacaccagcactgtggtggaggtctgtgaggcaattgcgtcagttcaggcagaagcaaatacagtttggactgaggcatcacaatctgcagaaatctctgaagaacctgcggaatggtcaagcaactatttctaccctacttatgatgaaaatgaagaagaaaataggcccctcatgagacctgtgtcggagatggctctcctatattgatgaagctactatgtcaaatggcaagtagctctttcctgcctgcttctcagctcatttggaaaaatactgcgcaaaagacattgagctcaaatgatgcagatgttgttttcaggttaatggacacgcaaagaaaccacagcacatacttcttttctttcatttaataaagcttttaattatggtacgctgtctttttaaaatcatgtatttaatgtgtcagatattgtgcttgaaagattctcatctcagaatacttttggacttgaaaattatttcttctctactttgtaaccaaatgcaatcggtgtgccttggattatttagtttattaatgaattaagtcaaaattacggctgcaaaatggctaaggtcaagtaaagcacaacattatgatttaatatgcttttgttgaaaccacagcttttgtgcccattgttttaacttgtgtgaaacaatacaaagcccagaaattcttttcggggcatgagtaaattttgttcagggctactgtctgtatgtgcccagataaaattttcatgagagtagtttacaaaagccgtatttaaaagttaatattttcacactttttttctggatttctgcttataattaatgtaacttaaattagttgtgctctgctattttctgtatatttcatgttgtaattctttttttcaaataaaaattaattcttcaggtt

SEQ ID NO: 152004 - DNA, 3813 bp, Homo sapiens
  Payload ID: 9925
  Gene Symbol: MCF2
  Gene Name: MCF.2 cell line derived transforming sequence
  Uniprot ID: P10911
  ENST ID: ENST00000414978
  CDS Start-End: 156-3113
catgttaagagcaagaaggcttttgttcttggagcaggcagagagtattgtacattcttttggccgaggaaacagaatgagctgcgacagtcttaaggacaaacatttgtgaaaccgatctgctcctccgtataaaggacatcagtcatttcttaatgcaagacatcgccttcttgtctggtggccggggaaaggacaatgcttggatcattacgtttccagaaaactgtaattttagatgtataccagaggaagtaatagcaaaagtacttacttacctgacatctattgcaaggcaaaatggatcagactcccggtttaccattattctggatcgaagattggatacatggtcttctctcaaaatctctctccaaaaaatctcggcttccttccctgggaacttgcacttggttttggttttacgtcctaccagctttcttcaacgaacgttcacagacattggattttggtttagtcaggaggattttatgcttaaattaccagttgttatgctgagctcagttagtgatttgctgacatacattgatgacaagcaattaacccctgagttaggcggcaccttgcagtactgccacagtgaatggatcatcttcagaaatgctatagaaaattttgccctcacagtgaaagaaatggctcagatgttacagtcctttggaactgaactggctgagacagaactaccagatgatattccctcaatagaagaaattctggcaattcgtgctgaaaggtatcatctgttgaagaatgatattacagctgtaaccaaagaaggaaaaattctgctaacaaatctggaagtgcctgacactgaaggagctgtcagttcaagactagaatgtcatcggcaaataagtggtgactggcaaactattaataagttgctgactcaagtacatgatatggaaacagcttttgatggattttgggaaaaacatcaattaaaaatggagcagtatctgcaactatggaagtttgagcaggattttcaacagcttgtgactgaagttgaatttctattaaaccaacaagcagaactggctgatgtaacagggactatagctcaagtaaaacaaaaaataaaaaaattggaaaacttagatgaaaattctcaggagctattatcaaaggcccagtttgtgatattacatggacacaagcttgcagcaaatcaccattatgcacttgatttaatctgccagaggtgcaatgagctacgttacctttctgatattttggttaatgagataaaagcaaaacggatacaactcagcaggaccttcaaaatgcataaactcctacagcaggctcgtcaatgctgtgatgaaggggaatgtcttctagctaatcaggaaatagataagtttcagtctaaagaagatgctcagaaagctctccaagacattgaaaattttcttgaaatggctctaccctttataaattatgaacctgaaacactgcagtatgaatttgatgtaatattatctcctgagcttaaggttcaaatgaagactatacaactcaagcttgaaaacattcgaagtatatttgagaaccagcaggctggtttcaggaacctggcagataagcatgtgaggccaatccaatttgtggtacccacacctgaaaatttggtcacatctgggacaccatttttttcatctaaacaagggaagaagacttggagacaaaatcagagcaacttaaaaattgaagtggtgcctgattgtcaggagaagagaagttctggtccatcctccagtttggacaatggcaatagcttggatgttttaaagaaccacgtactaaatgaactgatacagactgagagagtttatgttcgagaactgtatactgttttgttgggttatagagcggagatggataatccagagatgtttgatcttatgccacctctcctgagaaataaaaaggacattctctttggaaacatggcagaaatatatgaattccataacgacattttcttgagcagcctggaaaattgtgctcatgctccagaaagagtgggaccttgtttcctggaaaggaaggatgattttcagatgtatgcaaaatattgtcagaataagcccagatcagaaacaatttggaggaagtattcagaatgcgcatttttccaggaatgtcaaagaaagttaaaacacagacttagactggattcctatttactcaaaccagtgcaacgaatcactaaatatcagttattgttgaaggagctattaaaatatagcaaagactgtgaaggatctgctctgttgaagaaggcactcgatgcaatgctggatttactgaagtcagttaatgattctatgcatcagattgcaataaatggctatattggaaacttaaatgaactgggcaagatgataatgcaaggtggattcagcgtttggatagggcacaagaaaggtgctacaaaaatgaaggatttggctagattcaaaccaatgcagcgacaccttttcttgtatgaaaaagccattgttttttgcaaaaggcgtgttgaaagtggagaaggctctgacagatacccgtcatacagttttaaacactgttggaaaatggatgaagttggaatcactgaatatgtaaaaggtgataaccgcaagtttgaaatctggtatggtgaaaaggaagaagtttatattgtccaggcttctaatgtagatgtgaagatgacgtggctaaaagaaataagaaatattttgttgaagcagcaggaacttttgacagttaaaaaaagaaagcaacaggatcaattaacagaacgggataagtttcagatttctcttcagcagaatgatgaaaagcaacagggagcttttataagtactgaggaaactgaattggaacacaccagcactgtggtggaggtctgtgaggcaattgcgtcagttcaggcagaagcaaatacagtttggactgaggcatcacaatctgcagaaatctctgaagaacctgcggaatggtcaagcaactatttctaccctacttatgatgaaaatgaagaagaaaataggcccctcatgagacctgtgtcggagatggctctcctatattgatgaagctactatgtcaaatggcaagtagctctttcctgcctgcttctcagctcatttggaaaaatactgcgcaaaagacattgagctcaaatgatgcagatgttgttttcaggttaatggacacgcaaagaaaccacagcacatacttcttttctttcatttaataaagcttttaattatggtacgctgtctttttaaaatcatgtatttaatgtgtcagatattgtgcttgaaagattctcatctcagaatacttttggacttgaaaattatttcttctctactttgtaaccaaatgcaatcggtgtgccttggattatttagtttattaatgaattaagtcaaaattacggctgcaaaatggctaaggtcaagtaaagcacaacattatgatttaatatgcttttgttgaaaccacagcttttgtgcccattgttttaacttgtgtgaaacaatacaaagcccagaaattcttttcggggcatgagtaaattttgttcagggctactgtctgtatgtgcccagataaaattttcatgagagtagtttacaaaagccgtatttaaaagttaatattttcacactttttttctggatttctgcttataattaatgtaacttaaattagttgtgctctgctattttctgtatatttcatgttgtaattctttttttcaaataaaaattaattcttcaggtt

SEQ ID NO: 152005 - DNA, 1988 bp, Homo sapiens
  Payload ID: 9925
  Gene Symbol: MCF2
  Gene Name: MCF.2 cell line derived transforming sequence
  ENST ID: ENST00000437564
  CDS Start-End: 1-1288
ccacgtactaaatgaactgatacagactgagagagtttatgttcgagaactgtatactgttttgttgggttatagagcggagatggataatccagagatgtttgatcttatgccacctctcctgagaaataaaaaggacattctctttggaaacatggcagaaatatatgaattccataacgacattttcttgagcagcctggaaaattgtgctcatgctccagaaagagtgggaccttgtttcctggaaaggaaggatgattttcagatgtatgcaaaatattgtcagaataagcccagatcagaaacaatttggaggaagtattcagaatgcgcatttttccaggaatgtcaaagaaagttaaaacacagacttagactggattcctatttactcaaaccagtgcaacgaatcactaaatatcagttattgttgaaggagctattaaaatatagcaaagactgtgaaggatctgctctgttgaagaaggcactcgatgcaatgctggatttactgaagtcagttaatgattctatgcatcagattgcaataaatggctatattggaaacttaaatgaactgggcaagatgataatgcaaggtggattcagcgtttggatagggcacaagaaaggtgctacaaaaatgaaggatttggctagattcaaaccaatgcagcgacaccttttcttgtatgaaaaagccattgttttttgcaaaaggcgtgttgaaagtggagaaggctctgacagatacccgtcatacagttttaaacactgttggaaaatggatgaagttggaatcactgaatatgtaaaaggtgataaccgcaagtttgaaatctggtatggtgaaaaggaagaagtttatattgtccaggcttctaatgtagatgtgaagatgacgtggctaaaagaaataagaaatattttgttgaagcagcaggaacttttgacagttaaaaaaagaaagcaacaggatcaattaacagaacgggataagtttcagatttctcttcagcagaatgatgaaaagcaacagggagcttttataagtactgaggaaactgaattggaacacaccagcactgtggtggaggtctgtgaggcaattgcgtcagttcaggcagaagcaaatacagtttggactgaggcatcacaatctgcagaaatctctgaagaacctgcggaatggtcaagcaactatttctaccctacttatgatgaaaatgaagaagaaaataggcccctcatgagacctgtgtcggagatggctctcctatattgatgaagctactatgtcaaatggcaagtagctctttcctgcctgcttctcagctcatttggaaaaatactgcgcaaaagacattgagctcaaatgatgcagatgttgttttcaggttaatggacacgcaaagaaaccacagcacatacttcttttctttcatttaataaagcttttaattatggtacgctgtctttttaaaatcatgtatttaatgtgtcagatattgtgcttgaaagattctcatctcagaatacttttggacttgaaaattatttcttctctactttgtaaccaaatgcaatcggtgtgccttggattatttagtttattaatgaattaagtcaaaattacggctgcaaaatggctaaggtcaagtaaagcacaacattatgatttaatatgcttttgttgaaaccacagcttttgtgcccattgttttaacttgtgtgaaacaatacaaagcccagaaattcttttcggggcatgagtaaattttgttcagggctactgtctgtatgtgcccagataaaattttcatgagagtagtttacaaaagccgtatttaaaagttaatattttcacactttttttctggatttctgcttataattaatgtaacttaaattagttgtgctctgctattttctgtatatttcatgttgtaattctttttttcaaataaaaattaattcttcaggtt

SEQ ID NO: 152006 - DNA, 1916 bp, Homo sapiens
  Payload ID: 9925
  Gene Symbol: MCF2
  Gene Name: MCF.2 cell line derived transforming sequence
  ENST ID: ENST00000446225
  CDS Start-End: 1-1587
gttcaaatgaagactatacaactcaagcttgaaaacattcgaagtatatttgagaaccagcaggctggtttcaggaacctggcagataagcatgtgaggccaatccaatttgtggtacccacacctgaaaatttggtcacatctgggacaccatttttttcatctaaacaagggaagaagacttggagacaaaatcagagcaacttaaaaattgaagtggtgcctgattgtcaggagaagagaagttctggtccatcctccagtttggacaatggcaatagcttggatgttttaaagaaccacgtactaaatgaactgatacagactgagagagtttatgttcgagaactgtatactgttttgttgggttatagagcggagatggataatccagagatgtttgatcttatgccacctctcctgagaaataaaaaggacattctctttggaaacatggcagaaatatatgaattccataacgacattttcttgagcagcctggaaaattgtgctcatgctccagaaagagtgggaccttgtttcctggaaaggaaggatgattttcagatgtatgcaaaatattgtcagaataagcccagatcagaaacaatttggaggaagtattcagaatgcgcatttttccaggaatgtcaaagaaagttaaaacacagacttagactggattcctatttactcaaaccagtgcaacgaatcactaaatatcagttattgttgaaggagctattaaaatatagcaaagactgtgaaggatctgctctgttgaagaaggcactcgatgcaatgctggatttactgaagtcagttaatgattctatgcatcagattgcaataaatggctatattggaaacttaaatgaactgggcaagatgataatgcaaggtggattcagcgtttggatagggcacaagaaaggtgctacaaaaatgaaggatttggctagattcaaaccaatgcagcgacaccttttcttgtatgaaaaagccattgttttttgcaaaaggcgtgttgaaagtggagaaggctctgacagatacccgtcatacagttttaaacactgttggaaaatggatgaagttggaatcactgaatatgtaaaaggtgataaccgcaagtttgaaatctggtatggtgaaaaggaagaagtttatattgtccaggcttctaatgtagatgtgaagatgacgtggctaaaagaaataagaaatattttgttgaagcagcaggaacttttgacagttaaaaaaagaaagcaacaggatcaattaacagaacgggataagtttcagatttctcttcagcagaatgatgaaaagcaacagggagcttttataagtactgaggaaactgaattggaacacaccagcactgtggtggaggtctgtgaggcaattgcgtcagttcaggcagaagcaaatacagtttggactgaggcatcacaatctgcagaaatctctgaagaacctgcggaatggtcaagcaactatttctaccctacttatgatgaaaatgaagaagaaaataggcccctcatgagacctgtgtcggagatggctctcctatattgatgaagctactatgtcaaatggcaagtagctctttcctgcctgcttctcagctcatttggaaaaatactgcgcaaaagacattgagctcaaatgatgcagatgttgttttcaggttaatggacacgcaaagaaaccacagcacatacttcttttctttcatttaataaagcttttaattatggtacgctgtctttttaaaatcatgtatttaatgtgtcagatattgtgcttgaaagattctcatctcagaatacttttggacttgaaaattatttcttctctactttgtaaccaaatgcaatcggtgtgccttggattatttagtttat

SEQ ID NO: 152007 - DNA, 3945 bp, Homo sapiens
  Payload ID: 9925
  Gene Symbol: MCF2
  Gene Name: MCF.2 cell line derived transforming sequence
  Uniprot ID: P10911
  ENST ID: ENST00000520602
  CDS Start-End: 287-3244
cctgggttcgccaaggcgggcggccaggcacatgccccaagctgccgcttcggcgccgtggacctcagtgtcctgcggcaggatcccaggcctgccccagaacccagatggctgcactttcatgccgatagcccaggcgatccctctgcaggtggacatggccatggccctgcagcgcgtgaggattgccgagaagtacgggaagaactacctctgcctcctgcaagcagtcttcgtggcagaaaccgatctgctcctccgtataaaggacatcagtcatttcttaatgcaagacatcgccttcttgtctggtggccggggaaaggacaatgcttggatcattacgtttccagaaaactgtaattttagatgtataccagaggaagtaatagcaaaagtacttacttacctgacatctattgcaaggcaaaatggatcagactcccggtttaccattattctggatcgaagattggatacatggtcttctctcaaaatctctctccaaaaaatctcggcttccttccctgggaacttgcacttggttttggttttacgtcctaccagctttcttcaacgaacgttcacagacattggattttggtttagtcaggaggattttatgcttaaattaccagttgttatgctgagctcagttagtgatttgctgacatacattgatgacaagcaattaacccctgagttaggcggcaccttgcagtactgccacagtgaatggatcatcttcagaaatgctatagaaaattttgccctcacagtgaaagaaatggctcagatgttacagtcctttggaactgaactggctgagacagaactaccagatgatattccctcaatagaagaaattctggcaattcgtgctgaaaggtatcatctgttgaagaatgatattacagctgtaaccaaagaaggaaaaattctgctaacaaatctggaagtgcctgacactgaaggagctgtcagttcaagactagaatgtcatcggcaaataagtggtgactggcaaactattaataagttgctgactcaagtacatgatatggaaacagcttttgatggattttgggaaaaacatcaattaaaaatggagcagtatctgcaactatggaagtttgagcaggattttcaacagcttgtgactgaagttgaatttctattaaaccaacaagcagaactggctgatgtaacagggactatagctcaagtaaaacaaaaaataaaaaaattggaaaacttagatgaaaattctcaggagctattatcaaaggcccagtttgtgatattacatggacacaagcttgcagcaaatcaccattatgcacttgatttaatctgccagaggtgcaatgagctacgttacctttctgatattttggttaatgagataaaagcaaaacggatacaactcagcaggaccttcaaaatgcataaactcctacagcaggctcgtcaatgctgtgatgaaggggaatgtcttctagctaatcaggaaatagataagtttcagtctaaagaagatgctcagaaagctctccaagacattgaaaattttcttgaaatggctctaccctttataaattatgaacctgaaacactgcagtatgaatttgatgtaatattatctcctgagcttaaggttcaaatgaagactatacaactcaagcttgaaaacattcgaagtatatttgagaaccagcaggctggtttcaggaacctggcagataagcatgtgaggccaatccaatttgtggtacccacacctgaaaatttggtcacatctgggacaccatttttttcatctaaacaagggaagaagacttggagacaaaatcagagcaacttaaaaattgaagtggtgcctgattgtcaggagaagagaagttctggtccatcctccagtttggacaatggcaatagcttggatgttttaaagaaccacgtactaaatgaactgatacagactgagagagtttatgttcgagaactgtatactgttttgttgggttatagagcggagatggataatccagagatgtttgatcttatgccacctctcctgagaaataaaaaggacattctctttggaaacatggcagaaatatatgaattccataacgacattttcttgagcagcctggaaaattgtgctcatgctccagaaagagtgggaccttgtttcctggaaaggaaggatgattttcagatgtatgcaaaatattgtcagaataagcccagatcagaaacaatttggaggaagtattcagaatgcgcatttttccaggaatgtcaaagaaagttaaaacacagacttagactggattcctatttactcaaaccagtgcaacgaatcactaaatatcagttattgttgaaggagctattaaaatatagcaaagactgtgaaggatctgctctgttgaagaaggcactcgatgcaatgctggatttactgaagtcagttaatgattctatgcatcagattgcaataaatggctatattggaaacttaaatgaactgggcaagatgataatgcaaggtggattcagcgtttggatagggcacaagaaaggtgctacaaaaatgaaggatttggctagattcaaaccaatgcagcgacaccttttcttgtatgaaaaagccattgttttttgcaaaaggcgtgttgaaagtggagaaggctctgacagatacccgtcatacagttttaaacactgttggaaaatggatgaagttggaatcactgaatatgtaaaaggtgataaccgcaagtttgaaatctggtatggtgaaaaggaagaagtttatattgtccaggcttctaatgtagatgtgaagatgacgtggctaaaagaaataagaaatattttgttgaagcagcaggaacttttgacagttaaaaaaagaaagcaacaggatcaattaacagaacgggataagtttcagatttctcttcagcagaatgatgaaaagcaacagggagcttttataagtactgaggaaactgaattggaacacaccagcactgtggtggaggtctgtgaggcaattgcgtcagttcaggcagaagcaaatacagtttggactgaggcatcacaatctgcagaaatctctgaagaacctgcggaatggtcaagcaactatttctaccctacttatgatgaaaatgaagaagaaaataggcccctcatgagacctgtgtcggagatggctctcctatattgatgaagctactatgtcaaatggcaagtagctctttcctgcctgcttctcagctcatttggaaaaatactgcgcaaaagacattgagctcaaatgatgcagatgttgttttcaggttaatggacacgcaaagaaaccacagcacatacttcttttctttcatttaataaagcttttaattatggtacgctgtctttttaaaatcatgtatttaatgtgtcagatattgtgcttgaaagattctcatctcagaatacttttggacttgaaaattatttcttctctactttgtaaccaaatgcaatcggtgtgccttggattatttagtttattaatgaattaagtcaaaattacggctgcaaaatggctaaggtcaagtaaagcacaacattatgatttaatatgcttttgttgaaaccacagcttttgtgcccattgttttaacttgtgtgaaacaatacaaagcccagaaattcttttcggggcatgagtaaattttgttcagggctactgtctgtatgtgcccagataaaattttcatgagagtagtttacaaaagccgtatttaaaagttaatattttcacactttttttctggatttctgcttataattaatgtaacttaaattagttgtgctctgctattttctgtatatttcatgttgtaattctttttttcaaataaaaattaattcttcaggtta

SEQ ID NO: 152008 - DNA, 3346 bp, Homo sapiens
  Payload ID: 9925
  Gene Symbol: MCF2
  Gene Name: MCF.2 cell line derived transforming sequence
  Uniprot ID: P10911
  ENST ID: ENST00000519895
  CDS Start-End: 167-3172
aaactttttttcatgttaagagcaagaaggcttttgttcttggagcaggcagagagtattgtacattcttttggccgaggaaacagaatgagctgcgacagtcttaaggacaaacatttgtgaaaccgatctgctcctccgtataaaggacatcagtcatttcttaatgcaagacatcgccttcttgtctggtggccggggaaaggacaatgcttggatcattacgtttccagaaaactgtaattttagatgtataccagaggaagtaatagcaaaagtacttacttacctgacatctattgcaaggcaaaatggatcagactcccggtttaccattattctggatcgaagattggatacatggtcttctctcaaaatctctctccaaaaaatctcggcttccttccctgggaacttgcacttggttttggttttacgtcctaccagctttcttcaacgaacgttcacagacattggattttggtttagtcaggaggattttatgcttaaattaccagttgttatgctgagctcagttagtgatttgctgacatacattgatgacaagcaattaacccctgagttaggcggcaccttgcagtactgccacagtgaatggatcatcttcagaaatgctatagaaaattttgccctcacagtgaaagaaatggctcagatgttacagtcctttggaactgaactggctgagacagaactaccagatgatattccctcaatagaagaaattctggcaattcgtgctgaaaggtatcatctgttgaagaatgatattacagctgtaaccaaagaaggaaaaattctgctaacaaatctggaagtgcctgacactgaaggagctgtcagttcaagactagaatgtcatcggcaaataagtggtgactggcaaactattaataagttgctgactcaagtacatgatatggaaacagcttttgatggattttgggaaaaacatcaattaaaaatggagcagtatctgcaactatggaagtttgagcaggattttcaacagcttgtgactgaagttgaatttctattaaaccaacaagcagaactggctgatgtaacagggactatagctcaagtaaaacaaaaaataaaaaaattggaaaacttagatgaaaattctcaggagctattatcaaaggcccagtttgtgatattacatggacacaagcttgcagcaaatcaccattatgcacttgatttaatctgccagaggtgcaatgagctacgttacctttctgatattttggttaatgagataaaagcaaaacggatacaactcagcaggaccttcaaaatgcataaactcctacagcaggctcgtcaatgctgtgatgaaggggaatgtcttctagctaatcaggaaatagataagtttcagtctaaagaagatgctcagaaagctctccaagacattgaaaattttcttgaaatggctctaccctttataaattatgaacctgaaacactgcagtatgaatttgatgtaatattatctcctgagcttaaggttcaaatgaagactatacaactcaagcttgaaaacattcgaagtatatttgagaaccagcaggctggtttcaggaacctggcagataagcatgtgaggccaatccaatttgtggtacccacacctgaaaatttggtcacatctgggacaccatttttttcatctaaacaagtgggagttggatactctttctttcaagcatgtaaacttttttcaaaagggaagaagacttggagacaaaatcagagcaacttaaaaattgaagtggtgcctgattgtcaggagaagagaagttctggtccatcctccagtttggacaatggcaatagcttggatgttttaaagaaccacgtactaaatgaactgatacagactgagagagtttatgttcgagaactgtatactgttttgttgggttatagagcggagatggataatccagagatgtttgatcttatgccacctctcctgagaaataaaaaggacattctctttggaaacatggcagaaatatatgaattccataacgacattttcttgagcagcctggaaaattgtgctcatgctccagaaagagtgggaccttgtttcctggaaaggaaggatgattttcagatgtatgcaaaatattgtcagaataagcccagatcagaaacaatttggaggaagtattcagaatgcgcatttttccaggaatgtcaaagaaagttaaaacacagacttagactggattcctatttactcaaaccagtgcaacgaatcactaaatatcagttattgttgaaggagctattaaaatatagcaaagactgtgaaggatctgctctgttgaagaaggcactcgatgcaatgctggatttactgaagtcagttaatgattctatgcatcagattgcaataaatggctatattggaaacttaaatgaactgggcaagatgataatgcaaggtggattcagcgtttggatagggcacaagaaaggtgctacaaaaatgaaggatttggctagattcaaaccaatgcagcgacaccttttcttgtatgaaaaagccattgttttttgcaaaaggcgtgttgaaagtggagaaggctctgacagatacccgtcatacagttttaaacactgttggaaaatggatgaagttggaatcactgaatatgtaaaaggtgataaccgcaagtttgaaatctggtatggtgaaaaggaagaagtttatattgtccaggcttctaatgtagatgtgaagatgacgtggctaaaagaaataagaaatattttgttgaagcagcaggaacttttgacagttaaaaaaagaaagcaacaggatcaattaacagaacgggataagtttcagatttctcttcagcagaatgatgaaaagcaacagggagcttttataagtactgaggaaactgaattggaacacaccagcactgtggtggaggtctgtgaggcaattgcgtcagttcaggcagaagcaaatacagtttggactgaggcatcacaatctgcagaaatctctgaagaacctgcggaatggtcaagcaactatttctaccctacttatgatgaaaatgaagaagaaaataggcccctcatgagacctgtgtcggagatggctctcctatattgatgaagctactatgtcaaatggcaagtagctctttcctgcctgcttctcagctcatttggaaaaatactgcgcaaaagacattgagctcaaatgatgcagatgttgttttcaggttaatggacacgcaaagaaaccacagcacatacttcttttctttcatttaataaagctttt

SEQ ID NO: 152009 - DNA, 3461 bp, Homo sapiens
  Payload ID: 9925
  Gene Symbol: MCF2
  Gene Name: MCF.2 cell line derived transforming sequence
  Uniprot ID: P10911
  ENST ID: ENST00000536274
  CDS Start-End: 324-2789
aggacatgcctgatcttcttgagcagtccagcacaagctaatccacaaggttcaatcaggctaagtaattggaggaatgtgttaactctgaattacaaggagcagaagggaaggatctgtcagctgactaatcagggatagtggtttttttttttttttcctccccagcattgctgccactgtgctaatggaagcagccacggcagctttgtttgatagagatttttggctgccgtttttaaatactacccaagaagcagctcgtatttcatcaacgttgcgttgacaattggaaaagaaaagtgtaattgcgtacaggcgaaatggcagaagcaaatccccggagaggcaagatgaggttcagaaggaatgcggcttccttccctgggaacttgcacttggttttggttttacgtcctaccagctttcttcaacgaacgttcacagacattggattttggtttagtcaggaggattttatgcttaaattaccagctatagaaaattttgccctcacagtgaaagaaatggctcagatgttacagtcctttggaactgaactggctgagacagaactaccagatgatattccctcaatagaagaaattctggcaattcgtgctgaaaggtatcatctgttgaagaatgatattacagctgtaaccaaagaaggaaaaattctgctaacaaatctggaagtgcctgacactgaaggagctgtcagttcaagactagaatgtcatcggcaaataagtggtgactggcaaactattaataagttgctgactcaagtacatgatatggaaacagcttttgatggattttgggaaaaacatcaattaaaaatggagcagtatctgcaactatggaagtttgagcaggattttcaacagcttgtgactgaagttgaatttctattaaaccaacaagcagaactggctgatgtaacagggactatagctcaagtaaaacaaaaaataaaaaaattggaaaacttagatgaaaattctcaggagctattatcaaaggcccagtttgtgatattacatggacacaagcttgcagcaaatcaccattatgcacttgatttaatctgccagaggtgcaatgagctacgttacctttctgatattttggttaatgagataaaagcaaaacggatacaactcagcaggaccttcaaaatgcataaactcctacagcaggctcgtcaatgctgtgatgaaggggaatgtcttctagctaatcaggaaatagataagtttcagtctaaagaagatgctcagaaagctctccaagacattgaaaattttcttgaaatggctctaccctttataaattatgaacctgaaacactgcagtatgaatttgatgtaatattatctcctgagcttaaggttcaaatgaagactatacaactcaagcttgaaaacattcgaagtatatttgagaaccagcaggctggtttcaggaacctggcagataagcatgtgaggccaatccaatttgtggtacccacacctgaaaatttggtcacatctgggacaccatttttttcatctaaacaagggaagaagacttggagacaaaatcagagcaacttaaaaattgaagtggtgcctgattgtcaggagaagagaagttctggtccatcctccagtttggacaatggcaatagcttggatgttttaaagaaccacgtactaaatgaactgatacagactgagagagtttatgttcgagaactgtatactgttttgttgggttatagagcggagatggataatccagagatgtttgatcttatgccacctctcctgagaaataaaaaggacattctctttggaaacatggcagaaatatatgaattccataacgacattttcttgagcagcctggaaaattgtgctcatgctccagaaagagtgggaccttgtttcctggaaaggaaggatgattttcagatgtatgcaaaatattgtcagaataagcccagatcagaaacaatttggaggaagtattcagaatgcgcatttttccaggaatgtcaaagaaagttaaaacacagacttagactggattcctatttactcaaaccagtgcaacgaatcactaaatatcagttattgttgaaggagctattaaaatatagcaaagactgtgaaggatctgctctgttgaagaaggcactcgatgcaatgctggatttactgaagtcagttaatgattctatgcatcagattgcaataaatggctatattggaaacttaaatgaactgggcaagatgataatgcaaggtggattcagcgtttggatagggcacaagaaaggtgctacaaaaatgaaggatttggctagattcaaaccaatgcagcgacaccttttcttgtatgaaaaagccattgttttttgcaaaaggcgtgttgaaagtggagaaggctctgacagatacccgtcatacagttttaaacactgttggaaaatggatgaagttggaatcactgaatatgtaaaaggtgataaccgcaagtttgaaatctggtatggtgaaaaggaagaagtttatattgtccaggcttctaatgtagatgtgaagatgacgtggctaaaagaaataagaaatattttgttgaagcagcaggaacttttgacagttaaaaaaagaaagcaacaggatcaattaacagaacgggataagtttcagatttctcttcagcagaatgatgaagacctgtgtcggagatggctctcctatattgatgaagctactatgtcaaatggcaagtagctctttcctgcctgcttctcagctcatttggaaaaatactgcgcaaaagacattgagctcaaatgatgcagatgttgttttcaggttaatggacacgcaaagaaaccacagcacatacttcttttctttcatttaataaagcttttaattatggtacgctgtctttttaaaatcatgtatttaatgtgtcagatattgtgcttgaaagattctcatctcagaatacttttggacttgaaaattatttcttctctactttgtaaccaaatgcaatcggtgtgccttggattatttagtttattaatgaattaagtcaaaattacggctgcaaaatggctaaggtcaagtaaagcacaacattatgatttaatatgcttttgttgaaaccacagcttttgtgcccattgttttaacttgtgtgaaacaatacaaagcccagaaattcttttcggggcatgagtaaattttgttcagggctactgtctgtatgtgcccagataaaattttcatgagagtagtttacaaaagccgtatttaaaagttaatattttcacactttttttctggatttctgcttataattaatgtaacttaaattagttgtgctctgctattttctgtatatttcatgttgtaattctttttttcaaataaaaattaattcttcaggtt

SEQ ID NO: 152010 - DNA, 2419 bp, Homo sapiens
  Payload ID: 9926
  Gene Symbol: MCF2L
  Gene Name: MCF.2 cell line derived transforming sequence-like
  ENST ID: ENST00000261963
  CDS Start-End: 1-890
ggcacctgttcctgcacgagaaggcagtgctcttctgcaagaagagggaggagaatggggaggggtatgagaaagctccctcctacagctacaagcagtccttaaacatggctgccgttggcattacggagaacgtgaagggagatgctaagaagttcgagatctggtacaacgcgcgcgaggaggtctacatcgtccaggcgccaactcctgagattaaagccgcgtgggtgaatgaaattcggaaagtgctgaccagccagctgcaggcttgtagagaagccagccagcaccgggcgctggagcagtcacagagcctgcccctgccggccccgaccagcaccagtccctcaagaggaaactcaaggaacatcaagaagctggaagaaaggaaaacagaccccctaagcctggagggatacgtcagctcagcgccactgacaaagccccccgaaaagggcaaaggttggagcaaaacgtcccactcactggaggcacctgaggacgacgggggctggtcaagtgcagaggagcagattaactcgtccgacgcagaggaggacggcgggttgggccccaagaagctggttccaggtaaatacacggtcgtggcggaccacgagaagggaggccccgatgcgctgcgcgtgaggagcggggacgtggtggagctggtgcaggagggcgacgagggcctctggtacgtcagggacccgaccactggcaaggagggctgggtgccggccagcagcctgtccgtccggctcggcccgtccggctcggcccagtgcctgagcagctcagagtcgagcccggggtcggccgtgctgagcaactcgtccagctgcagcgagggcggccaggcccccttctccgacctgcaggggtagcgcggcctcggcgccggagacccgcgcgctgtctggggctgcggtggcgtggggagggcgcggcccccggacgccccgaggaaggggcacctcaccgcccccacccagagcgcctggccgtgcgggctgcagaggacccctccggggcagaggcaggttccacggaagaccccggcccgctggggcttccccggagactccagagcccacagaggaggggccgcagggaacagccccgggcggcaggcgccgggcagcggcatctcgtcctggctccaccgtgctgcttctgcctctggacggtgctttcaggggacgcgcggaccgtggtggagctgcttccggagaagtggaggatcctctggccaacggcctgaggagagcggggcacggggtctctttagcttttacaagttttaggattttttcaagcagggatcaatcccgtggccattttttgtggtactttggcctcaattcttcaccaggaatcactgtgtttacatgaaatgacaatttgatactgtatttgatagaaaactatttttttgttaccggggtttacatagaagcacgttgtttataccactaagtgactttgggggggctctcccatggaaacggatggcactccctgaagctccctggtcacaggtggatgaaaacgtgtccgtgggtgacatcaggtggtgtctccaccaccaaaagcagttagaagccaaggagattcctttatctacctagggttcattttcaaaagaaaatttaaactataatttaaacaattaacgttcttttctacaaaaaaaatgcagggacttgatttttttaaagagcttcactgaattaggatatttttattgcttttaaagaaaatacaaagatgcagtttctgcagggtgtggcgtggaccagtgctgccgaccatagctcagagagccctgcccctgcctcactgcactgcagcctcctcggaggccgcacctccactccactccccacgcgccccctgcctcccacccaggtccacctgccacctggtgaccaccttgagtacagaagtgaaagtggggagagtattttattcaagtcacagcagaactggaaaaaaactcttctgttttaccaacttcttgtgtttcagaaacatattctgttcaaaacttttgaagccctttcggtgtctagtctgcagatgtttttgtatgtgtgcacctctgaccatgtgtgtacatatgtgtcttgctggaaaggacatattcgctgtccccgtgctgctgggagggccgcctcacagcctcacggttcccagccccagcacagtggaggcaggcgtggctgcattcccctcacgctaccctcccagcggcttgtagccgtcactggccagacctccagggtgcggaatcaaataggaagcatgcagagactcggcagcttttcctctgatgtgtaagttatttggaacgcgtgctgtgtcccgcgatgtccctgatgtactgtgcaggcgcggtgcctccgtctcgtcg

SEQ ID NO: 152011 - DNA, 3413 bp, Homo sapiens
  Payload ID: 9926
  Gene Symbol: MCF2L
  Gene Name: MCF.2 cell line derived transforming sequence-like
  Uniprot ID: O15068
  ENST ID: ENST00000375597
  CDS Start-End: 158-3112
ggctgccctgcagaggccaggtctgcccagcaaacccaggaaggtgtggcgtccccgcttcgcggccaagatggtgctggtgctgcgccatcctttgtgtgcccgggaagggcgttccgggagccgggtcgggggctcctgactcgcactgggcagcatgacggtgcgccggctgtcactgctgtgccgggacctctgggcgctgtggctgctgctgaaggccggcgcagatgaaatcatgcaccaggacatcgtcccgctctgtgctgccgacatccaggaccagctaaagaagcgctttgcttacctgtccggtgggcgggggcaggacggaagcccggttatcaccttccctgactacccggccttcagcgagattccggacaaggagttccagaatgtcatgacctacctcaccagcatccccagcctgcaggacgctggcatcggattcatcctggtgatagaccggcgacgggacaaatggacctccgtgaaggcgtccgtcctgcgcatcgcagcatctttcccggcaaacctgcagctcgtcctcgtgcttcgcccgacgggttttttccaaaggactctctccgacatcgctttcaaattcaatagagatgactttaagatgaaggtgccggtcataatgctgagctccgtaccagacttacacggttacatcgataagtcgcagctgaccgaggacctgggtgggaccctggactactgccactcccggtggctgtgccagcgcacggccatcgaaagtttcgccctcatggtgaagcagacggctcagatgctgcagtccttcgggaccgagctggctgaaacagagctgcccaatgacgtccagtcgacaagctcagtgctgtgtgcgcacacagagaagaaggacaaggcgaaggaggatttgaggctggcactgaaagaggggcacagtgtcctggagagcctcagggagctgcaggctgagggctcagagcccagtgtgaaccaggaccagcttgacaaccaggccaccgtgcagaggctcctggcccagctgaacgaaaccgaggctgccttcgatgagttctgggcaaagcatcagcagaaactggagcagtgtctgcagctccggcactttgagcagggcttccgggaggtcaaagccatcttggacgcagcgtcccagaagatagcaaccttcacagacatcggcaacagcctggcgcatgtggagcacctgctgagggacctggccagcttcgaggagaaatcaggcgtggccgtggagagggcccgggccctgtctctggacggcgagcagctcattgggaacaagcactacgcggtagactccatccgcccaaagtgccaggagctccggcacctctgtgaccagttctctgcggagatcgcaaggaggagggggctgctcagcaagtccctggagctgcaccgccgcctggagacgtccatgaagtggtgtgatgaagggatttacctgctggcctcacaacctgtggacaagtgccagtcccaggacggcgcggaggctgccctccaggaaatcgagaagtttttggagaccggtgcggaaaataagatccaggagctcaacgcgatttacaaggaatacgaatccatcctcaaccaagatctcatggagcacgtgcgaaaggtcttccagaagcaggcaagcatggaggaggtgttccaccgcaggcaggccagcctgaagaagctggcggccaggcagacgcggcccgtgcagccggtggcccccagacccgaggcactggcaaagtcgccctgcccctccccaggcattcggcgaggctctgagaactccagctccgagggcggtgcgctccggagagggccctaccggagggccaagagtgagatgagtgagagccggcagggccgcggctcagcgggggaggaggaggaaagcctggccatcctgcgcaggcacgtgatgagcgagctcctggacacagaacgggcctacgtggaggagctgctgtgcgtcctggagggctacgccgcggagatggataacccactgatggctcacctcctgtcaacaggccttcacaacaagaaggatgttttgtttggaaacatggaggaaatctatcacttccacaacaggatattcctcagggagctggaaaactacactgactgcccagaactggttggaagatgctttctggagaggatggaagatttccagatctatgagaagtactgtcagaacaagccccgctctgagagcctgtggagacagtgctccgactgcccgtttttccaggaatgccagagaaagctggaccacaagctgagcctggactcctacctgctgaagccagtgcagaggatcaccaagtaccagctgctgctcaaggaaatgctgaaatacagcaggaactgcgagggggctgaggacctgcaggaggcgctgagctccatcctgggcatcctgaaggccgtgaacgactccatgcacctcatcgctatcaccggctatgacgggaatctcggcgacctgggcaagctgctgatgcagggctcgttcagcgtctggaccgaccacaagaggggccacaccaaggtgaaggagctggccaggttcaagcccatgcagcggcacctgttcctgcacgagaaggcagtgctcttctgcaagaagagggaggagaatggggaggggtatgagaaagctccctcctacagctacaagcagtccttaaacatggctgccgttggcattacggagaacgtgaagggagatgctaagaagttcgagatctggtacaacgcgcgcgaggaggtctacatcgtccaggcgccaactcctgagattaaagccgcgtgggtgaatgaaattcggaaagtgctgaccagccagctgcaggcttgtagagaagccagccagcaccgggcgctggagcagtcacagagcctgcccctgccggccccgaccagcaccagtccctcaagaggaaactcaaggaacatcaagaagctggaagaaaggaaaacagaccccctaagcctggagggatacgtcagctcagcgccactgacaaagccccccgaaaagggcaaagagccctaggaccccacagaagagcccctccctctccattgctctgcacccctgcatcagcaaggccagccccagaaggagcctcggccgagcgtgcaacccggagccgccttgggccctccctgcgacagccggacccgcctccgcatcgggttgcgatgccctctgcatagtttctttctcttccttcatagatgacacggtcactagctctgcctcagaaagctctgcgctttccagaaagcgctttaccctgcagggttttgctaacctcaaaggtcagaaaggtaaaagtagtgcctgccccaaa

SEQ ID NO: 152012 - DNA, 6445 bp, Homo sapiens
  Payload ID: 9926
  Gene Symbol: MCF2L
  Gene Name: MCF.2 cell line derived transforming sequence-like
  Uniprot ID: O15068
  ENST ID: ENST00000375604
  CDS Start-End: 198-3569
agggacatcgaatcggaggccctgggaggagcagccggctggctgccctgcagaggccaggtctgcccagcaaacccaggaaggtgtggcgtccccgcttcgcggccaagatggtgctggtgctgcgccatcctttgtgtgcccgggaagggcgttccgggagccgggtcgggggctcctgactcgcactgggcagcatgacggtgcgccggctgtcactgctgtgccgggacctctgggcgctgtggctgctgctgaaggccggcgcagatgaaatcatgcaccaggacatcgtcccgctctgtgctgccgacatccaggaccagctaaagaagcgctttgcttacctgtccggtgggcgggggcaggacggaagcccggttatcaccttccctgactacccggccttcagcgagattccggacaaggagttccagaatgtcatgacctacctcaccagcatccccagcctgcaggacgctggcatcggattcatcctggtgatagaccggcgacgggacaaatggacctccgtgaaggcgtccgtcctgcgcatcgcagcatctttcccggcaaacctgcagctcgtcctcgtgcttcgcccgacgggttttttccaaaggactctctccgacatcgctttcaaattcaatagagatgactttaagatgaaggtgccggtcataatgctgagctccgtaccagacttacacggttacatcgataagtcgcagctgaccgaggacctgggtgggaccctggactactgccactcccggtggctgtgccagcgcacggccatcgaaagtttcgccctcatggtgaagcagacggctcagatgctgcagtccttcgggaccgagctggctgaaacagagctgcccaatgacgtccagtcgacaagctcagtgctgtgtgcgcacacagagaagaaggacaaggcgaaggaggatttgaggctggcactgaaagaggggcacagtgtcctggagagcctcagggagctgcaggctgagggctcagagcccagtgtgaaccaggaccagcttgacaaccaggccaccgtgcagaggctcctggcccagctgaacgaaaccgaggctgccttcgatgagttctgggcaaagcatcagcagaaactggagcagtgtctgcagctccggcactttgagcagggcttccgggaggtcaaagccatcttggacgcagcgtcccagaagatagcaaccttcacagacatcggcaacagcctggcgcatgtggagcacctgctgagggacctggccagcttcgaggagaaatcaggcgtggccgtggagagggcccgggccctgtctctggacggcgagcagctcattgggaacaagcactacgcggtagactccatccgcccaaagtgccaggagctccggcacctctgtgaccagttctctgcggagatcgcaaggaggagggggctgctcagcaagtccctggagctgcaccgccgcctggagacgtccatgaagtggtgtgatgaagggatttacctgctggcctcacaacctgtggacaagtgccagtcccaggacggcgcggaggctgccctccaggaaatcgagaagtttttggagaccggtgcggaaaataagatccaggagctcaacgcgatttacaaggaatacgaatccatcctcaaccaagatctcatggagcacgtgcgaaaggtcttccagaagcaggcaagcatggaggaggtgttccaccgcaggcaggccagcctgaagaagctggcggccaggcagacgcggcccgtgcagccggtggcccccagacccgaggcactggcaaagtcgccctgcccctccccaggcattcggcgaggctctgagaactccagctccgagggcggtgcgctccggagagggccctaccggagggccaagagtgagatgagtgagagccggcagggccgcggctcagcgggggaggaggaggaaagcctggccatcctgcgcaggcacgtgatgagcgagctcctggacacagaacgggcctacgtggaggagctgctgtgcgtcctggagggctacgccgcggagatggataacccactgatggctcacctcctgtcaacaggccttcacaacaagaaggatgttttgtttggaaacatggaggaaatctatcacttccacaacaggatattcctcagggagctggaaaactacactgactgcccagaactggttggaagatgctttctggagaggatggaagatttccagatctatgagaagtactgtcagaacaagccccgctctgagagcctgtggagacagtgctccgactgcccgtttttccaggaatgccagagaaagctggaccacaagctgagcctggactcctacctgctgaagccagtgcagaggatcaccaagtaccagctgctgctcaaggaaatgctgaaatacagcaggaactgcgagggggctgaggacctgcaggaggcgctgagctccatcctgggcatcctgaaggccgtgaacgactccatgcacctcatcgctatcaccggctatgacgggaatctcggcgacctgggcaagctgctgatgcagggctcgttcagcgtctggaccgaccacaagaggggccacaccaaggtgaaggagctggccaggttcaagcccatgcagcggcacctgttcctgcacgagaaggcagtgctcttctgcaagaagagggaggagaatggggaggggtatgagaaagctccctcctacagctacaagcagtccttaaacatggctgccgttggcattacggagaacgtgaagggagatgctaagaagttcgagatctggtacaacgcgcgcgaggaggtctacatcgtccaggcgccaactcctgagattaaagccgcgtgggtgaatgaaattcggaaagtgctgaccagccagctgcaggcttgtagagaagccagccagcaccgggcgctggagcagtcacagagcctgcccctgccggccccgaccagcaccagtccctcaagaggaaactcaaggaacatcaagaagctggaagaaaggaaaacagaccccctaagcctggagggatacgtcagctcagcgccactgacaaagccccccgaaaagggcaaaggttggagcaaaacgtcccactcactggaggcacctgaggacgacgggggctggtcaagtgcagaggagcagattaactcgtccgacgcagaggaggacggcgggttgggccccaagaagctggttccaggtaaatacacggtcgtggcggaccacgagaagggaggccccgatgcgctgcgcgtgaggagcggggacgtggtggagctggtgcaggagggcgacgagggcctctggtacgtcagggacccgaccactggcaaggagggctgggtgccggccagcagcctgtccgtccggctcggcccgtccggctcggcccagtgcctgagcagctcagagtcgagcccggggtcggccgtgctgagcaactcgtccagctgcagcgagggcggccaggcccccttctccgacctgcaggggtagcgcggcctcggcgccggagacccgcgcgctgtctggggctgcggtggcgtggggagggcgcggcccccggacgccccgaggaaggggcacctcaccgcccccacccagagcgcctggccgtgcgggctgcagaggacccctccggggcagaggcaggttccacggaagaccccggcccgctggggcttccccggagactccagagcccacagaggaggggccgcagggaacagccccgggcggcaggcgccgggcagcggcatctcgtcctggctccaccgtgctgcttctgcctctggacggtgctttcaggggacgcgcggaccgtggtggagctgcttccggagaagtggaggatcctctggccaacggcctgaggagagcggggcacggggtctctttagcttttacaagttttaggattttttcaagcagggatcaatcccgtggccattttttgtggtactttggcctcaattcttcaccaggaatcactgtgtttacatgaaatgacaatttgatactgtatttgatagaaaactatttttttgttaccggggtttacatagaagcacgttgtttataccactaagtgactttgggggggctctcccatggaaacggatggcactccctgaagctccctggtcacaggtggatgaaaacgtgtccgtgggtgacatcaggtggtgtctccaccaccaaaagcagttagaagccaaggagattcctttatctacctagggttcattttcaaaagaaaatttaaactataatttaaacaattaacgttcttttctacaaaaaaaatgcagggacttgatttttttaaagagcttcactgaattaggatatttttattgcttttaaagaaaatacaaagatgcagtttctgcagggtgtggcgtggaccagtgctgccgaccatagctcagagagccctgcccctgcctcactgcactgcagcctcctcggaggccgcacctccactccactccccacgcgccccctgcctcccacccaggtccacctgccacctggtgaccaccttgagtacagaagtgaaagtggggagagtattttattcaagtcacagcagaactggaaaaaaactcttctgttttaccaacttcttgtgtttcagaaacatattctgttcaaaacttttgaagccctttcggtgtctagtctgcagatgtttttgtatgtgtgcacctctgaccatgtgtgtacatatgtgtcttgctggaaaggacatattcgctgtccccgtgctgctgggagggccgcctcacagcctcacggttcccagccccagcacagtggaggcaggcgtggctgcattcccctcacgctaccctcccagcggcttgtagccgtcactggccagacctccagggtgcggaatcaaataggaagcatgcagagactcggcagcttttcctctgatgtgtaagttatttggaacgcgtgctgtgtcccgcgatgtccctgatgtactgtgcaggcgcggtgcctccgtctcgtcgcacagctgcgcgcccttgtgtgaccctccccataaaggcactttacagcttcatgtttcatccactgtcacttttttttaactgctgatgtaaatggaattttaaaagcagagttctttattgtatggatgacgtttgaataaatatcagcaactcctgccatctgcctttgtctgtcaagacacagaacgtctcagcagtcggggtttccagggccgcagtgcactgtgcttgcacatggtaagtcattgttgggacggaaaagaagccggcagtgggcagggcccagcgtgcggctcaggcaccgagcaaccgctttgctttcttctgtcagacggcgatgatgacaaaatagcaacaaggttgtgcgtgtcagaaacgcaaaggcagcagaggaagcgtagtggaaccattacagaatcacaatgcagccgacactctccagaccagaaaagggagcataaagaaagggtattgatccaatagaagaagggaagggtggagaaaggggaaagcatggttaacaggaaacaacatgtaacggaagagacagcccagatgtgtctggctcacaacagacgtgatcatgttatgctggcctggaagagcatcggatcagacgtgacaagtcactgcttagagaccatcaagcaaatttatatatagattggagatttaaaataaaagaagacagaacagacaaacaccataagaaagctggtgtagcagtatcgatgacctgaaatgggattcaggacagttcatagagtaaagggggctgcgtggcaatcaggaactcataagccactgactataaagctcaaaacacagcaaagttggcagtcggcagacagcaatgttgactgtcatgaaaagtgatccctgtttgcccctaaacgtagagaaatctgcgttattttccagcacacatggagcacaaacaaaatatttgcaaaacaatgggaagatcattgaaacactgtttggcaatttaaaagcttgtttctaactcacgggatgcgggcagtctgctctctagaactggacagcgtgcacagagccacgggagggagcagccacggccagctcagattggtgtcgacagcttagtggtgtctgattttatacatgacaaaatgaacgagttaaccatttaagccaaaaaaataagactagcgtaacccaaagaaagtatttaaatacttctgtcaattaggacagttgagaaaagagaataacaaaatcaaaagcaaaactcaaactttgtacctgaaaaatctaataaaactgactaatttatagaaaacctaagaaactccatatcaaataaaaaattttaaatatgag

SEQ ID NO: 152013 - DNA, 3648 bp, Homo sapiens
  Payload ID: 9926
  Gene Symbol: MCF2L
  Gene Name: MCF.2 cell line derived transforming sequence-like
  Uniprot ID: O15068
  ENST ID: ENST00000375608
  CDS Start-End: 59-3472
acctgcggggcgcggagctcggcggacgcgggagggcagcaccacgggcggcagcctcatgtttgactgttggagatttatcctgtgcaagagacctggaagcaacagttattcttccccacaacggcccaatgaggccaaaaaggaggaaacggatcaccaaattgatgtgtctgacgtcatcaggcttgttcaagacacaccggaggcgacggccatggccacagatgaaatcatgcaccaggacatcgtcccgctctgtgctgccgacatccaggaccagctaaagaagcgctttgcttacctgtccggtgggcgggggcaggacggaagcccggttatcaccttccctgactacccggccttcagcgagattccggacaaggagttccagaatgtcatgacctacctcaccagcatccccagcctgcaggacgctggcatcggattcatcctggtgatagaccggcgacgggacaaatggacctccgtgaaggcgtccgtcctgcgcatcgcagcatctttcccggcaaacctgcagctcgtcctcgtgcttcgcccgacgggttttttccaaaggactctctccgacatcgctttcaaattcaatagagatgactttaagatgaaggtgccggtcataatgctgagctccgtaccagacttacacggttacatcgataagtcgcagctgaccgaggacctgggtgggaccctggactactgccactcccggtggctgtgccagcgcacggccatcgaaagtttcgccctcatggtgaagcagacggctcagatgctgcagtccttcgggaccgagctggctgaaacagagctgcccaatgacgtccagtcgacaagctcagtgctgtgtgcgcacacagagaagaaggacaaggcgaaggaggatttgaggctggcactgaaagaggggcacagtgtcctggagagcctcagggagctgcaggctgagggctcagagcccagtgtgaaccaggaccagcttgacaaccaggccaccgtgcagaggctcctggcccagctgaacgaaaccgaggctgccttcgatgagttctgggcaaagcatcagcagaaactggagcagtgtctgcagctccggcactttgagcagggcttccgggaggtcaaagccatcttggacgcagcgtcccagaagatagcaaccttcacagacatcggcaacagcctggcgcatgtggagcacctgctgagggacctggccagcttcgaggagaaatcaggcgtggccgtggagagggcccgggccctgtctctggacggcgagcagctcattgggaacaagcactacgcggtagactccatccgcccaaagtgccaggagctccggcacctctgtgaccagttctctgcggagatcgcaaggaggagggggctgctcagcaagtccctggagctgcaccgccgcctggagacgtccatgaagtggtgtgatgaagggatttacctgctggcctcacaacctgtggacaagtgccagtcccaggacggcgcggaggctgccctccaggaaatcgagaagtttttggagaccggtgcggaaaataagatccaggagctcaacgcgatttacaaggaatacgaatccatcctcaaccaagatctcatggagcacgtgcgaaaggtcttccagaagcaggcaagcatggaggaggtgttccaccgcaggcaggccagcctgaagaagctggcggccaggcagacgcggcccgtgcagccggtggcccccagacccgaggcactggcaaagtcgccctgcccctccccaggcattcggcgaggctctgagaactccagctccgagggcggtgcgctccggagagggccctaccggagggccaagagtgagatgagtgagagccggcagggccgcggctcagcgggggaggaggaggaaagcctggccatcctgcgcaggcacgtgatgagcgagctcctggacacagaacgggcctacgtggaggagctgctgtgcgtcctggagggctacgccgcggagatggataacccactgatggctcacctcctgtcaacaggccttcacaacaagaaggatgttttgtttggaaacatggaggaaatctatcacttccacaacaggatattcctcagggagctggaaaactacactgactgcccagaactggttggaagatgctttctggagaggatggaagatttccagatctatgagaagtactgtcagaacaagccccgctctgagagcctgtggagacagtgctccgactgcccgtttttccaggaatgccagagaaagctggaccacaagctgagcctggactcctacctgctgaagccagtgcagaggatcaccaagtaccagctgctgctcaaggaaatgctgaaatacagcaggaactgcgagggggctgaggacctgcaggaggcgctgagctccatcctgggcatcctgaaggccgtgaacgactccatgcacctcatcgctatcaccggctatgacgggaatctcggcgacctgggcaagctgctgatgcagggctcgttcagcgtctggaccgaccacaagaggggccacaccaaggtgaaggagctggccaggttcaagcccatgcagcggcacctgttcctgcacgagaaggcagtgctcttctgcaagaagagggaggagaatggggaggggtatgagaaagctccctcctacagctacaagcagtccttaaacatggctgccgttggcattacggagaacgtgaagggagatgctaagaagttcgagatctggtacaacgcgcgcgaggaggtctacatcgtccaggcgccaactcctgagattaaagccgcgtgggtgaatgaaattcggaaagtgctgaccagccagctgcaggcttgtagagaagccagccagcaccgggcgctggagcagtcacagagcctgcccctgccggccccgaccagcaccagtccctcaagaggaaactcaaggaacatcaagaagctggaagaaaggaaaacagaccccctaagcctggagggatacgtcagctcagcgccactgacaaagccccccgaaaagggcaaaggttggagcaaaacgtcccactcactggaggcacctgaggacgacgggggctggtcaagtgcagaggagcagattaactcgtccgacgcagaggaggacggcgggttgggccccaagaagctggttccaggtaaatacacggtcgtggcggaccacgagaagggaggccccgatgcgctgcgcgtgaggagcggggacgtggtggagctggtgcaggagggcgacgagggcctctggtacgtcagggacccgaccactggcaaggagggctgggtgccggccagcagcctgtccgtccggctcggcccgtccggctcggcccagtgcctgagcagctcaggtaaggcccacgtgccccgagcccacccgtgacgctgccaagggcccgggcgaggaagctgccccgtgtgtgcccggcagagccgacgccgaagcccgtccccgcctgatctccccgcagagtcgagcccggggtcggccgtgctgagcaactcgtccagctgcagcgagggcggccaggcccccttctccgacctgcaggggtagcg

SEQ ID NO: 152014 - DNA, 3903 bp, Homo sapiens
  Payload ID: 9926
  Gene Symbol: MCF2L
  Gene Name: MCF.2 cell line derived transforming sequence-like
  ENST ID: ENST00000397017
  CDS Start-End: 1-2380
gtcccagaagatagcaaccttcacagacatcggcaacagcctggcgcatgtggagcacctgctgagggacctggccagcttcgaggagaaatcaggcgtggccgtggagagggcccgggccctgtctctggacggcgagcagctcattgggaacaagcactacgcggtagactccatccgcccaaagtgccaggagctccggcacctctgtgaccagttctctgcggagatcgcaaggaggagggggctgctcagcaagtccctggagctgcaccgccgcctggagacgtccatgaagtggtgtgatgaagggatttacctgctggcctcacaacctgtggacaagtgccagtcccaggacggcgcggaggctgccctccaggaaatcgagaagtttttggagaccggtgcggaaaataagatccaggagctcaacgcgatttacaaggaatacgaatccatcctcaaccaagatctcatggagcacgtgcgaaaggtcttccagaagcaggcaagcatggaggaggtgttccaccgcaggcaggccagcctgaagaagctggcggccaggcagacgcggcccgtgcagccggtggcccccagacccgaggcactggcaaagtcgccctgcccctccccaggcattcggcgaggctctgagaactccagctccgagggcggtgcgctccggagagggccctaccggagggccaagagtgagatgagtgagagccggcagggccgcggctcagcgggggaggaggaggaaagcctggccatcctgcgcaggcacgtgatgagcgagctcctggacacagaacgggcctacgtggaggagctgctgtgcgtcctggagggctacgccgcggagatggataacccactgatggctcacctcctgtcaacaggccttcacaacaagaaggatgttttgtttggaaacatggaggaaatctatcacttccacaacaggatattcctcagggagctggaaaactacactgactgcccagaactggttggaagatgctttctggagaggatggaagatttccagatctatgagaagtactgtcagaacaagccccgctctgagagcctgtggagacagtgctccgactgcccgtttttccaggaatgccagagaaagctggaccacaagctgagcctggactcctacctgctgaagccagtgcagaggatcaccaagtaccagctgctgctcaaggaaatgctgaaatacagcaggaactgcgagggggctgaggacctgcaggaggcgctgagctccatcctgggcatcctgaaggccgtgaacgactccatgcacctcatcgctatcaccggctatgacgggaatctcggcgacctgggcaagctgctgatgcagggctcgttcagcgtctggaccgaccacaagaggggccacaccaaggtgaaggagctggccaggttcaagcccatgcagcggcacctgttcctgcacgagaaggcagtgctcttctgcaagaagagggaggagaatggggaggggtatgagaaagctccctcctacagctacaagcagtccttaaacatggctgccgttggcattacggagaacgtgaagggagatgctaagaagttcgagatctggtacaacgcgcgcgaggaggtctacatcgtccaggcgccaactcctgagattaaagccgcgtgggtgaatgaaattcggaaagtgctgaccagccagctgcaggcttgtagagaagccagccagcaccgggcgctggagcagtcacagagcctgcccctgccggccccgaccagcaccagtccctcaagaggaaactcaaggaacatcaagaagctggaagaaaggaaaacagaccccctaagcctggagggatacgtcagctcagcgccactgacaaagccccccgaaaagggcaaagcttctcctaccagtcctgacaaaaaagccaagcggcatgaagtaaagagcgacccgactccctttggtgtgcgaggttggagcaaaacgtcccactcactggaggcacctgaggacgacgggggctggtcaagtgcagaggagcagattaactcgtccgacgcagaggaggacggcgggttgggccccaagaagctggttccaggtaaatacacggtcgtggcggaccacgagaagggaggccccgatgcgctgcgcgtgaggagcggggacgtggtggagctggtgcaggagggcgacgagggcctctggtacgtcagggacccgaccactggcaaggagggctgggtgccggccagcagcctgtccgtccggctcggcccgtccggctcggcccagtgcctgagcagctcaggtaaggcccacgtgccccgagcccacccgtgacgctgccaagggcccgggcgaggaagctgccccgtgtgtgcccggcagagccgacgccgaagcccgtccccgcctgatctccccgcagagtcgagcccggggtcggccgtgctgagcaactcgtccagctgcagcgagggcggccaggcccccttctccgacctgcaggggtagcgcggcctcggcgccggagacccgcgcgctgtctggggctgcggtggcgtggggagggcgcggcccccggacgccccgaggaaggggcacctcaccgcccccacccagagcgcctggccgtgcgggctgcagaggacccctccggggcagaggcaggttccacggaagaccccggcccgctggggcttccccggagactccagagcccacagaggaggggccgcagggaacagccccgggcggcaggcgccgggcagcggcatctcgtcctggctccaccgtgctgcttctgcctctggacggtgctttcaggggacgcgcggaccgtggtggagctgcttccggagaagtggaggatcctctggccaacggcctgaggagagcggggcacggggtctctttagcttttacaagttttaggattttttcaagcagggatcaatcccgtggccattttttgtggtactttggcctcaattcttcaccaggaatcactgtgtttacatgaaatgacaatttgatactgtatttgatagaaaactatttttttgttaccggggtttacatagaagcacgttgtttataccactaagtgactttgggggggctctcccatggaaacggatggcactccctgaagctccctggtcacaggtggatgaaaacgtgtccgtgggtgacatcaggtggtgtctccaccaccaaaagcagttagaagccaaggagattcctttatctacctagggttcattttcaaaagaaaatttaaactataatttaaacaattaacgttcttttctacaaaaaaaatgcagggacttgatttttttaaagagcttcactgaattaggatatttttattgcttttaaagaaaatacaaagatgcagtttctgcagggtgtggcgtggaccagtgctgccgaccatagctcagagagccctgcccctgcctcactgcactgcagcctcctcggaggccgcacctccactccactccccacgcgccccctgcctcccacccaggtccacctgccacctggtgaccaccttgagtacagaagtgaaagtggggagagtattttattcaagtcacagcagaactggaaaaaaactcttctgttttaccaacttcttgtgtttcagaaacatattctgttcaaaacttttgaagccctttcggtgtctagtctgcagatgtttttgtatgtgtgcacctctgaccatgtgtgtacatatgtgtcttgctggaaaggacatattcgctgtccccgtgctgctgggagggccgcctcacagcctcacggttcccagccccagcacagtggaggcaggcgtggctgcattcccc

SEQ ID NO: 152015 - DNA, 576 bp, Homo sapiens
  Payload ID: 9926
  Gene Symbol: MCF2L
  Gene Name: MCF.2 cell line derived transforming sequence-like
  ENST ID: ENST00000397021
  CDS Start-End: 64-324
accaggctcatccgaggacggaggctgtcgttatacaacgcgcaagtgtggtctctgtcacagatgtggctgtcgcagagagtgctgcctcctctcccgtttccagcagatgcttgggaaccttcagaagtcttggggattttctcccagcaccgtagccatgccaccacgagtgaatccttaacgtggaccagcacgggcacctcagatgccaggaccggcgtgatcctgcaggacgctggcatcggattcatcctggtgatagaccggcgacgggacaaatggacctccgtgaaggcgtccgtcctgcgcatcgcaaattagaggccccatatctgctccgatgcccacaaccttcatcgttttggtgcaagcctgtccctgagccgctggttctcatcgaagtctttaggatgaggcatctccttgcacccccacggcacctctctgcccctcgccgcggcggatccccgttcctgaccctgactcaacctggcacacaccacctatggcatcgttatctgaaataattcaaaacgcttcaggatgcttccaaaaaagtagacgtgtatagaa

SEQ ID NO: 152016 - DNA, 490 bp, Homo sapiens
  Payload ID: 9926
  Gene Symbol: MCF2L
  Gene Name: MCF.2 cell line derived transforming sequence-like
  ENST ID: ENST00000397024
  CDS Start-End: 19-429
tgactcgcactgggcagcatgacggtgcgccggctgtcactgctgtgccgggacctctgggcgctgtggctgctgctgaaggccggcgcagatgaaatcatgcaccaggacatcgtcccgctctgtgctgccgacatccaggaccagctaaagaagcgctttgcttacctgtccggtgggcgggggcaggacggaagcccggttatcaccttccctgactacccggccttcagcgagattccggacaaggagttccagaatgtcatgacctacctcaccagcatccccagcggcgggcaggagagcagcatcaggccggtgagctgcaggctgacttgggaggggtgccgcgggggtctctcatctgatgtgctcgtcccagcctccaggaagatgctgagaatgtcagcctcacaccagacagtgtagttgctgcttccatttggggtatagtgaacacacaccaagtaaaaacagaaatatccttaaa

SEQ ID NO: 152017 - DNA, 6580 bp, Homo sapiens
  Payload ID: 9926
  Gene Symbol: MCF2L
  Gene Name: MCF.2 cell line derived transforming sequence-like
  Uniprot ID: O15068
  ENST ID: ENST00000397030
  CDS Start-End: 38-3328
cgcttccctcactgggtcctgcgtccttgggcaggcgatgcccctgcggggaggggctggtccatccccggccagccacggacccacgcatggacccagcgacccacggacctgcttacctgggcgcggcgcgggtggcatgcggccacacggaaggggcgcgctgggctgctgcggcctctgcagcttctacacctgccacggggcggccggagatgaaatcatgcaccaggacatcgtcccgctctgtgctgccgacatccaggaccagctaaagaagcgctttgcttacctgtccggtgggcgggggcaggacggaagcccggttatcaccttccctgactacccggccttcagcgagattccggacaaggagttccagaatgtcatgacctacctcaccagcatccccagcctgcaggacgctggcatcggattcatcctggtgatagaccggcgacgggacaaatggacctccgtgaaggcgtccgtcctgcgcatcgcagcatctttcccggcaaacctgcagctcgtcctcgtgcttcgcccgacgggttttttccaaaggactctctccgacatcgctttcaaattcaatagagatgactttaagatgaaggtgccggtcataatgctgagctccgtaccagacttacacggttacatcgataagtcgcagctgaccgaggacctgggtgggaccctggactactgccactcccggtggctgtgccagcgcacggccatcgaaagtttcgccctcatggtgaagcagacggctcagatgctgcagtccttcgggaccgagctggctgaaacagagctgcccaatgacgtccagtcgacaagctcagtgctgtgtgcgcacacagagaagaaggacaaggcgaaggaggatttgaggctggcactgaaagaggggcacagtgtcctggagagcctcagggagctgcaggctgagggctcagagcccagtgtgaaccaggaccagcttgacaaccaggccaccgtgcagaggctcctggcccagctgaacgaaaccgaggctgccttcgatgagttctgggcaaagcatcagcagaaactggagcagtgtctgcagctccggcactttgagcagggcttccgggaggtcaaagccatcttggacgcagcgtcccagaagatagcaaccttcacagacatcggcaacagcctggcgcatgtggagcacctgctgagggacctggccagcttcgaggagaaatcaggcgtggccgtggagagggcccgggccctgtctctggacggcgagcagctcattgggaacaagcactacgcggtagactccatccgcccaaagtgccaggagctccggcacctctgtgaccagttctctgcggagatcgcaaggaggagggggctgctcagcaagtccctggagctgcaccgccgcctggagacgtccatgaagtggtgtgatgaagggatttacctgctggcctcacaacctgtggacaagtgccagtcccaggacggcgcggaggctgccctccaggaaatcgagaagtttttggagaccggtgcggaaaataagatccaggagctcaacgcgatttacaaggaatacgaatccatcctcaaccaagatctcatggagcacgtgcgaaaggtcttccagaagcaggcaagcatggaggaggtgttccaccgcaggcaggccagcctgaagaagctggcggccaggcagacgcggcccgtgcagccggtggcccccagacccgaggcactggcaaagtcgccctgcccctccccaggcattcggcgaggctctgagaactccagctccgagggcggtgcgctccggagagggccctaccggagggccaagagtgagatgagtgagagccggcagggccgcggctcagcgggggaggaggaggaaagcctggccatcctgcgcaggcacgtgatgagcgagctcctggacacagaacgggcctacgtggaggagctgctgtgcgtcctggagggctacgccgcggagatggataacccactgatggctcacctcctgtcaacaggccttcacaacaagaaggatgttttgtttggaaacatggaggaaatctatcacttccacaacaggatattcctcagggagctggaaaactacactgactgcccagaactggttggaagatgctttctggagaggatggaagatttccagatctatgagaagtactgtcagaacaagccccgctctgagagcctgtggagacagtgctccgactgcccgtttttccaggaatgccagagaaagctggaccacaagctgagcctggactcctacctgctgaagccagtgcagaggatcaccaagtaccagctgctgctcaaggaaatgctgaaatacagcaggaactgcgagggggctgaggacctgcaggaggcgctgagctccatcctgggcatcctgaaggccgtgaacgactccatgcacctcatcgctatcaccggctatgacgggaatctcggcgacctgggcaagctgctgatgcagggctcgttcagcgtctggaccgaccacaagaggggccacaccaaggtgaaggagctggccaggttcaagcccatgcagcggcacctgttcctgcacgagaaggcagtgctcttctgcaagaagagggaggagaatggggaggggtatgagaaagctccctcctacagctacaagcagtccttaaacatggctgccgttggcattacggagaacgtgaagggagatgctaagaagttcgagatctggtacaacgcgcgcgaggaggtctacatcgtccaggcgccaactcctgagattaaagccgcgtgggtgaatgaaattcggaaagtgctgaccagccagctgcaggcttgtagagaagccagccagcaccgggcgctggagcagtcacagagcctgcccctgccggccccgaccagcaccagtccctcaagaggaaactcaaggaacatcaagaagctggaagaaaggaaaacagaccccctaagcctggagggatacgtcagctcagcgccactgacaaagccccccgaaaagggcaaaggttggagcaaaacgtcccactcactggaggcacctgaggacgacgggggctggtcaagtgcagaggagcagattaactcgtccgacgcagaggaggacggcgggttgggccccaagaagctggttccaggtaaatacacggtcgtggcggaccacgagaagggaggccccgatgcgctgcgcgtgaggagcggggacgtggtggagctggtgcaggagggcgacgagggcctctggtaagaccccgcgctcagccccggactgccccgcacgtggctgccgctgaccctcgccccttgcaggtacgtcagggacccgaccactggcaaggagggctgggtgccggccagcagcctgtccgtccggctcggcccgtccggctcggcccagtgcctgagcagctcaggtaaggcccacgtgccccgagcccacccgtgacgctgccaagggcccgggcgaggaagctgccccgtgtgtgcccggcagagccgacgccgaagcccgtccccgcctgatctccccgcagagtcgagcccggggtcggccgtgctgagcaactcgtccagctgcagcgagggcggccaggcccccttctccgacctgcaggggtagcgcggcctcggcgccggagacccgcgcgctgtctggggctgcggtggcgtggggagggcgcggcccccggacgccccgaggaaggggcacctcaccgcccccacccagagcgcctggccgtgcgggctgcagaggacccctccggggcagaggcaggttccacggaagaccccggcccgctggggcttccccggagactccagagcccacagaggaggggccgcagggaacagccccgggcggcaggcgccgggcagcggcatctcgtcctggctccaccgtgctgcttctgcctctggacggtgctttcaggggacgcgcggaccgtggtggagctgcttccggagaagtggaggatcctctggccaacggcctgaggagagcggggcacggggtctctttagcttttacaagttttaggattttttcaagcagggatcaatcccgtggccattttttgtggtactttggcctcaattcttcaccaggaatcactgtgtttacatgaaatgacaatttgatactgtatttgatagaaaactatttttttgttaccggggtttacatagaagcacgttgtttataccactaagtgactttgggggggctctcccatggaaacggatggcactccctgaagctccctggtcacaggtggatgaaaacgtgtccgtgggtgacatcaggtggtgtctccaccaccaaaagcagttagaagccaaggagattcctttatctacctagggttcattttcaaaagaaaatttaaactataatttaaacaattaacgttcttttctacaaaaaaaatgcagggacttgatttttttaaagagcttcactgaattaggatatttttattgcttttaaagaaaatacaaagatgcagtttctgcagggtgtggcgtggaccagtgctgccgaccatagctcagagagccctgcccctgcctcactgcactgcagcctcctcggaggccgcacctccactccactccccacgcgccccctgcctcccacccaggtccacctgccacctggtgaccaccttgagtacagaagtgaaagtggggagagtattttattcaagtcacagcagaactggaaaaaaactcttctgttttaccaacttcttgtgtttcagaaacatattctgttcaaaacttttgaagccctttcggtgtctagtctgcagatgtttttgtatgtgtgcacctctgaccatgtgtgtacatatgtgtcttgctggaaaggacatattcgctgtccccgtgctgctgggagggccgcctcacagcctcacggttcccagccccagcacagtggaggcaggcgtggctgcattcccctcacgctaccctcccagcggcttgtagccgtcactggccagacctccagggtgcggaatcaaataggaagcatgcagagactcggcagcttttcctctgatgtgtaagttatttggaacgcgtgctgtgtcccgcgatgtccctgatgtactgtgcaggcgcggtgcctccgtctcgtcgcacagctgcgcgcccttgtgtgaccctccccataaaggcactttacagcttcatgtttcatccactgtcacttttttttaactgctgatgtaaatggaattttaaaagcagagttctttattgtatggatgacgtttgaataaatatcagcaactcctgccatctgcctttgtctgtcaagacacagaacgtctcagcagtcggggtttccagggccgcagtgcactgtgcttgcacatggtaagtcattgttgggacggaaaagaagccggcagtgggcagggcccagcgtgcggctcaggcaccgagcaaccgctttgctttcttctgtcagacggcgatgatgacaaaatagcaacaaggttgtgcgtgtcagaaacgcaaaggcagcagaggaagcgtagtggaaccattacagaatcacaatgcagccgacactctccagaccagaaaagggagcataaagaaagggtattgatccaatagaagaagggaagggtggagaaaggggaaagcatggttaacaggaaacaacatgtaacggaagagacagcccagatgtgtctggctcacaacagacgtgatcatgttatgctggcctggaagagcatcggatcagacgtgacaagtcactgcttagagaccatcaagcaaatttatatatagattggagatttaaaataaaagaagacagaacagacaaacaccataagaaagctggtgtagcagtatcgatgacctgaaatgggattcaggacagttcatagagtaaagggggctgcgtggcaatcaggaactcataagccactgactataaagctcaaaacacagcaaagttggcagtcggcagacagcaatgttgactgtcatgaaaagtgatccctgtttgcccctaaacgtagagaaatctgcgttattttccagcacacatggagcacaaacaaaatatttgcaaaacaatgggaagatcattgaaacactgtttggcaatttaaaagcttgtttctaactcacgggatgcgggcagtctgctctctagaactggacagcgtgcacagagccacgggagggagcagccacggccagctcagattggtgtcgacagcttagtggtgtctgattttatacatgacaaaatgaacgagttaaccatttaagccaaaaaaataagactagcgtaacccaaagaaagtatttaaatacttctgtcaattaggacagttgagaaaagagaataacaaaatcaaaagcaaaactcaaactttgtacctgaaaaatctaataaaactgactaatttatagaaaacctaagaaactccatatcaaataaaaaattttaaatatgagagaa

SEQ ID NO: 152018 - DNA, 1544 bp, Homo sapiens
  Payload ID: 9926
  Gene Symbol: MCF2L
  Gene Name: MCF.2 cell line derived transforming sequence-like
  ENST ID: ENST00000397036
  CDS Start-End: 9-203
gcagcctcatgtttgactgttggagatttatcctgtgcaagagacctggaagcaacagttattcttccccacaacggcccaatgaggccaaaaaggaggaaacggatcaccaaattgatgtgtctgacgtcatcaggcttgttcaagacacaccggaggcgacggccatggccacagaggtctcggcatctcgtccacagtgagctggtgtcctgccagtctcgggaggcactcggcagtgtgagtacatccttcacctctgtgtctacagacccggcctccccgcccagcatgggttgaagccaggctaaggcgttgatcccaaggggctgtctgcaggggtttggggcaggcctgagcattcaccccagcgtcctgtgcaaacgtcttcgtcaggagcgcacttgggaagtcctacactagcgcagagggtgcgcagccagcgggtctatcaacttggatgcaggtagtgctcagtggcatttggaggagagtctaataaccaagaggatgaatctctttgaaggatctgatggaaacaagaaatgaagagggttgttttgttttgtttgttttatgagacagagtcctgctctgttgcccaagctggatggagtgcagtggtgcaatctcagctccttgcggccgccgcctcctgggttccagctattctcctgcctcagcctcccaagtagctgggattacaggcatgcactttgacaccccggctaatttttgtatttttagtagagatggggtttcaccatgttgtccaggctggtctcaagctcttgacctcaagtgatccgcccgccttggcctcccaaagtgctgggattacaggcatgagccactgtgcctggccacgaaatgaagagattttactacctgaaccttaaaactgttcctgagaaatcaccaagaagactgaccagcaaatgaaaacctggaaaaaaattgcaacaaaggatagatatttatctatgcatctgtcttacatagcagagtgaaaaggaggcacacgttcatagaaagtgaatataaagcttgcacagaaataggctgacctgttcagtttaaagaaatgtaatgctgaccacaaggtctctttctctttccatttttatggccaaaaattccaagcctgctggtaggaatgccagtccttatcgatatactggaaaacaactgatgtcagtaaaagtcttcaaatatttttagttttcgtcagcaatgttcacttctaagaatttaaaagaagaaaatgataaaaatattgtcacaaacattcatgaacaaaggtgatcatcacagccgttatttataattatgaacacttgcaggaaagcaaaattacagcagtaagggtttggaaatgatttagttgttgagatcataattctccctggcacatcttacactataataagtgaaattgccagttataaaaacgatacacagtcttcaattttgtaaacaccaaatatgtgcagttttgtaaaagacttaagatatgcacctaaatataaatgtttttaatcata

SEQ ID NO: 152019 - DNA, 574 bp, Homo sapiens
  Payload ID: 9926
  Gene Symbol: MCF2L
  Gene Name: MCF.2 cell line derived transforming sequence-like
  ENST ID: ENST00000409954
  CDS Start-End: 165-574
aaggaactcagtgaccacagacggatgagaacagcggacgcagctgcctcccaggcactcaaaggctcaactccccacaggcgtgtgttgccaggggcagaaggcttggcccctgggtcagcatactctccggacagctcatccctgccagcccagatgaaatcatgcaccaggacatcgtcccgctctgtgctgccgacatccaggaccagctaaagaagcgctttgcttacctgtccggtgggcgggggcaggacggaagcccggttatcaccttccctgactacccggccttcagcgagattccggacaaggagttccagaatgtcatgacctacctcaccagcatccccagcctgcaggacgctggcatcggattcatcctggtgatagaccggcgacgggacaaatggacctccgtgaaggcgtccgtcctgcgcatcgcagcatctttcccggcaaacctgcagctcgtcctcgtgcttcgcccgacgggttttttccaaaggactctctccgacatcgctttcaaattcaatagagatgactttaagatgaaggtgccggtcataat

SEQ ID NO: 152020 - DNA, 1819 bp, Homo sapiens
  Payload ID: 9926
  Gene Symbol: MCF2L
  Gene Name: MCF.2 cell line derived transforming sequence-like
  ENST ID: ENST00000453297
  CDS Start-End: 1-1009
ggagaatggggaggggtatgagaaagctccctcctacagctacaagcagtccttaaacatggctgccgttggcattacggagaacgtgaagggagatgctaagaagttcgagatctggtacaacgcgcgcgaggaggtctacatcgtccaggcgccaactcctgagattaaagccgcgtgggtgaatgaaattcggaaagtgctgaccagccagctgcaggcttgtagagaagccagccagcaccgggcgctggagcagtcacagagcctgcccctgccggccccgaccagcaccagtccctcaagaggaaactcaaggaacatcaagaagctggaagaaaggaaaacagaccccctaagcctggagggatacgtcagctcagcgccactgacaaagccccccgaaaagggcaaagatgacacggtcactagctctgcctcagaaagctctgcgctttccagaaagcgctttaccctgcagggttttgctaacctcaaaggtcagaaagcttctcctaccagtcctgacaaaaaagccaagcggcatgaagtaaagagcgacccgactccctttggtgtgcgaggttggagcaaaacgtcccactcactggaggcacctgaggacgacgggggctggtcaagtgcagaggagcagattaactcgtccgacgcagaggaggacggcgggttgggccccaagaagctggttccaggtaaatacacggtcgtggcggaccacgagaagggaggccccgatgcgctgcgcgtgaggagcggggacgtggtggagctggtgcaggagggcgacgagggcctctggtacgtcagggacccgaccactggcaaggagggctgggtgccggccagcagcctgtccgtccggctcggcccgtccggctcggcccagtgcctgagcagctcagagtcgagcccggggtcggccgtgctgagcaactcgtccagctgcagcgagggcggccaggcccccttctccgacctgcaggggtagcgcggcctcggcgccggagacccgcgcgctgtctggggctgcggtggcgtggggagggcgcggcccccggacgccccgaggaaggggcacctcaccgcccccacccagagcgcctggccgtgcgggctgcagaggacccctccggggcagaggcaggttccacggaagaccccggcccgctggggcttccccggagactccagagcccacagaggaggggccgcagggaacagccccgggcggcaggcgccgggcagcggcatctcgtcctggctccaccgtgctgcttctgcctctggacggtgctttcaggggacgcgcggaccgtggtggagctgcttccggagaagtggaggatcctctggccaacggcctgaggagagcggggcacggggtctctttagcttttacaagttttaggattttttcaagcagggatcaatcccgtggccattttttgtggtactttggcctcaattcttcaccaggaatcactgtgtttacatgaaatgacaatttgatactgtatttgatagaaaactatttttttgttaccggggtttacatagaagcacgttgtttataccactaagtgactttgggggggctctcccatggaaacggatggcactccctgaagctccctggtcacaggtggatgaaaacgtgtccgtgggtgacatcaggtggtgtctccaccaccaaaagcagttagaagccaaggagattcctttatctacctagggttcattttcaaaagaaaatttaaactataatttaaacaattaacgttcttttctacaaaaaaaa

SEQ ID NO: 152021 - DNA, 557 bp, Homo sapiens
  Payload ID: 9926
  Gene Symbol: MCF2L
  Gene Name: MCF.2 cell line derived transforming sequence-like
  ENST ID: ENST00000433807
  CDS Start-End: 266-557
tttttcctcaagttcctctcgggcgggcacggtgtgtcgcctggacctgcatgtaaacatcagggcggagcaggaatcggcctccaggagggtaattgcctggcgtactctgtcccaggtagtgggtgaaatgaaagtaaaaagccagctggtccctcatgcagattttaggggacaaagttcagcatagaaaggtcctgttacaaggagagggttgtggcgagcccagggcagcgcgcgtcctccccggcagctgatcctcgccatgggggacggaaaggctgtccggatttccgtggcggaaatgaaaagctactacctgtattctgagtggtgctcctggctgctgtccgtggctgaggatgaaatcatgcaccaggacatcgtcccgctctgtgctgccgacatccaggaccagctaaagaagcgctttgcttacctgtccggtgggcgggggcaggacggaagcccggttatcaccttccctgactacccggccttcagcgagattccggacaaggagttccagaatgtcatgacctacctcaccagcatcc

SEQ ID NO: 152022 - DNA, 370 bp, Homo sapiens
  Payload ID: 9926
  Gene Symbol: MCF2L
  Gene Name: MCF.2 cell line derived transforming sequence-like
  ENST ID: ENST00000441756
  CDS Start-End: 1-262
ctcagcgccactgacaaagccccccgaaaagggcaaaggttggagcaaaacgtcccactcactggaggcacctgaggacgacgggggctggtcaagtgcagaggagcagattaactcgtccgacgcagaggaggacggcgggttgggccccaagaagctggtgcccacccagcctcctgtagagcccactcgtgggtgcaccttcctcagaggagacagtccccacccccctaccctttatgtcatagaatgctgtcactgagccttcctaactatacatacaattctcattttgtaagaaaatggaactgctaagcatggatttgcatttgaaaaaacattcattgttaatgtcagaagcaagaaaaag

SEQ ID NO: 152023 - DNA, 3560 bp, Homo sapiens
  Payload ID: 9926
  Gene Symbol: MCF2L
  Gene Name: MCF.2 cell line derived transforming sequence-like
  Uniprot ID: O15068
  ENST ID: ENST00000421756
  CDS Start-End: 357-3560
agaacttgcacacagcaggcaggcccagcggctgggtttctctagcacctcggcattgtctgcctgctcttccaggcgtgcagggcagtggtggctcgggccaggctctgggaggccgggcactctgaggaggtggctcagccctcttgggttctttcttgtgagttggcgaagcccagagtcaccagggtcctgagcacctgtctcttgtgaccatgcggcacccgcccggcttttagctgtcgcagcagagacccgaaggctgtggctctagcatcagggggtcgcctgtggtccctgcgtgaagaaccagagctgcctccgctttgtagcagcctttgtgacagggcggttcgatggccgagaagggagcatcccggggaaccctgcggcggctgtggtcactgcccaggaggcgccggggaactgcagggcgctcgaggccagatgaaatcatgcaccaggacatcgtcccgctctgtgctgccgacatccaggaccagctaaagaagcgctttgcttacctgtccggtgggcgggggcaggacggaagcccggttatcaccttccctgactacccggccttcagcgagattccggacaaggagttccagaatgtcatgacctacctcaccagcatccccagcctgcaggacgctggcatcggattcatcctggtgatagaccggcgacgggacaaatggacctccgtgaaggcgtccgtcctgcgcatcgcagcatctttcccggcaaacctgcagctcgtcctcgtgcttcgcccgacgggttttttccaaaggactctctccgacatcgctttcaaattcaatagagatgactttaagatgaaggtgccggtcataatgctgagctccgtaccagacttacacggttacatcgataagtcgcagctgaccgaggacctgggtgggaccctggactactgccactcccggtggctgtgccagcgcacggccatcgaaagtttcgccctcatggtgaagcagacggctcagatgctgcagtccttcgggaccgagctggctgaaacagagctgcccaatgacgtccagtcgacaagctcagtgctgtgtgcgcacacagagaagaaggacaaggcgaaggaggatttgaggctggcactgaaagaggggcacagtgtcctggagagcctcagggagctgcaggctgagggctcagagcccagtgtgaaccaggaccagcttgacaaccaggccaccgtgcagaggctcctggcccagctgaacgaaaccgaggctgccttcgatgagttctgggcaaagcatcagcagaaactggagcagtgtctgcagctccggcactttgagcagggcttccgggaggtcaaagccatcttggacgcagcgtcccagaagatagcaaccttcacagacatcggcaacagcctggcgcatgtggagcacctgctgagggacctggccagcttcgaggagaaatcaggcgtggccgtggagagggcccgggccctgtctctggacggcgagcagctcattgggaacaagcactacgcggtagactccatccgcccaaagtgccaggagctccggcacctctgtgaccagttctctgcggagatcgcaaggaggagggggctgctcagcaagtccctggagctgcaccgccgcctggagacgtccatgaagtggtgtgatgaagggatttacctgctggcctcacaacctgtggacaagtgccagtcccaggacggcgcggaggctgccctccaggaaatcgagaagtttttggagaccggtgcggaaaataagatccaggagctcaacgcgatttacaaggaatacgaatccatcctcaaccaagatctcatggagcacgtgcgaaaggtcttccagaagcaggcaagcatggaggaggtgttccaccgcaggcaggccagcctgaagaagctggcggccaggcagacgcggcccgtgcagccggtggcccccagacccgaggcactggcaaagtcgccctgcccctccccaggcattcggcgaggctctgagaactccagctccgagggcggtgcgctccggagagggccctaccggagggccaagagtgagatgagtgagagccggcagggccgcggctcagcgggggaggaggaggaaagcctggccatcctgcgcaggcacgtgatgagcgagctcctggacacagaacgggcctacgtggaggagctgctgtgcgtcctggagggctacgccgcggagatggataacccactgatggctcacctcctgtcaacaggccttcacaacaagaaggatgttttgtttggaaacatggaggaaatctatcacttccacaacaggatattcctcagggagctggaaaactacactgactgcccagaactggttggaagatgctttctggagaggatggaagatttccagatctatgagaagtactgtcagaacaagccccgctctgagagcctgtggagacagtgctccgactgcccgtttttccaggaatgccagagaaagctggaccacaagctgagcctggactcctacctgctgaagccagtgcagaggatcaccaagtaccagctgctgctcaaggaaatgctgaaatacagcaggaactgcgagggggctgaggacctgcaggaggcgctgagctccatcctgggcatcctgaaggccgtgaacgactccatgcacctcatcgctatcaccggctatgacgggaatctcggcgacctgggcaagctgctgatgcagggctcgttcagcgtctggaccgaccacaagaggggccacaccaaggtgaaggagctggccaggttcaagcccatgcagcggcacctgttcctgcacgagaaggcagtgctcttctgcaagaagagggaggagaatggggaggggtatgagaaagctccctcctacagctacaagcagtccttaaacatggctgccgttggcattacggagaacgtgaagggagatgctaagaagttcgagatctggtacaacgcgcgcgaggaggtctacatcgtccaggcgccaactcctgagattaaagccgcgtgggtgaatgaaattcggaaagtgctgaccagccagctgcaggcttgtagagaagccagccagcaccgggcgctggagcagtcacagagcctgcccctgccggccccgaccagcaccagtccctcaagaggaaactcaaggaacatcaagaagctggaagaaaggaaaacagaccccctaagcctggagggatacgtcagctcagcgccactgacaaagccccccgaaaagggcaaaggttggagcaaaacgtcccactcactggaggcacctgaggacgacgggggctggtcaagtgcagaggagcagattaactcgtccgacgcagaggaggacggcgggttgggccccaagaagctggttccaggtaaatacacggtcgtggcggaccacgagaagggaggccccgatgcgctgcgcgtgaggagcggggacgtggtggagctggtgcaggagggcgacgagggcctctggtaa

SEQ ID NO: 152024 - DNA, 2710 bp, Homo sapiens
  Payload ID: 9926
  Gene Symbol: MCF2L
  Gene Name: MCF.2 cell line derived transforming sequence-like
  ENST ID: ENST00000442625
  CDS Start-End: 9-209
gcagcctcatgtttgactgttggagatttatcctgtgcaagagacctggaagcaacagttattcttccccacaacggcccaatgaggccaaaaaggaggaaacggatcaccaaattgatgtgtctgacgtcatcaggcttgttcaagacacaccggaggcgacggccatggccacagcccctcggcgatctcagtcccctggcttgtgacccacctgagtgtgatgattcctagtccacagctccagtccggacccctcccccgggcactgcaccgccctgcctccgcagagcctccacccgcatcctacaggtctcccagagccgcgtcatccactgcagctccatccaccatagttcactgcacctctccgtccagttcctttggccagaaaccccatcgtcctcatctgtgttttcactcatgcccgtatccgacctcccgggaaatcctgttggctgtgcctccagaacagatccagaatccagccaggctaccgccctgtctcccactttgaggtcgcgctgcctctgcgcctgtccctccccaccgccgtctcgcagaacagcaagcggtgacctctcgaaggaggcgtgattaacaaagagccaaaatggcaaactgtgtggaggccgtggcgtgggctgttcctcgagagccgtgcttgtagggctggcctgggagggcatccctggtccgcagaggccggtctgtgccgcaaagcctgggcgcaggcacgggagtggcaggagggtcctggagtcaagggagcagctaaatttcaatgcagcagcttctttttgccagagatccaggttaaaaaaagaaaatgtttcaccttttaaaaaatatcatacttaagacctgcatttgttctatacccagatcatctttttagagccaaaacatcaagaaatatggcctgaaaaaggctcatgaaaatactgttctgagaattaagtgttaatgacattctgaaacctcactgtttaaagagatccactgctagtataacaggacccctgatatatttatgcatttataaatttataaaattcattgttaaaatcgagcaatgctggaagcgtctggcccacggatgatgaggaggcagagttttcagaggatgctggaggacagtgcacagctccctgccagtggctgcggctttcaggctgctgggacagtggccggatgcagacctgtgtggagcagctgctgctgctgcagcgaggttggccacataggtgacgccctgctaggcgcatccaggtccagcctcgaggttgtccactttgaggccaggtctgctgggaatccaggcctgctgtgtctacactctcacactccttaaactctcctgaccgggacacacgatgaggttttcctatcaaactctacatgcatttcgtatgacatctctggatttcatcagctccgagtaaaccaagccttacttacagccaggaaggcattcaatacccagatctggtcacattctgcccattggtgcatgttttagaagcatgtgtgtgtttctgcccacctcatggctgctgaggaacagtggctactgcgtgtcgttcttgtgatgcctttgtgattttgtgtgcagagccttatttacaggccgcccccgagagcaaaggataatggtgcattatctgttgacgtgaccctggagagctctaactgaactgcacaaatgggagaatcctcccctaccggcccctgctgctcacagacagtacgctcagctcagcaggggctgctcttacaaatgccatcgcagcacaggcggtcaatgcttggcattttctggggcccctggtttccttttagaggacgcagtattttcagaaatggagttcacatgtgtgctcatcagtcagcagcagtcagctgtgatgtctccaaactgtagaggctttggactttttggcccactttcttcatagaacgatagagatttaggatcttactgccctagtttaatcttggtttgcagatgagaggccgaggccccggggtcctgagccacgtgagctgggcttccaccctggactccatgccgcgcctcctcgccagatagacgccagatagacgccagatagacgtggccagtcgtgctgtttcaaggtcttattccagtcaggtttttgttttattgatttttttgttcatgaagtagaatatggttcatgtattacatacttttctgtgtgtgtgtttttattacaatatctcattttcatgggtttttataacttaagttacctctaacctatgacccttgtagtctcttcttccaccttgtgtatcctaatgtgggaattctgctttggtggatgacttttgtgaagtgaattaacatacatttcatttagaataatgctttgagcaactcaaagaaagtgaatttaattttatcacttagtttttattttatacttaaagagctctatttgccttattcagatttttgctatcagtgttgtatatacacaaagggaagctaagcaaaataacttggttagattttcctaaaatttcttcattcagcatccaactcttctgactcccttacctgggacgttccccagctgtcgccgtcagtcttcctcagatgccagtttgttgaggtgtttctctttccctgatgcctcttgtgccaacaaataaagactttcagctcttcctgggctctcga

SEQ ID NO: 152025 - DNA, 566 bp, Homo sapiens
  Payload ID: 9926
  Gene Symbol: MCF2L
  Gene Name: MCF.2 cell line derived transforming sequence-like
  ENST ID: ENST00000420013
  CDS Start-End: 1-566
tcaagaagctggaagaaaggaaaacagaccccctaagcctggagggatacgtcagctcagcgccactgacaaagccccccgaaaagggcaaagcttctcctaccagtcctgacaaaaaagccaagcggcatgaagtaaagagcgacccgactccctttggtgtgcgaggttggagcaaaacgtcccactcactggaggcacctgaggacgacgggggctggtcaagtgcagaggagcagattaactcgtccgacgcagaggaggacggcgggttgggccccaagaagctggttccaggtaaatacacggtcgtggcggaccacgagaagggaggccccgatgcgctgcgcgtgaggagcggggacgtggtggagctggtgcaggagggcgacgagggcctctggtacgtcagggacccgaccactggcaaggagggctgggtgccggccagcagcctgtccgtccggctcggcccgtccggctcggcccagtgcctgagcagctcagagtcgagcccggggtcggccgtgctgagcaactcgtccagctgcagcgagggcggccag

SEQ ID NO: 152026 - DNA, 734 bp, Homo sapiens
  Payload ID: 9926
  Gene Symbol: MCF2L
  Gene Name: MCF.2 cell line derived transforming sequence-like
  ENST ID: ENST00000423251
  CDS Start-End: 1-642
accagcacgggcacctcagatgccaggaccggcgtgatcctgcaggacgctggcatcggattcatcctggtgatagaccggcgacgggacaaatggacctccgtgaaggcgtccgtcctgcgcatcgcagcatctttcccggcaaacctgcagctcgtcctcgtgcttcgcccgacgggttttttccaaaggactctctccgacatcgctttcaaattcaatagagatgactttaagatgaaggtgccggtcataatgctgagctccgtaccagacttacacggttacatcgataagtcgcagctgaccgaggacctgggtgggaccctggactactgccactcccggtggctgtgccagcgcacggccatcgaaagtttcgccctcatggtgaagcagacggctcagatgctgcagtccttcgggaccgagctggctgaaacagagctgcccaatgacgtccagtcgacaagctcagtgctgtgtgcgcacacagagaagaaggacaaggcgaaggtacatggggggtgctccggctggaagctgtggggggctccggtcagtcagaagctgcgcggggctccggtcggaagctgcggggggtctttcgtcccagcgggagtttgtgtcagcagcacgtaagaccaagaagtcagcaggcttgagatgccttttgatggcaattagctcggcaacctctccgacgagaacggaataaaaggagtgtaaatgaa

SEQ ID NO: 152027 - DNA, 952 bp, Homo sapiens
  Payload ID: 9926
  Gene Symbol: MCF2L
  Gene Name: MCF.2 cell line derived transforming sequence-like
  ENST ID: ENST00000413354
  CDS Start-End: 1-952
tcctgggcatcctgaaggccgtgaacgactccatgcacctcatcgctatcaccggctatgacgggaatctcggcgacctgggcaagctgctgatgcagggctcgttcagcgtctggaccgaccacaagaggggccacaccaaggtgaaggagctggccaggttcaagcccatgcagcggcacctgttcctgcacgagaaggcagtgctcttctgcaagaagagggaggagaatggggaggggtatgagaaagctccctcctacagctacaagcagtccttaaacatggctgccgttggcattacggagaacgtgaagggagatgctaagaagttcgagatctggtacaacgcgcgcgaggaggtctacatcgtccaggcgccaactcctgagattaaagccgcgtgggtgaatgaaattcggaaagtgctgaccagccagctgcaggcttgtagagaagccagccagcaccgggcgctggagcagtcacagagcctgcccctgccggccccgaccagcaccagtccctcaagaggaaactcaaggaacatcaagaagctggaagaaaggaaaacagaccccctaagcctggagggatacgtcagctcagcgccactgacaaagccccccgaaaagggcaaagatgacacggtcactagctctgcctcagaaagctctgcgctttccagaaagcgctttaccctgcagggttttgctaacctcaaagcttctcctaccagtcctgacaaaaaagccaagcggcatgaagtaaagagcgacccgactccctttggtgtgcgaggttggagcaaaacgtcccactcactggaggcacctgaggacgacgggggctggtcaagtgcagaggagcagattaactcgtccgacgcagaggaggacggcgggttgggccccaagaagctggttccaggtaaatacacggtcgtggcgga

SEQ ID NO: 152028 - DNA, 453 bp, Homo sapiens
  Payload ID: 9926
  Gene Symbol: MCF2L
  Gene Name: MCF.2 cell line derived transforming sequence-like
  ENST ID: ENST00000439475
  CDS Start-End: 1-453
ccaggcgccaactcctgagattaaagccgcgtgggtgaatgaaattcggaaagtgctgaccagccagctgcaggcttgtagagaagccagccagcaccgggcgctggagcagtcacagagcctgcccctgccggccccgaccagcaccagtccctcaagaggaaactcaaggaacatcaagaagctggaagaaaggaaaacagaccccctaagcctggagggatacgtcagctcagcgccactgacaaagccccccgaaaagggcaaagatgacacggtcactagctctgcctcagaaagctctgcgctttccagaaagcgctttaccctgcagggttttgctaacctcaaaggtcagaaaggttggagcaaaacgtcccactcactggaggcacctgaggacgacgggggctggtcaagtgcagaggagcagattaactcgtccgacgcaga

SEQ ID NO: 152029 - DNA, 3752 bp, Homo sapiens
  Payload ID: 9926
  Gene Symbol: MCF2L
  Gene Name: MCF.2 cell line derived transforming sequence-like
  Uniprot ID: O15068
  ENST ID: ENST00000535094
  CDS Start-End: 160-3537
caatcctgggcagggaggcggcggctggaggctgaaagcgctgccgtggccccctccccgcctccgccgcgccccctccgcactcgcacggccccacccgcaggcgccccccgtgcggaggaagcggatctgccaggatcatttttgttgtgtcggaggatgaggttttggctgaggactgaagagatggccttggaagaaatggtgcagagattaaatgcggtttccaagcacacggatgaaatcatgcaccaggacatcgtcccgctctgtgctgccgacatccaggaccagctaaagaagcgctttgcttacctgtccggtgggcgggggcaggacggaagcccggttatcaccttccctgactacccggccttcagcgagattccggacaaggagttccagaatgtcatgacctacctcaccagcatccccagcctgcaggacgctggcatcggattcatcctggtgatagaccggcgacgggacaaatggacctccgtgaaggcgtccgtcctgcgcatcgcagcatctttcccggcaaacctgcagctcgtcctcgtgcttcgcccgacgggttttttccaaaggactctctccgacatcgctttcaaattcaatagagatgactttaagatgaaggtgccggtcataatgctgagctccgtaccagacttacacggttacatcgataagtcgcagctgaccgaggacctgggtgggaccctggactactgccactcccggtggctgtgccagcgcacggccatcgaaagtttcgccctcatggtgaagcagacggctcagatgctgcagtccttcgggaccgagctggctgaaacagagctgcccaatgacgtccagtcgacaagctcagtgctgtgtgcgcacacagagaagaaggacaaggcgaaggaggatttgaggctggcactgaaagaggggcacagtgtcctggagagcctcagggagctgcaggctgagggctcagagcccagtgtgaaccaggaccagcttgacaaccaggccaccgtgcagaggctcctggcccagctgaacgaaaccgaggctgccttcgatgagttctgggcaaagcatcagcagaaactggagcagtgtctgcagctccggcactttgagcagggcttccgggaggtcaaagccatcttggacgcagcgtcccagaagatagcaaccttcacagacatcggcaacagcctggcgcatgtggagcacctgctgagggacctggccagcttcgaggagaaatcaggcgtggccgtggagagggcccgggccctgtctctggacggcgagcagctcattgggaacaagcactacgcggtagactccatccgcccaaagtgccaggagctccggcacctctgtgaccagttctctgcggagatcgcaaggaggagggggctgctcagcaagtccctggagctgcaccgccgcctggagacgtccatgaagtggtgtgatgaagggatttacctgctggcctcacaacctgtggacaagtgccagtcccaggacggcgcggaggctgccctccaggaaatcgagaagtttttggagaccggtgcggaaaataagatccaggagctcaacgcgatttacaaggaatacgaatccatcctcaaccaagatctcatggagcacgtgcgaaaggtcttccagaagcaggcaagcatggaggaggtgttccaccgcaggcaggccagcctgaagaagctggcggccaggcagacgcggcccgtgcagccggtggcccccagacccgaggcactggcaaagtcgccctgcccctccccaggcattcggcgaggctctgagaactccagctccgagggcggtgcgctccggagagggccctaccggagggccaagagtgagatgagtgagagccggcagggccgcggctcagcgggggaggaggaggaaagcctggccatcctgcgcaggcacgtgatgagcgagctcctggacacagaacgggcctacgtggaggagctgctgtgcgtcctggagggctacgccgcggagatggataacccactgatggctcacctcctgtcaacaggccttcacaacaagaaggatgttttgtttggaaacatggaggaaatctatcacttccacaacaggatattcctcagggagctggaaaactacactgactgcccagaactggttggaagatgctttctggagaggatggaagatttccagatctatgagaagtactgtcagaacaagccccgctctgagagcctgtggagacagtgctccgactgcccgtttttccaggaatgccagagaaagctggaccacaagctgagcctggactcctacctgctgaagccagtgcagaggatcaccaagtaccagctgctgctcaaggaaatgctgaaatacagcaggaactgcgagggggctgaggacctgcaggaggcgctgagctccatcctgggcatcctgaaggccgtgaacgactccatgcacctcatcgctatcaccggctatgacgggaatctcggcgacctgggcaagctgctgatgcagggctcgttcagcgtctggaccgaccacaagaggggccacaccaaggtgaaggagctggccaggttcaagcccatgcagcggcacctgttcctgcacgagaaggcagtgctcttctgcaagaagagggaggagaatggggaggggtatgagaaagctccctcctacagctacaagcagtccttaaacatggctgccgttggcattacggagaacgtgaagggagatgctaagaagttcgagatctggtacaacgcgcgcgaggaggtctacatcgtccaggcgccaactcctgagattaaagccgcgtgggtgaatgaaattcggaaagtgctgaccagccagctgcaggcttgtagagaagccagccagcaccgggcgctggagcagtcacagagcctgcccctgccggccccgaccagcaccagtccctcaagaggaaactcaaggaacatcaagaagctggaagaaaggaaaacagaccccctaagcctggagggatacgtcagctcagcgccactgacaaagccccccgaaaagggcaaaggttggagcaaaacgtcccactcactggaggcacctgaggacgacgggggctggtcaagtgcagaggagcagattaactcgtccgacgcagaggaggacggcgggttgggccccaagaagctggttccaggtaaatacacggtcgtggcggaccacgagaagggaggccccgatgcgctgcgcgtgaggagcggggacgtggtggagctggtgcaggagggcgacgagggcctctggtacgtcagggacccgaccactggcaaggagggctgggtgccggccagcagcctgtccgtccggctcggcccgtccggctcggcccagtgcctgagcagctcagagtcgagcccggggtcggccgtgctgagcaactcgtccagctgcagcgagggcggccaggcccccttctccgacctgcaggggtagcgcggcctcggcgccggagacccgcgcgctgtctggggctgcggtggcgtggggagggcgcggcccccggacgccccgaggaaggggcacctcaccgcccccacccagagcgcctggccgtgcgggctgcagaggacccctccggggcagaggcaggttccacggaagaccccggcccgctggggcttccccggagactccagagcccacagagg

SEQ ID NO: 152030 - DNA, 361 bp, Homo sapiens
  Payload ID: 9926
  Gene Symbol: MCF2L
  Gene Name: MCF.2 cell line derived transforming sequence-like
  ENST ID: ENST00000486806
  CDS Start-End: 1-282
agcccggttatcaccttccctgactacccggccttcagcgagattccggacaaggagttccagaatgtcatgacctacctcaccagcatccccagcattttgttcatggagtctgctgcttctgagcactggggacaagtcgcggaggccctgccattccttcctccgggttctgcacgcaccgcggtgaccacctccccccgaggtcctctccccgcaccttcccaaaacgtgttccccaggtccttttctgttactgctgttgaattcaacagctactgaccacctgtggccatttaaatgtaaaatgaaagcaaaataaaattaaaaatccagcccatggcaggcagggctgcctctt

SEQ ID NO: 152031 - DNA, 399 bp, Homo sapiens
  Payload ID: 9926
  Gene Symbol: MCF2L
  Gene Name: MCF.2 cell line derived transforming sequence-like
  ENST ID: ENST00000473345
  CDS Start-End: 1-209
tcagcgagattccggacaaggagttccagaatgtcatgacctacctcaccagcatccccagcctgcaggacgctggcatcggattcatcctggtgatagaccggcgacgggacaaatggacctccgtgaaggcgtccgtcctgcgcatcgcacttagagctcgttgcacggagtcagaacccctgcatcccggtggctcaggcatttgagtgaaggtcggatcaggagggaggggagatgcagctgccccacgcatggaggagaagagctgtgagctgcagcagcctcgtgtctttttcctctcaactttcagttcagaaaaatttcagacctacagaaaacttgggagagtctcacagtgaacaaacctcagctgtggccataaacaaagtgcccatt

SEQ ID NO: 152032 - DNA, 4980 bp, Homo sapiens
  Payload ID: 9927
  Gene Symbol: MCF2L2
  Gene Name: MCF.2 cell line derived transforming sequence-like 2
  Uniprot ID: Q86YR7
  ENST ID: ENST00000328913
  CDS Start-End: 299-3643
cggggcgcggttccggcgagattggcgacttgcttccttttgcagaacggccgctcctctctcggtccagctgcgacgctgggaaagcgccagacttggtctgtcacgggagcccccgcggggcgtggcgagggagagctggcctaggctgcgagggactctcgtttcttgcctggagagccaggaagagggcgagggcagagcatccttgggcggagatgcctttaaaaaatcatccaccgcagcggtagaaacagttttgtttggctttatttatacggaatggtttttcagtgaaatgctgtcttgcttaaaagaagagatgcctccccaggagctcacccggcgactggccacagtgatcactcatgtcgatgaaattatgcagcaggaagtcagacccctgatggcggtggagataatagaacaacttcacagacaatttgccattctttcaggaggccgaggggaggatggcgcccccatcatcacgttcccagagttttcggggttcaaacacatcccagatgaagacttcctgaatgtcatgacctacctgactagcatccccagtgtggaggctgccagcattggattcattgttgttatcgacagacgaagagacaagtggagctccgtaaaggcatccttgacacgaatagctgtggcatttccaggaaacttacagctcatattcatccttcgtccatctcgctttatccagaggacattcactgacattggcattaaatactatcgaaatgagtttaaaacgaaagtgccgatcatcatggtaaactctgtctctgaccttcacggctacatcgacaaaagccaactgacccgggaattaggggggactttggaatatcgccacggtcagtgggtaaatcaccgcactgccatcgaaaactttgccttgaccttgaagaccactgcccagatgctgcagacgtttgggtcctgcctggccacagcagagctgcccagaagcatgctatccacggaagaccttctcatgtcccacacaaggcagcgggacaagctgcaggatgagctgaaattacttggaaagcaggggaccacattgctgtcatgcatccaagaaccagcaaccaaatgtcccaacagcaaactcaatctcaaccaacttgagaatgtaactaccatggaaaggttattagttcaactggatgaaacagaaaaagcctttagtcacttttggtctgagcatcatctgaagcttaaccagtgcctacaactacagcattttgagcacgatttttgtaaggctaagcttgccctggataatttgctggaagagcaagcagagtttacaggcattggagacagcgtgatgcacgtggagcagattcttaaggaacacaaaaaactggaggaaaaaagccaggagcccctggaaaaggcccagctgctggcactggttggggaccagctcatccaaagccaccattatgcagcagatgccatcaggccccggtgtgtggagctcaggcacctctgtgacgatttcatcaatggaaacaagaaaaaatgggacattttaggaaagtccttagagtttcatagacagctggacaaggtcagccaatggtgtgaggcaggaatctacctcttggcttcccaagctgtagacaagtgccagtctcgagaaggggttgatatcgccttgaacgacattgcgacattcctgggcacagtcaaggagtacccgttgctcagccccaaggagttttacaacgagtttgagttgctgctcaccctcgatgcaaaggccaaagcccagaaagttttgcagaggctggatgatgtccaggaaatatttcacaagaggcaagtgagtctgatgaaactggcagccaaacagactcgtccagtgcaacctgtggccccacatcctgagtcttcaccaaaatgggtgtcatcaaaaaccagccagccctccacctcggtccctctagctcgtcctctgagaacgtctgaggaaccttatacggagacagagttgaactcccggggaaaggaagatgatgagactaaatttgaagtcaagagtgaagaaatctttgaaagccatcatgaaagggggaaccctgagctggagcagcaggccaggctcggagacctttccccccgcaggcgcattatacgtgacttgcttgagactgaagagatttacataaaagagattaaaagcataattgatggatatatcactccaatggattttatttggctaaagcatctaattccagatgttcttcagaataacaaggactttctctttgggaatattagagaactttacgaatttcacaacaggacttttctaaaagagttggaaaagtgtgctgagaaccctgaacttctggcacattgctttctcaagagaaaagaagatcttcagatatattttaaataccataagaatctgccccgagctagggcaatctggcaagagtgtcaagactgcgcctactttggggtatgccagcgccaactggatcacaatctccctctttttaagtatctcaaaggaccaagccagagacttataaaataccagatgctgttgaagggtctgctggatttcgagtctcctgaagatatggagatagacccaggtgaactaggaggctcggctaaggatgggccaaagagaaccaaagattcagcattctcaactgaactacaacaagctttggcagtgatagaggatttgatcaagtcctgtgagttggctgtggacctagcagcagtgactgaatgtccggacgatattggaaaactaggcaagctgttgctgcacggccctttcagcgtctggacaattcacaaggatcgttataaaatgaaggatttgattcgatttaaacccagccagaggcaaatctacctatttgaaaggggaatagtgttctgtaagatacgaatggagcctggggaccagggattatctcctcattacagcttcaagaagaccatgaagctgatgacactttcaattcgccagcttggaagggggagccatagaaagtttgagattgccagtcgaaatggacttgagaaatacatcctgcaggcagcttcaaaagaaatcagagactgttggttttcagaaataagtaaattattgatggaacaacaaaataatatcaaagaccaaggaaatccacagtttgaaatgagcacgagcaaaggcagtggagcaggatccggaccatggattaaaaatatggaaagagctaccactagcaaggaagacccggcctccagcacaggagggattaaaggctgctccagcagggagtttagctccatggacacctttgaagactgtgaaggcgcagaagacatggaaaaggagagcagtgctctgagtctcgcgggccttttccagtcggacgacagtcacgaaacctgttcctccaaatctgctttcctggagaggggagaaagcagccagggagaaaaagaagaacgcgatgaggaggaaacggcgacccgcagcaccgaggaggagcgcgctggggcgtccacgggccggctggctcctgcgggggcgacggctggtttccaggcgagggcgctgcgcccgaggacctccgcccaggagagctgacctccctgcggacgcccccgctcctcggctccagagcgcccgcattcccgggagaggcggtgtgggggcccgggccctgcccagctacgcagaaagcagccggagcctcggcggcggcagaaaggggacaaccagggcctcctccgaggagcccgaggggtgtcctgggtgcgcgcctagctccgcacgggggacctcggagctgctctaaggcgcctgcagaggcgagcagagcccgcagcccacgccttctcgaccgcgcacttcgatattcggagccgggcaattctttgctgcgtgggcttctctgtgctcccacggtaggatgtttagtagcacccctggcctctacccactaggtgccaggaatgcgccaccccatcctccaccccgcccccaaatcgtgacaatcaaaaatgcctgcagacacgcccgcatttctccagggcggggtgggaatcggttgagagccgcttagcccgagccttggaggagccggagccgctccaacccggcgggggccgcagactgggagctcccggtccgcctcccagcatccctgcgagcgttcatggggtgttcgtgttagtgccaagattgcttcgttgtagagagagttcgttccaagttactttctgaggtattttatgtatcgatttattagtttttaaatgagttttgttagtttcagttgtattttatttttagttttattagttgattttcatttctttgtagctttctggttatttaattttatagtttcagttactggtttatagttactttattttcaaagttatttagttgttcattttcagttatttatatgtagttgttttgttttaggagttacagatgttcaaattaatttgcttggaatttatttatttatttatttatttatttttcgagacggagtctcgctctgtcgcccaggctggagtgcagtggtgtgatctcggctcactgcaaaccgcctcccgggttcacgccattctcctgcctcagcctcctgagtagctgggactacaggcgcccgccaccacgcccggctaattttttatttggatttttagtagagacggggtttccccgtgttagccaggatggtctcgatctcctgacctcgtgatccccctgcctcggcctcccaaagtgctgggattacaggcgtgagccaccgcgcccagccggaatttatttttaattatctttacaattattatctgagttatttaccttcatagttatttcactttatcttattggagtttttgagttatttatttttacagtaacttatttgactattaaacactcactggaagttcatg

SEQ ID NO: 152033 - DNA, 2394 bp, Homo sapiens
  Payload ID: 9927
  Gene Symbol: MCF2L2
  Gene Name: MCF.2 cell line derived transforming sequence-like 2
  Uniprot ID: Q86YR7
  ENST ID: ENST00000447025
  CDS Start-End: 109-2244
ggcgagggcagagcatccttgggcggagatgcctttaaaaaatcatccaccgcagcggtagaaacagttttgtttggctttatttatacggaatggtttttcagtgaaatgctgtcttgcttaaaagaagagatgcctccccaggagctcacccggcgactggccacagtgatcactcatgtcgatgaaattatgcagcaggaagtcagacccctgatggcggtggagataatagaacaacttcacagacaatttgccattctttcaggaggccgaggggaggatggcgcccccatcatcacgttcccagagttttcggggttcaaacacatcccagatgaagacttcctgaatgtcatgacctacctgactagcatccccagtgtggaggctgccagcattggattcattgttgttatcgacagacgaagagacaagtggagctccgtaaaggcatccttgacacgaatagctgtggcatttccaggaaacttacagctcatattcatccttcgtccatctcgctttatccagaggacattcactgacattggcattaaatactatcgaaatgagtttaaaacgaaagtgccgatcatcatggtaaactctgtctctgaccttcacggctacatcgacaaaagccaactgacccgggaattaggggggactttggaatatcgccacggtcagtgggtaaatcaccgcactgccatcgaaaactttgccttgaccttgaagaccactgcccagatgctgcagacgtttgggtcctgcctggccacagcagagctgcccagaagcatgctatccacggaagaccttctcatgtcccacacaaggcagcgggacaagctgcaggatgagctgaaattacttggaaagcaggggaccacattgctgtcatgcatccaagaaccagcaaccaaatgtcccaacagcaaactcaatctcaaccaacttgagaatgtaactaccatggaaaggttattagttcaactggatgaaacagaaaaagcctttagtcacttttggtctgagcatcatctgaagcttaaccagtgcctacaactacagcattttgagcacgatttttgtaaggctaagcttgccctggataatttgctggaagagcaagcagagtttacaggcattggagacagcgtgatgcacgtggagcagattcttaaggaacacaaaaaactggaggaaaaaagccaggagcccctggaaaaggcccagctgctggcactggttggggaccagctcatccaaagccaccattatgcagcagatgccatcaggccccggtgtgtggagctcaggcacctctgtgacgatttcatcaatggaaacaagaaaaaatgggacattttaggaaagtccttagagtttcatagacagctggacaaggtcagccaatggtgtgaggcaggaatctacctcttggcttcccaagctgtagacaagtgccagtctcgagaaggggttgatatcgccttgaacgacattgcgacattcctgggcacagtcaaggagtacccgttgctcagccccaaggagttttacaacgagtttgagttgctgctcaccctcgatgcaaaggccaaagcccagaaagttttgcagaggctggatgatgtccaggaaatatttcacaagaggcaagtgagtctgatgaaactggcagccaaacagactcgtccagtgcaacctgtggccccacatcctgagtcttcaccaaaatgggtgtcatcaaaaaccagccagccctccacctcggtccctctagctcgtcctctgagaacgtctgaggaaccttatacggagacagagttgaactcccggggaaaggaagatgatgagactaaatttgaagtcaagagtgaagaaatctttgaaagccatcatgaaagggggaaccctgagctggagcagcaggccaggctcggagacctttccccccgcaggcgcattatacgtgacttgcttgagactgaagagatttacataaaagagattaaaagcataattgatggatatatcactccaatggattttatttggctaaagcatctaattccagatgttcttcagaataacaaggactttctctttgggaatattagagaactttacgaatttcacaacaggacttttctaaaagagttggaaaagtgtgctgagaaccctgaacttctggcacattgctttctcaagagagtaagtctgtactcccagtaaataatcatgttaaagtcagcccttacatttctgcgttaagtggcaaggacaaatggaaacatcaatggtctaaaaacatatctgcttccctccgactccaagctttactgaagtataattggtaaataaaaattgcatatattcaaacta

SEQ ID NO: 152034 - DNA, 3031 bp, Homo sapiens
  Payload ID: 9927
  Gene Symbol: MCF2L2
  Gene Name: MCF.2 cell line derived transforming sequence-like 2
  Uniprot ID: Q86YR7
  ENST ID: ENST00000414362
  CDS Start-End: 125-2011
ggagagccaggaagagggcgagggcagagcatccttgggcggagatgcctttaaaaaatcatccaccgcagcggtagaaacagttttgtttggctttatttatacggaatggtttttcagtgaaatgctgtcttgcttaaaagaagagatgcctccccaggagctcacccggcgactggccacagtgatcactcatgtcgatgaaattatgcagcaggaagtcagacccctgatggcggtggagataatagaacaacttcacagacaatttgccattctttcaggaggccgaggggaggatggcgcccccatcatcacgttcccagagttttcggggttcaaacacatcccagatgaagacttcctgaatgtcatgacctacctgactagcatccccagtgtggaggctgccagcattggattcattgttgttatcgacagacgaagagacaagtggagctccgtaaaggcatccttgacacgaatagctgtggcatttccaggaaacttacagctcatattcatccttcgtccatctcgctttatccagaggacattcactgacattggcattaaatactatcgaaatgagtttaaaacgaaagtgccgatcatcatggtaaactctgtctctgaccttcacggctacatcgacaaaagccaactgacccgggaattaggggggactttggaatatcgccacggtcagtgggtaaatcaccgcactgccatcgaaaactttgccttgaccttgaagaccactgcccagatgctgcagacgtttgggtcctgcctggccacagcagagctgcccagaagcatgctatccacggaagaccttctcatgtcccacacaaggcagcgggacaagctgcaggatgagctgaaattacttggaaagcaggggaccacattgctgtcatgcatccaagaaccagcaaccaaatgtcccaacagcaaactcaatctcaaccaacttgagaatgtaactaccatggaaaggttattagttcaactggatgaaacagaaaaagcctttagtcacttttggtctgagcatcatctgaagcttaaccagtgcctacaactacagcattttgagcacgatttttgtaaggctaagcttgccctggataatttgctggaagagcaagcagagtttacaggcattggagacagcgtgatgcacgtggagcagattcttaaggaacacaaaaaactggaggaaaaaagccaggagcccctggaaaaggcccagctgctggcactggttggggaccagctcatccaaagccaccattatgcagcagatgccatcaggccccggtgtgtggagctcaggcacctctgtgacgatttcatcaatggaaacaagaaaaaatgggacattttaggaaagtccttagagtttcatagacagctggacaaggtcagccaatggtgtgaggcaggaatctacctcttggcttcccaagctgtagacaagtgccagtctcgagaaggggttgatatcgccttgaacgacattgcgacattcctgggcacagtcaaggagtacccgttgctcagccccaaggagttttacaacgagtttgagttgctgctcaccctcgatgcaaaggccaaagcccagaaagttttgcagaggctggatgatgtccaggaaatatttcacaagaggcaagtgagtctgatgaaactggcagccaaacagactcgtccagtgcaacctgtggccccacatcctgagtcttcaccaaaatgggtgtcatcaaaaaccagccagccctccacctcggtccctctagctcgtcctctgagaacgtctgaggaaccttatacggagacagagttgaactcccggggaaaggaagatgatgagactaaatttgaagtcaagagtgaagaaatctttgaaagccatcatgaaagggggaaccctgagctggagcagcaggccaggctcggagacctttccccccgcagatactcttctcagtactttaagtaagtgtgatgaaggaatcatctagcaacttccttcttagaaaaaaaggaagtgccttcatatttccttgaaatttaaacttgttccattctattctaagcaaaaattaaaaggacacagttcagaagagctctttcagcaaataaataattgtttcacaaaagcactgctgtaaacaagatcactttgatggccagagacacttatgttttcaaccaatggcaaccttaaacacttccaagtatagatacacagggtatatatgggcaaaaggcaatacatcattaatcaatcaactaataaaaattaattataagcttgttgcttggtcaaatatgcttttgttctctatgtttttttaattggtcagaaaacttaaactgtaatgatctaaaaccctgtatctactctgaaagtaactacaacctagaatgtttgacactgtagttttgacattagttaaaaattctaaattatctaagcaatgtaaacaagcctcaaatttcaaaatagaaaaaaattaaaatttctgtaaacattaaaaagctacctgctaaaaattgtaagtatcatcattcagttgtgtatactgagaaatcttttttcgttttgttttgcgtgtttccgacatcaccttattatatgagacatctgattttccctaacaggtgcctctgcagtcaaaggccttagagtgagttcagtcactcttgctgaagtcattattttggccttcatataatctccctagcagtagacaccacctagttctttctgtagtgaagggaggtagtgtgtattatagccacatttttatcctgctttgtaaaataaatgtaacttactctattagatctcagacacatctctttgattacaaggaacatgcagctttaaaaatgctttaaccccaaactggcaacttttctatcacttttttactctgttttcaagtttgaaatatttagaaaataaagatcacctctgacagttattgatgaaaaataaattgttttagatatt

SEQ ID NO: 152035 - DNA, 570 bp, Homo sapiens
  Payload ID: 9927
  Gene Symbol: MCF2L2
  Gene Name: MCF.2 cell line derived transforming sequence-like 2
  ENST ID: ENST00000482017
  CDS Start-End: 198-570
agcctcccgctccgggtcctgccggatggcggcagctctccgggccagcccccttctctccgcggctcctccgcagacacccggcgcggaagaaggaggggcggagacctggccggcgcgcgtctgatgatccggaccccggtgcgactggagcgcctcagtcactgtctccccgccccacggttccgaatgaaattatgcagcaggaagtcagacccctgatggcggtggagataatagaacaacttcacagacaatttgccattctttcaggaggccgaggggaggatggcgcccccatcatcacgttcccagagttttcggggttcaaacacatcccagatgaagacttcctgaatgtcatgacctacctgactagcatccccagtgtggaggctgccagcattggattcattgttgttatcgacagacgaagagacaagtggagctccgtaaaggcatccttgacacgaatagctgtggcatttccaggaaacttacagctcatattcatccttcgtccatctcgctttatccagaggacattcactgacattggcattaaatact

SEQ ID NO: 152036 - DNA, 4748 bp, Homo sapiens
  Payload ID: 9927
  Gene Symbol: MCF2L2
  Gene Name: MCF.2 cell line derived transforming sequence-like 2
  Uniprot ID: Q86YR7
  ENST ID: ENST00000473233
  CDS Start-End: 1-3225
atgctgtcttgcttaaaagaagagatgcctccccaggagctcacccggcgactggccacagtgatcactcatgtcgatgaaattatgcagcaggaagtcagacccctgatggcggtggagataatagaacaacttcacagacaatttgccattctttcaggaggccgaggggaggatggcgcccccatcatcacgttcccagagttttcggggttcaaacacatcccagatgaagacttcctgaatgtcatgacctacctgactagcatccccagtgtggaggctgccagcattggattcattgttgttatcgacagacgaagagacaagtggagctccgtaaaggcatccttgacacgaatagctgtggcatttccaggaaacttacagctcatattcatccttcgtccatctcgctttatccagaggacattcactgacattggcattaaatactatcgaaatgagtttaaaacgaaagtgccgatcatcatggtaaactctgtctctgaccttcacggctacatcgacaaaagccaactgacccgggaattaggggggactttggaatatcgccacggtcagtgggtaaatcaccgcactgccatcgaaaactttgccttgaccttgaagaccactgcccagatgctgcagacgtttgggtcctgcctggccacagcagagctgcccagaagcatgctatccacggaagaccttctcatgtcccacacaaggcagcgggacaagctgcaggatgagctgaaattacttggaaagcaggggaccacattgctgtcatgcatccaagaaccagcaaccaaatgtcccaacagcaaactcaatctcaaccaacttgagaatgtaactaccatggaaaggttattagttcaactggatgaaacagaaaaagcctttagtcacttttggtctgagcatcatctgaagcttaaccagtgcctacaactacagcattttgagcacgatttttgtaaggctaagcttgccctggataatttgctggaagagcaagcagagtttacaggcattggagacagcgtgatgcacgtggagcagattcttaaggaacacaaaaaactggaggaaaaaagccaggagcccctggaaaaggcccagctgctggcactggttggggaccagctcatccaaagccaccattatgcagcagatgccatcaggccccggtgtgtggagctcaggcacctctgtgacgatttcatcaatggaaacaagaaaaaatgggacattttaggaaagtccttagagtttcatagacagctggacaaggtcagccaatggtgtgaggcaggaatctacctcttggcttcccaagctgtagacaagtgccagtctcgagaaggggttgatatcgccttgaacgacattgcgacattcctgggcacagtcaaggagtacccgttgctcagccccaaggagttttacaacgagtttgagttgctgctcaccctcgatgcaaaggccaaagcccagaaagttttgcagaggctggatgatgtccaggaaatatttcacaagaggcaagtgagtctgatgaaactggcagccaaacagactcgtccagtgcaacctgtggccccacatcctgagtcttcaccaaaatgggtgtcatcaaaaaccagccagccctccacctcggtccctctagctcgtcctctgagaacgtctgaggaaccttatacggagacagagttgaactcccggggaaaggaagatgatgagactaaatttgaagtcaagagtgaagaaatctttgaaagccatcatgaaagggggaaccctgagctggagcagcaggccaggctcggagacctttccccccgcaggcgcattatacgtgacttgcttgagactgaagagatttacataaaagagattaaaagcataattgatggatatatcactccaatggattttatttggctaaagcatctaattccagatgttcttcagaataacaaggactttctctttgggaatattagagaactttacgaatttcacaacaggacttttctaaaagagttggaaaagtgtgctgagaaccctgaacttctggcacattgctttctcaagagaaaagaagatcttcagatatattttaaataccataagaatctgccccgagctagggcaatctggcaagagtgtcaagactgcgcctactttggggtatgccagcgccaactggatcacaatctccctctttttaagtatctcaaaggaccaagccagagacttataaaataccagatgctgttgaagggtctgctggatttcgagtctcctgaagatatggagatagacccaggtgaactaggaggctcggctaaggatgggccaaagagaaccaaagattcagcattctcaactgaactacaacaagctttggcagtgatagaggatttgatcaagtcctgtgagttggctgtggacctagcagcagtgactgaatgtccggacgatattggaaaactaggcaagctgttgctgcacggccctttcagcgtctggacaattcacaaggatcgttataaaatgaaggatttgattcgatttaaacccagccagaggcaaatctacctatttgaaaggggaatagtgttctgtaagatacgaatggagcctggggaccagggattatctcctcattacagcttcaagaagaccatgaagctgatgacactttcaattcgccagcttggaagggggagccatagaaagtttgagattgccagtcgaaatggacttgagaaatacatcctgcaggcagcttcaaaagaaatcagagactgttggttttcagaaataagtaaattattgatggaacaacaaaataatatcaaagaccaaggaaatccacagtttgaaatgagcacgagcaaaggcagtggagcaggatccggaccatggattaaaaatatggaaagagctaccactagcaaggaagacccggcctccagcacaggagggattaaaggctgctccagcagggagtttagctccatggacacctttgaagactgtgaaggcgcagaagacatggaaaaggagagcagtgctctgagtctcgcgggccttttccagtcggacgacagtcacgaaacctgttcctccaaatctgctttcctggagaggggagaaagcagccagggagaaaaagaagaacgcgatgaggaggaaacgtgagtgtgagcgaggaaagactaagcgcctctttgggccacggcgtctctgactttcttctcggaattgcagggcgacccgcagcaccgaggaggagcgcgctggggcgtccacgggccggctggctcctgcgggggcgacggctggtttccaggcgagggcgctgcgcccgaggacctccgcccaggagagctgacctccctgcggacgcccccgctcctcggctccagagcgcccgcattcccgggagaggcggtgtgggggcccgggccctgcccagctacgcagaaagcagccggagcctcggcggcggcagaaaggggacaaccagggcctcctccgaggagcccgaggggtgtcctgggtgcgcgcctagctccgcacgggggacctcggagctgctctaaggcgcctgcagaggcgagcagagcccgcagcccacgccttctcgaccgcgcacttcgatattcggagccgggcaattctttgctgcgtgggcttctctgtgctcccacggtaggatgtttagtagcacccctggcctctacccactaggtgccaggaatgcgccaccccatcctccaccccgcccccaaatcgtgacaatcaaaaatgcctgcagacacgcccgcatttctccagggcggggtgggaatcggttgagagccgcttagcccgagccttggaggagccggagccgctccaacccggcgggggccgcagactgggagctcccggtccgcctcccagcatccctgcgagcgttcatggggtgttcgtgttagtgccaagattgcttcgttgtagagagagttcgttccaagttactttctgaggtattttatgtatcgatttattagtttttaaatgagttttgttagtttcagttgtattttatttttagttttattagttgattttcatttctttgtagctttctggttatttaattttatagtttcagttactggtttatagttactttattttcaaagttatttagttgttcattttcagttatttatatgtagttgttttgttttaggagttacagatgttcaaattaatttgcttggaatttatttatttatttatttatttatttttcgagacggagtctcgctctgtcgcccaggctggagtgcagtggtgtgatctcggctcactgcaaaccgcctcccgggttcacgccattctcctgcctcagcctcctgagtagctgggactacaggcgcccgccaccacgcccggctaattttttatttggatttttagtagagacggggtttccccgtgttagccaggatggtctcgatctcctgacctcgtgatccccctgcctcggcctcccaaagtgctgggattacaggcgtgagccaccgcgcccagccggaatttatttttaattatctttacaattattatctgagttatttaccttcatagttatttcactttatcttattggagtttttgagttatttatttttacagtaacttatttgactattaaacactcactggaa

SEQ ID NO: 152037 - DNA, 6714 bp, Homo sapiens
  Payload ID: 9928
  Gene Symbol: MKKS
  Gene Name: McKusick-Kaufman syndrome
  Uniprot ID: Q9NPJ1
  ENST ID: ENST00000347364
  CDS Start-End: 764-2476
gtgccctcgcgcgacgcgaaggttgtcgggatccgcggcagcagcggctgcttgagatctgtttctggggcctctggcggtggcggcctggggcggcgcgacggctggtgcgcaggtacactgatgctgaagtactatgagccttcggaacttgtggagagactacaaagttttggttgttatggtccctttagttgggctcatacatttggggtggtacagaatcaaaagcagccctgttttccaaatacctaaaaacgacgacattcctgagcaagatagtctgggactttcaaatcttcagaagagccaaatccaggggaagtagcaggcttgcaatcttcaggtaaagaagcagctttgaatctgagcttcatatcgaaagaagagatgaaaaataccagttggattagaaagaactggcttcttgtagctgggatatctttcataggtgtccatcttggaacatactttttgcagaggtctgcaaagcagtctgtaaaatttcagtctcaaagcaaacaaaagagtattgaagagtgaagtaaaataaatatttggaattactaatttgtcattaaatcattctatgctgattagcttcataaacattgaactttttgattttatagccacaatgctgcatattcatactttaattcctaaagaataatttttaatgttaaaacgtgataatgcaataaatagaaaaatgtggtttacaaaataaaaacggtcttcactagttaccacctgaagtaagatgtctcgtttggaagctaagaagccatcattgtgtaagagtgaaccactgacaactgagagagtcaggaccacactttctgtcttgaaaagaattgtaacatcatgctatggcccctcaggtaggctgaagcagctgcacaatggctttggaggttacgtgtgtacaacctcacagtcctcagctctgctcagtcaccttttggtcacacatcccattttaaagatcctgacagcctccatacagaatcatgtgtcaagcttcagtgattgtggcttattcacagctattctttgctgcaacctgattgaaaatgttcagagattaggcttgacacccaccactgtcattagattaaataaacatcttttgagtctttgcatcagttatctcaagtctgagacctgtggttgtcgaatcccagtggactttagtagtactcagatcctcctttgtttggtgcgtagtatattaacaagtaaacctgcctgtatgctcaccagaaaggaaacagagcatgtcagtgctttgatcctgagagcctttttgcttacaattccagaaaatgctgaaggccacatcattttaggaaagagtttaattgtacctttaaaaggtcaaagagttatagattccactgtattacctgggatactcattgaaatgtcagaagttcaattaatgaggctattacctatcaaaaaatcaactgccctcaaggtggcactcttttgtacaactttatccggagacacttctgacactggagaaggaactgtggtggtcagttatggggtttctcttgaaaatgcagtcttggaccagctgcttaacctaggaaggcagctaatcagtgaccacgtagatcttgtcctgtgccaaaaagttatacatccatctttgaagcagtttctcaatatgcatcgtattattgccatagacagaattggagtgactctgatggaacccctgactaaaatgacaggaacacagcctattggatccctaggctcaatatgtcctaatagttatggaagtgtgaaagatgtgtgcactgcaaaatttggctccaaacatttttttcatcttattcctaatgaagcaacaatctgcagcttgcttctctgcaacagaaatgacactgcctgggatgagctgaagctcacgtgtcagacggcactgcatgtcctgcagttaacactcaaggaaccatgggctttgttgggaggtggctgtactgaaactcatttggctgcatatatcagacacaagactcacaacgacccagaaagcattctcaaagatgatgaatgtactcaaacagaacttcaattaattgctgaagcattttgcagtgccctagaatctgttgttggctctttagaacatgatggaggtgaaattctcactgacatgaagtatggacacctttggtcagttcaggcagattctccctgtgttgctaactggccagatttgctttcacagtgtggctgtggattatacaatagccaggaagaactcaactggtctttcttaagaagcacacgtcgtccatttgtgccacaaagctgccttccacatgaagctgtgggctcagccagcaacctgaccttggactgtttgactgcaaagcttagtggcctacaggtggctgtagagacagccaatttgattttggatctttcatatgttattgaagataaaaactaagagaatagcatgttcgtattacaagagaaacaaataaactagtctgttggcaattgagaaaaattgtgagtgtatttgttttctcccaaagccctgttctacatatttggacaaatgactcataaaattatagatacacttatttaggaaaaaaggtgattcgtgaatggaaatgccatgaaacaataaaaatatgaagcattatttatttaaaaatattatagttatcttagggattctatactggctgctgtacattgttctaaatttttgttatgttggcatcattttgagagcaaacaaataaaaaagactcctaatccatgctctagtttggatatacatattttagatattttccagttagcagtaattacatatgcttaaagtataaaactagatctcaaagtgtcacaaaacattcagtatatattgctcaatcaaaagaagtattcaaactgcacatttagtaaaatttcacttttctccatgccctttatctcaagctatattcttcagtggttaggtaattgagtagaacctggtttgcctgcaatttgtagtttatatcacaactccacatttttgttattttggggaaatgtttgcttttggggggaaaaagtagatttatatagtaaccaaggctaaagcaacattgtaatgtcttcatttttaaagtgggaagaaggactggtttgttttacactggggtttctcaactttggcattattgacattctgagccccataattctttgttgtacggaggctgccctgtgcattacagcttactgagcagcatccctggcctctgcacactagatgccagtagcaccctcctgttgtgacaaccaaaaatgtttccagacattgccaaatgtcccccgaagagcaaaactgttgttggttgagaaccatagactgatagaaaaaggaaggacaataaggagtattctagcaggacttcagaaagcagcataaagggaaggggaagttatttctctagtcaatagtatgaaaaagaaagtagaaaatctcccatgttcaaagtagagacattatgtttcaccaagggatgtagtttgaattttatgcaaatataagatgtattgataaattgaagaagaaatatagaaggcagccacatgaataagcatggagctataacaaatgttgtattaaactttaggaaaatattttggaaatttttgggaaacaaaccaacctaatagtcaatgatcagatctatagccatgataaagagaaatagaattgttaaacaatttcctctgatattcttgtaatcaaaaagaatttttactctgagccaaaggaaaaaactagcaatacaagcagcaatgccatccatatatgttaggtatcagccccacctgaagtctcataaaatatttatcaaaagttttactccttttattattacaatcaaatagaagggcagtgtggtaggcagcctctaaggtggccccacctcctagtttcagaccttgcataatttcctccccttgagcatgggctagacttagtgactcctttatgtctcccatttcccagctttgtggacagaatgttatggtgatggttatggttatgccttatccataattttatgctgtgagtagaaggcagataacttttctctagtttcatgggtctacagatggaaagcaactgtgttccaggaactgtacttaaagaactacctcctgaggaagcctggggtgattccagttatgatatcaccctgacttgattccaattatgagattctgaactttgagctgatgttgtaatgcaaaagtgaaacttttgaggatctgaggagtaggggggacgtattttgcatgtggtaggcagcctctaagatggttcccaataatctcacttcctggtggttcactctctgggtgtaggtgggacctaatgactagcttctaatgaatagaatacagcagaagggacaggatatcacttctgatatttggtggtaaaaagatgagtttgtctcttgatgccttctctctcaatggaagccagctgtcatgttgggaactgccccctggggaggcccacatagcaagggttgagggaggcttctagccaacagctcaaaaggaactgaatcgtaccaataaccacaagagtgaatttggaagcaggttctccccagtggaaccttgagttgagtatagccctaccactggagccacacgagagaccctgatgcaaaaaagccagctaagctactcccaggttggttcctaacccacaaaatctgtgagataataaatgttgttttaagtcaaatttgggatgtactttcttatacagcaatagctatctaataaaggcaggaggaaaagcttatttgtaataaattatttactgaaaacttggtcacataaatggaaaaaagcattcttgatgccatgcctttgcatttttatcatcaccccaacctaaaagaagggttctttatcacatgtgtttacaatgtgtcacataggagttgggtattgtcctggttctctttgcccttatcctgcattttttcaagttcctccaagaaggggtgacacagcgaacctctccaattgatcttatagattaggggcttctacttttcacgatagccactttttaaattctatcatttttagctttgccatacaatttgattacattccttagtgaaacatcaatgctcttattttgaatatatcacaaattcgttaaaatatatttacaaatacctctatgtttcctaaagttataataatccctagcagaaaacactggaaatagaaaaaaagagaaaaaaaaccttcctctatagttcaagaaaattagcgttcaaacttagatgataaaacatgaaatgaaaattcttgatgaaaataattttagaggagttccttttggcagaaataaatgataagtaaaaatagcaactaaggtaagcctcaggcagtgttttgtgacttaaagtaagattgaggtctgaatattgcattatgaagtacctcaggagagagaatgggaaaccgtgatcgctgtggaaaaggaaagggagagtgtgaagaagaaaatgaagtcggtgacagctgctcaataatttcgtgggactctcaggacatgtaacattaaacgttattcaaccataggagtccaacaggattatcatcttattaatcaaaaggcattaggattttagcagcaaggaagaaagtggagagctacagcaaataaaggaaacttttaatcaaatacttatttggtcttatagatatcctaccctttaattcttccatttgtaccatattagagagtctttatatgttagacattgtaagtcaactgttagactgaagcactttatgtaagtgaagtattttacacaagatatttaaactatatcacattaatatcttttattataggtatccttgaactcatttggtttgtattatcaaagctacttaggcatttacattgtagacaagaaatttgaagtaaccataaatcagccattgtactatgtattttcatattgttgttcatattgttgagcagttctttggataactttaaaataaaataatgttgtttaccatcacatacattatgcaggttatttaaaattatcatgtaaaaaatcaatgcaggccttgacaaaacatacaattagttaggttattccttcctgataatctttggggaatagtcaaagagactaaacatctcctacaaggccctgtttcagctgtctaaataaagctatctcttaatctgaaggaaaagtcaattttgaatatctgatatctttataatttttttcatgtagctaagtgcttccatttagtaactattgtatcccataatggaagtttttgccaatcatctacagaatttgaatttagatgcacctaaacccaatgttagcctacttttggattataagtagatttatatgctgctttactaagaatatagtaatattcatgaaagagaatgcaatccctgaaaactattcctaaatgtaagtgaagctgtttgttggagagacgattagtcttggcgcactaaaatccatagaatactatattacctgtaatgaagtgtgaatttagagggaaataaaacagcttgacaatctcctattaaaaattctctttgagaaaatacttataataaacatcttattttagccatcttga

SEQ ID NO: 152038 - DNA, 2663 bp, Homo sapiens
  Payload ID: 9928
  Gene Symbol: MKKS
  Gene Name: McKusick-Kaufman syndrome
  Uniprot ID: Q9NPJ1
  ENST ID: ENST00000399054
  CDS Start-End: 888-2600
gggaaaacactttaggttgagtgctgagagaaaggctctctgagtaggtgacatctgaactaagagctgaagcagaagaataagccatcctctgtggaccaaaggggacaagattctctacttttctgctacgcactaggaatatagcagagaagacaagtggctgctaccttctgttatcgtgggtggcagtgactagtttttctagatcttgactccctgccgtaactaaagatggagtacactgatgctgaagtactatgagccttcggaacttgtggagagactacaaagttttggttgttatggtccctttagttgggctcatacatttggggtggtacagaatcaaaagcagccctgttttccaaatacctaaaaacgacgacattcctgagcaagatagtctgggactttcaaatcttcagaagagccaaatccaggggaagtagcaggcttgcaatcttcaggtaaagaagcagctttgaatctgagcttcatatcgaaagaagagatgaaaaataccagttggattagaaagaactggcttcttgtagctgggatatctttcataggtgtccatcttggaacatactttttgcagaggtctgcaaagcagtctgtaaaatttcagtctcaaagcaaacaaaagagtattgaagagtgaagtaaaataaatatttggaattactaatttgtcattaaatcattctatgctgattagcttcataaacattgaactttttgattttatagccacaatgctgcatattcatactttaattcctaaagaataatttttaatgttaaaacgtgataatgcaataaatagaaaaatgtggtttacaaaataaaaacggtcttcactagttaccacctgaagtaagatgtctcgtttggaagctaagaagccatcattgtgtaagagtgaaccactgacaactgagagagtcaggaccacactttctgtcttgaaaagaattgtaacatcatgctatggcccctcaggtaggctgaagcagctgcacaatggctttggaggttacgtgtgtacaacctcacagtcctcagctctgctcagtcaccttttggtcacacatcccattttaaagatcctgacagcctccatacagaatcatgtgtcaagcttcagtgattgtggcttattcacagctattctttgctgcaacctgattgaaaatgttcagagattaggcttgacacccaccactgtcattagattaaataaacatcttttgagtctttgcatcagttatctcaagtctgagacctgtggttgtcgaatcccagtggactttagtagtactcagatcctcctttgtttggtgcgtagtatattaacaagtaaacctgcctgtatgctcaccagaaaggaaacagagcatgtcagtgctttgatcctgagagcctttttgcttacaattccagaaaatgctgaaggccacatcattttaggaaagagtttaattgtacctttaaaaggtcaaagagttatagattccactgtattacctgggatactcattgaaatgtcagaagttcaattaatgaggctattacctatcaaaaaatcaactgccctcaaggtggcactcttttgtacaactttatccggagacacttctgacactggagaaggaactgtggtggtcagttatggggtttctcttgaaaatgcagtcttggaccagctgcttaacctaggaaggcagctaatcagtgaccacgtagatcttgtcctgtgccaaaaagttatacatccatctttgaagcagtttctcaatatgcatcgtattattgccatagacagaattggagtgactctgatggaacccctgactaaaatgacaggaacacagcctattggatccctaggctcaatatgtcctaatagttatggaagtgtgaaagatgtgtgcactgcaaaatttggctccaaacatttttttcatcttattcctaatgaagcaacaatctgcagcttgcttctctgcaacagaaatgacactgcctgggatgagctgaagctcacgtgtcagacggcactgcatgtcctgcagttaacactcaaggaaccatgggctttgttgggaggtggctgtactgaaactcatttggctgcatatatcagacacaagactcacaacgacccagaaagcattctcaaagatgatgaatgtactcaaacagaacttcaattaattgctgaagcattttgcagtgccctagaatctgttgttggctctttagaacatgatggaggtgaaattctcactgacatgaagtatggacacctttggtcagttcaggcagattctccctgtgttgctaactggccagatttgctttcacagtgtggctgtggattatacaatagccaggaagaactcaactggtctttcttaagaagcacacgtcgtccatttgtgccacaaagctgccttccacatgaagctgtgggctcagccagcaacctgaccttggactgtttgactgcaaagcttagtggcctacaggtggctgtagagacagccaatttgattttggatctttcatatgttattgaagataaaaactaagagaatagcatgttcgtattacaagagaaacaaataaactagtctgttggcaattgagaaaaa

SEQ ID NO: 152039 - DNA, 882 bp, Homo sapiens
  Payload ID: 9928
  Gene Symbol: MKKS
  Gene Name: McKusick-Kaufman syndrome
  ENST ID: ENST00000609375
  CDS Start-End: 261-452
gggaaaacactttaggttgagtgctgagagaaaggctctctgagtaggtgacatctgaactaagagctgaagcagaagaataagccatcctctgtggaccaaaggggacaagattctctacttttctgctacgcactaggaatatagcagagaagacaagtggctgctaccttctgttatcgtgggtggcagtgactagtttttctagatcttgactccctgccgtaactaaagatggagtacactgatgctgaagtactatgagccttcggaacttgtggagagactacaaagttttggttgttatggtccctttagttgggctcatacatttggggtggtacagaatcaaaagcagccctgttttccaaatacctaaaaacgacgacattcctgagcaagatagtctgggactttcaaatcttcagaagagccaaatccaggggaagtagcaggcttgcaatcttcaggtaaagaagcagctttgaatctgagcttcatatcgaaagaagagatgaaaaataccagttggattagaaagaactggcttcttgtagctgggatatctttcataggtgtccatcttggaacatactttttgcagaggtctgcaaagcagtctgtaaaatttcagtctcaaagcaaacaaaagagtattgaagagtgaagtaaaataaatatttggaattactaatttgtcattaaatcattctatgctgattagcttcataaacattgaactttttgattttatagccacaatgctgcatattcatactttaattcctaaagaataatttttaatgttaaaacgtgataatgcaataaatagaaaaatgtggtttacaaaataaaaacggtcttcactagttaccacctgaa

SEQ ID NO: 152040 - DNA, 2918 bp, Homo sapiens
  Payload ID: 9929
  Gene Symbol: MDM1
  Gene Name: Mdm1 nuclear protein
  Uniprot ID: Q8TC05
  ENST ID: ENST00000303145
  CDS Start-End: 88-2232
gctagggaacactgttatcgccccgccccctcggagctttttctccagttaactgtcggagtagcgggggctccggcgccgggcgacatgccggtgcgcttcaaggggctgagtgaataccagaggaacttcctgtggaaaaagtcttatttgtccgagtcttgtaattcctccgtggggcgaaagtacccatgggctggacttagatcagatcaattaggcatcacgaaagagccaagttttatttcaaaaagaagagtcccttaccatgacccacagatttcaaaatctctggagtggaatggagctatctcagagagcaatgtggttgcatcaccagaaccagaagccccggaaacaccaaaatcacaagaagcagaacaaaaggatgttactcaagaaagagttcactcactagaagcttccagggttcccaaaagaaccagatctcactctgcagactccagagctgaaggggcttcagatgtggaaaataatgagggtgtaacaaaccatacaccagttaatgaaaatgtggaactggaacattctaccaaggttctttcagaaaatgtagataatgggttggatagacttctgcgtaagaaagctggattgactgttgttccttcatataatgccttgagaaattctgaatatcaaaggcagtttgtttggaagacttctaaagaaactgctccagcttttgcagccaatcaggttttccacaataaaagccagtttgttccaccattcaaaggtaactcagtcatccatgaaactgaatacaaaagaaatttcaagggtttatctccagtgaaagaaccaaaattaagaaatgatttgagagaaaacagaaatcttgaaacagtgtctcctgaaaggaagagtaataaaatagacgatcgtttaaaattggaagcagagatggaattaaaagacttacaccagcctaaaaggaagcttactccttggaaacatcaaaggcttgggaaggtgaattccgaatatagagcaaaatttctgagcccagctcagtatttatataaagctggggcttggacacatgtaaagggaaacatgccaaatcaggttaaagaactccgagaaaaggctgagttttataggaagcgagttcaggggacgcatttttctcgggaccatctgaatcagattttatctgatagcaactgctgttgggatgtctcctcaaccacaagctcagaaggaaccgttagtagcaacatcagagcattagatcttgctggagatcctacaagccataagactttgcagaaatgtccttctacagaaccagaagaaaaaggaaatatcgtggaagaacagccccagaaaaataccacggagaaattgggtgtgtcagctcccaccatacccgttagaaggcggctggcttgggatacagagaacacaagtgaagacgtacagaaacagcccggggagaaagaggaggaggacgacaatgaagaggaaggggacaggaaaacgggcaagcaggcttttatgggagagcaagagaagttggatgtacgtgagaaatctaaggcagataagatgaaagaagggtcagattcttctgtatcctcagaaaaaggaggccggcttcctactcccaagctgagagaacttggtggaatccagaggactcatcatgatctcactactccagctgttggtggtgctgttttagtgtctccatctaagatgaagcctccagccccagaacagaggaaaagaatgacctctcaggattgtttagaaacttcaaagaatgattttactaagaaagaaagtcgtgctgtatccctactgacttctccagctgctggtataaaaacagttgatcctctgcctttgcgggaagattctgaagacaatatccacaaatttgctgaggcaactcttccagtttcaaaaattccaaaatacccaacaaatccccctggacagttgccttctccaccacatgttccatcctactggcatccctctcgacgaattcagggctctcttagagatccagagtttcagcacaatgtgggaaaagcaaggatgaacaatttgcagttacctcaacatgaagcctttaatgatgaagatgaggacagattgtctgagatttctgctcgctctgcagcttctagtctccgggcttttcaaactctggcacgagctaagaaaaggaaggagaatttctggggtaaaacataaacctagctgagttgcctttatctaaggaaacattggcataatttttctttattgcttactgtgttaaaattttttgagtgaagtttttcctaacgttttctactttgaaatatttaatttccaatagaacagtttacttggaaattgttaacataggcttatacaaatttaacttttaaagaattctttttacatctatcccagagtacaaagacctagattattgaattcttcacatgtaactttcgtaataggtgtcatggatagattttcacctatccagagagtattctaaaaaaataaacaaagtgaagtaaaagttaagatcccagtgtgaagtatatattcccctaagatttgatatatgtatctttataattgatgatgttgtaaaatgaatttgttgttcctttaacctttgctgtagtgtttctttttattttagttccttctatacatgtttgcagtgttaagataattgtactttgaaaacaccagctgtatatatttttcttatttatgtaacaaagtttgctgaaagatatgtatatttttgatctttgagtgtattctatttgtgtaaggactttggcttacatttgaataatgtctagattttgaaaaattacctgtataatggagaattaaaactttgtagacattttgaaataaaaatggatcaagtg

SEQ ID NO: 152041 - DNA, 393 bp, Homo sapiens
  Payload ID: 9929
  Gene Symbol: MDM1
  Gene Name: Mdm1 nuclear protein
  ENST ID: ENST00000357874
  CDS Start-End: 1-92
tagtctccgggcttttcaaactctggcacgagctaagaaaaggaaggagaatttctgggatgaggaaactgaggtttacagaaactgagtaacttcgccaagtccatatccttcataaatggtgtagttggggctgcaagccatgcctaactggccttggagaccagattgctctgatgtttgaaggaagcttccatggctgttccggggtgtggcaggcgacctcacaaaacttgttctacatgttggccaaagatctgctaatttcctacttaggcaacattgtacaatccagttctaacaatattcttctttcctcctggcaaagctaaccatacggtcggaggacttgaatgcccagtgacgtttggtgacaatctgaagccaccaagg

SEQ ID NO: 152042 - DNA, 2718 bp, Homo sapiens
  Payload ID: 9929
  Gene Symbol: MDM1
  Gene Name: Mdm1 nuclear protein
  Uniprot ID: Q8TC05
  ENST ID: ENST00000393543
  CDS Start-End: 80-289
acactgttatcgccccgccccctcggagctttttctccagttaactgtcggagtagcgggggctccggcgccgggcgacatgccggtgcgcttcaaggggctgagtgaataccagaggaacttcctgtggaaaaagtcttatttgtccgagtcttgtaattcctccgtggggcgaaagtacccatgggctggacttagatcagatcaattaggaaatcaaggcagatgtagaaccaagatccagcacagtgacatctcatcccttctcatcttggtctgctccacataagagaagctttgtgaaaagttccaaattttgacagtaccagggcccattgttctgttaagtagcacaggaaagtaattagaaacgaggcagcatgtactgcctggcctgccaggtctatcacgttgcaattctagtgacttttgttaggataactggaacattttgtgaccccctgatttttaattttttgttatggtcaaatttttaatgcttttaaaagcaaaattaaatattttatgttgaaaagctgtacttttaaaatcctataatctgaaggatattgtgtgtatatataggtacatatatctgaactaaatttaaaatttcatttctcctccacaagtgttcttaaaagttgtctttgtaactttttgctttagtagctactatttttgtataccgtgttttgtaggcatcacgaaagagccaagttttatttcaaaaagaagagtcccttaccatgacccacagatttcaaaatctctggagtggaatggagctatctcagagagcaatgtggttgcatcaccagaaccagaagccccggaaacaccaaaatcacaagaagcagaacaaaaggatgttactcaagaaagagttcactcactagaagcttccagggttcccaaaagaaccagatctcactctgcagactccagagctgaaggggcttcagatgtggaaaataatgagggtgtaacaaaccatacaccagttaatgaaaatgtggaactggaacattctaccaaggttctttcagaaaatgtagataatggggtaggcatattcactgcatttcttttcaaaagcatagaattcttcattggtttcattgtcatttctgtaatattacattttgtgtttcagaattttccattgttgttttcttgtctaatgtctataagaatagttgataacaggctgttgactttagttattgtgaattagttctattctgactactcgctattttgtagtagttgtactatgataatctgtttattggatggacctcctgcgtctggattttattcatcatatattagcacctgagtcctaagggagagatcaagttgagacagagaagggaagtaggcccttacttctggcagggtgctgagctgacttctacctagccccttttcagtttcttatcgtgtacaagaagacaaacagaaattcaattgatgaaatgcaaaaggaaggagagctctggctgtctctcagagatcttgcatttctgctctcttatgtcacagctggcctgcagcaggtccctgtgagcacataagcagaggctgcaggaacttgtgtggggatctcaatgctttccacatttctttctccattctgttccactgctcttctctggttcatgtccaccactgactgggaccctgaagaggcatttcagagtgttggagaagaatctgtagcttgttgaaaaagctgggggtgaaagggaacaaggaaggtgatgtgtgagtctggcaggcaggagaaggggtgttcatagaagcagtgtgcaggtgaggcaaagtgctgggactttttggtaatagatttaattatgaatgattagtaggaaaggactgagagtattatatttttcctgggatgcctaatagtcctttgatagaaaggaattttaaatagtttgacacttgaaaaaagatactatttataagttgaagaaagtttgctgtaccacaatgcgcatgtagttaacaattttgcactgtagatttaacattttgttaagaggatagatttcatgttatgcattttttaccacaatttttaaaaagtttgaatagaaatttttaatgtctttgagtggattttgttttttgaacagttggatagacttctgcgtaagaaagctggattgactgttgttccttcatataatgccttgagaaattctgaatatcaaaggcagtttgtttggaagacttctaaagaaactgctccagcttttgcagccaatcaggtagcttaatggatgtaatacatttctgagtaccattatcttatctagtaatgtagatttacatagaattaagagttgaaagaaattaagtacttaagtagcctggaggtaggttctagaaaaccaaaatgagagttttgctaaaatcatcctattacttatgatttatggtagtaatattatactgtcctaggcttctgatgatcattgttgccagatgcagcacatatactaaatatgagacagggtaatgaaaacttggggaactggtaagtttttgcatgctacaagatttttttacttattaaaaaattattaaattgattttattctaaaatgttgtgttttgttgactaatatattgcgtgtttcctgtattctaagaaaggcgtaactgctttgaatatttaataaatacaaaatatgttgacagtaa

SEQ ID NO: 152043 - DNA, 2472 bp, Homo sapiens
  Payload ID: 9929
  Gene Symbol: MDM1
  Gene Name: Mdm1 nuclear protein
  Uniprot ID: Q8TC05
  ENST ID: ENST00000411698
  CDS Start-End: 42-2081
agttaactgtcggagtagcgggggctccggcgccgggcgacatgccggtgcgcttcaaggggctgagtgaataccagaggaacttcctgtggaaaaagtcttatttgtccgagtcttgtaattcctccgtggggcgaaagtacccatgggctggacttagatcagatcaattaggcatcacgaaagagccaagttttatttcaaaaagaagagtcccttaccatgacccacagatttcaaaatctctggagtggaatggagctatctcagagagcaatgtggttgcatcaccagaaccagaagccccggaaacaccaaaatcacaagaagcagaacaaaaggatgttactcaagaaagagttcactcactagaagcttccagggttcccaaaagaaccagatctcactctgcagactccagagctgaaggggcttcagatgtggaaaataatgagggtgtaacaaaccatacaccagttaatgaaaatgtggaactggaacattctaccaaggttctttcagaaaatgtagataatggggttttccacaataaaagccagtttgttccaccattcaaaggtaactcagtcatccatgaaactgaatacaaaagaaatttcaagggtttatctccagtgaaagaaccaaaattaagaaatgatttgagagaaaacagaaatcttgaaacagtgtctcctgaaaggaagagtaataaaatagacgatcgtttaaaattggaagcagagatggaattaaaagacttacaccagcctaaaaggaagcttactccttggaaacatcaaaggcttgggaaggtgaattccgaatatagagcaaaatttctgagcccagctcagtatttatataaagctggggcttggacacatgtaaagggaaacatgccaaatcagggttctctaaatgccatgtggtatgctgaggttaaagaactccgagaaaaggctgagttttataggaagcgagttcaggggacgcatttttctcgggaccatctgaatcagattttatctgatagcaactgctgttgggatgtctcctcaaccacaagctcagaaggaaccgttagtagcaacatcagagcattagatcttgctggagatcctacaagccataagactttgcagaaatgtccttctacagaaccagaagaaaaaggaaatatcgtggaagaacagccccagaaaaataccacggagaaattgggtgtgtcagctcccaccatacccgttagaaggcggctggcttgggatacagagaacacaagtgaagacgtacagaaacagcccggggagaaagaggaggaggacgacaatgaagaggaaggggacaggaaaacgggcaagcaggcttttatgggagagcaagagaagttggatgtacgtgagaaatctaaggcagataagatgaaagaagggtcagattcttctgtatcctcagaaaaaggaggccggcttcctactcccaagctgagagaacttggtggaatccagaggactcatcatgatctcactactccagctgttggtggtgctgttttagtgtctccatctaagatgaagcctccagccccagaacagaggaaaagaatgacctctcaggattgtttagaaacttcaaagaatgattttactaagaaagaaagtcgtgctgtatccctactgacttctccagctgctggtataaaaacagttgatcctctgcctttgcgggaagattctgaagacaatatccacaaatttgctgaggcaactcttccagtttcaaaaattccaaaatacccaacaaatccccctggacagttgccttctccaccacatgttccatcctactggcatccctctcgacgaattcagggctctcttagagatccagagtttcagcacaatgtgggaaaagcaaggatgaacaatttgcagttacctcaacatgaagcctttaatgatgaagatgaggacagattgtctgagatttctgctcgctctgcagcttctagtctccgggcttttcaaactctggcacgagctaagaaaaggaaggagaatttctggggtaaaacataaacctagctgagttgcctttatctaaggaaacattggcataatttttctttattgcttactgtgttaaaattttttgagtgaagtttttcctaacgttttctactttgaaatatttaatttccaatagaacagtttacttggaaattgttaacataggcttatacaaatttaacttttaaagaattctttttacatctatcccagagtacaaagacctagattattgaattcttcacatgtaactttcgtaataggtgtcatggatagattttcacctatccagagagtattctaaaaaaataaacaaagtgaagtaaaagttaagatcccagtgtgaagtatatattcccctaagatttgatatatgtatctttataattgatgatgttgt

SEQ ID NO: 152044 - DNA, 2170 bp, Homo sapiens
  Payload ID: 9929
  Gene Symbol: MDM1
  Gene Name: Mdm1 nuclear protein
  Uniprot ID: Q8TC05
  ENST ID: ENST00000430606
  CDS Start-End: 137-805
aagcgcggagtgcgccggcgcgtagtcggggacgccgggccgaggctttgctagggaacactgttatcgccccgccccctcggagctttttctccagttaactgtcggagtagcgggggctccggcgccgggcgacatgccggtgcgcttcaaggggctgagtgaataccagaggaacttcctgtggaaaaagtcttatttgtccgagtcttgtaattcctccgtggggcgaaagtacccatgggctggacttagatcagatcaattaggcatcacgaaagagccaagttttatttcaaaaagaagagtcccttaccatgacccacagatttcaaaatctctggagtggaatggagctatctcagagagcaatgtggttgcatcaccagaaccagaagccccggaaacaccaaaatcacaagaagcagaacaaaaggatgttactcaagaaagagttcactcactagaagcttccagggttcccaaaagaaccagatctcactctgcagactccagagctgaaggggcttcagatgtggaaaataatgagggtgtaacaaaccatacaccagttaatgaaaatgtggaactggaacattctaccaaggttctttcagaaaatgtagataatggggtaggcatattcactgcatttcttttcaaaagcatagaattcttcattggtttcattgtcatttctgtaatattacattttgtgtttcagaattttccattgttgttttcttgtctaatgtctataagaatagttgataacaggctgttgactttagttattgtgaattagttctattctgactactcgctattttgtagtagttgtactatgataatctgtttattggatggacctcctgcgtctggattttattcatcatatattagcacctgagtcctaagggagagatcaagttgagacagagaagggaagtaggcccttacttctggcagggtgctgagctgacttctacctagccccttttcagtttcttatcgtgtacaagaagacaaacagaaattcaattgatgaaatgcaaaaggaaggagagctctggctgtctctcagagatcttgcatttctgctctcttatgtcacagctggcctgcagcaggtccctgtgagcacataagcagaggctgcaggaacttgtgtggggatctcaatgctttccacatttctttctccattctgttccactgctcttctctggttcatgtccaccactgactgggaccctgaagaggcatttcagagtgttggagaagaatctgtagcttgttgaaaaagctgggggtgaaagggaacaaggaaggtgatgtgtgagtctggcaggcaggagaaggggtgttcatagaagcagtgtgcaggtgaggcaaagtgctgggactttttggtaatagatttaattatgaatgattagtaggaaaggactgagagtattatatttttcctgggatgcctaatagtcctttgatagaaaggaattttaaatagtttgacacttgaaaaaagatactatttataagttgaagaaagtttgctgtaccacaatgcgcatgtagttaacaattttgcactgtagatttaacattttgttaagaggatagatttcatgttatgcattttttaccacaatttttaaaaagtttgaatagaaatttttaatgtctttgagtggattttgttttttgaacagttggatagacttctgcgtaagaaagctggattgactgttgttccttcatataatgccttgagaaattctgaatatcaaaggcagtttgtttggaagacttctaaagaaactgctccagcttttgcagccaatcaggtagcttaatggatgtaatacatttctgagtaccattatcttatctagtaatgtagatttacatagaattaagagttgaaagaaattaagtacttaagtagcctggaggtaggttctagaaaaccaaaatgagagttttgctaaaatcatcctattacttatgatttatggtagtaatattatactgtcctaggcttctgatgatcattgttgccagatgcagcacatatactaaatatgagacagggtaatgaaaacttggggaactggtaagtttttgcatgctacaagatttttttacttattaaaaaattattaaa

SEQ ID NO: 152045 - DNA, 2507 bp, Homo sapiens
  Payload ID: 9929
  Gene Symbol: MDM1
  Gene Name: Mdm1 nuclear protein
  ENST ID: ENST00000540418
  CDS Start-End: 42-182
agttaactgtcggagtagcgggggctccggcgccgggcgacatgccggtgcgcttcaaggggctgagtgaataccagaggaacttcctgtggaaaaagtcttatttgtccgagtcttgtaattcctccgtggggcgaaagtacccatgggctggacttagatcagatcaattagttggatagacttctgcgtaagaaagctggattgactgttgttccttcatataatgccttgagaaattctgaatatcaaaggcagtttgtttggaagacttctaaagaaactgctccagcttttgcagccaatcaggttttccacaataaaagccagtttgttccaccattcaaaggtaactcagtcatccatgaaactgaatacaaaagaaatttcaagggtttatctccagtgaaagaaccaaaattaagaaatgatttgagagaaaacagaaatcttgaaacagtgtctcctgaaaggaagagtaataaaatagacgatcgtttaaaattggaagcagagatggaattaaaagacttacaccagcctaaaaggaagcttactccttggaaacatcaaaggcttgggaaggtgaattccgaatatagagcaaaatttctgagcccagctcagtatttatataaagctggggcttggacacatgtaaagggaaacatgccaaatcaggttaaagaactccgagaaaaggctgagttttataggaagcgagttcaggggacgcatttttctcgggaccatctgaatcagattttatctgatagcaactgctgttgggatgtctcctcaaccacaagctcagaaggaaccgttagtagcaacatcagagcattagatcttgctggagatcctacaagccataagactttgcagaaatgtccttctacagaaccagaagaaaaaggaaatatcgtggaagaacagccccagaaaaataccacggagaaattgggtgtgtcagctcccaccatacccgttagaaggcggctggcttgggatacagagaacacaagtgaagacgtacagaaacagcccggggagaaagaggaggaggacgacaatgaagaggaaggggacaggaaaacgggcaagcaggcttttatgggagagcaagagaagttggatgtacgtgagaaatctaaggcagataagatgaaagaagggtcagattcttctgtatcctcagaaaaaggaggccggcttcctactcccaagctgagagaacttggtggaatccagaggactcatcatgatctcactactccagctgttggtggtgctgttttagtgtctccatctaagatgaagcctccagccccagaacagaggaaaagaatgacctctcaggattgtttagaaacttcaaagaatgattttactaagaaagaaagtcgtgctgtatccctactgacttctccagctgctggtataaaaacagttgatcctctgcctttgcgggaagattctgaagacaatatccacaaatttgctgaggcaactcttccagtttcaaaaattccaaaatacccaacaaatccccctggacagttgccttctccaccacatgttccatcctactggcatccctctcgacgaattcagggctctcttagagatccagagtttcagcacaatgtgggaaaagcaaggatgaacaatttgcagttacctcaacatgaagcctttaatgatgaagatgaggacagattgtctgagatttctgctcgctctgcagcttctagtctccgggcttttcaaactctggcacgagctaagaaaaggaaggagaatttctggggtaaaacataaacctagctgagttgcctttatctaaggaaacattggcataatttttctttattgcttactgtgttaaaattttttgagtgaagtttttcctaacgttttctactttgaaatatttaatttccaatagaacagtttacttggaaattgttaacataggcttatacaaatttaacttttaaagaattctttttacatctatcccagagtacaaagacctagattattgaattcttcacatgtaactttcgtaataggtgtcatggatagattttcacctatccagagagtattctaaaaaaataaacaaagtgaagtaaaagttaagatcccagtgtgaagtatatattcccctaagatttgatatatgtatctttataattgatgatgttgtaaaatgaatttgttgttcctttaacctttgctgtagtgtttctttttattttagttccttctatacatgtttgcagtgttaagataattgtactttgaaaacaccagctgtatatatttttcttatttatgtaacaaagtttgctgaaagatatgtatatttttgatctttgagtgtattctatttgtgtaaggactttggcttacatttgaataatgtctagattttgaaaaattacctgtataatggagaattaaaactttgtagacattttgaaataaaaatggatcaagtg

SEQ ID NO: 152046 - DNA, 805 bp, Homo sapiens
  Payload ID: 9929
  Gene Symbol: MDM1
  Gene Name: Mdm1 nuclear protein
  ENST ID: ENST00000539972
  CDS Start-End: 1-366
aaagaaagtcgtgctgtatccctactgacttctccagctgctggtataaaaacagttgatcctctgcctttgcgggaagattctgaagacaatatccacaaatttgctgaggcaactcttccagtttcaaaaattccaaaatacccaacaaatccccctggacagttgccttctccaccacatgttccatcctactggcatccctctcgacgaattcagggctctcttagagatccagagtttcagcacaatgatgaggacagattgtctgagatttctgctcgctctgcagcttctagtctccgggcttttcaaactctggcacgagctaagaaaaggaaggagaatttctggggtaaaacataaacctagctgagttgcctttatctaaggaaacattggcataatttttctttattgcttactgtgttaaaattttttgagtgaagtttttcctaacgttttctactttgaaatatttaatttccaatagaacagtttacttggaaattgttaacataggcttatacaaatttaacttttaaagaattctttttacatctatcccagagtacaaagacctagattattgaattcttcacatgtaactttcgtaataggtgtcatggatagattttcacctatccagagagtattctaaaaaaataaacaaagtgaagtaaaagttaagatcccagtgtgaagtatatattcccctaagatttgatatatgtatctttataattgatgatgttgtaaaatgaatttgttgttcctttaacctttgctgtagtgtttcttttta

SEQ ID NO: 152047 - DNA, 874 bp, Homo sapiens
  Payload ID: 9929
  Gene Symbol: MDM1
  Gene Name: Mdm1 nuclear protein
  ENST ID: ENST00000541686
  CDS Start-End: 34-874
acatttgcaagctgcagtgtgtcgaagagtcagatggggctgagtgaataccagaggaacttcctgtggaaaaagtcttatttgtccgagtcttgtaattcctccgtggggcgaaagtacccatgggctggacttagatcagatcaattaggcatcacgaaagagccaagttttatttcaaaaagaagagtcccttaccatgacccacagatttcaaaatctctggagtggaatggagctatctcagagagcaatgtggttgcatcaccagaaccagaagccccggaaacaccaaaatcacaagaagcagaacaaaaggatgttactcaagaaagagttcactcactagaagcttccagggttcccaaaagaaccagatctcactctgcagactccagagctgaaggggcttcagatgtggaaaataatgagggtgtaacaaaccatacaccagttaatgaaaatgtggaactggaacattctaccaaggttctttcagaaaatgtagataatgggttggatagacttctgcgtaagaaagctggattgactgttgttccttcatataatgccttgagaaattctgaatatcaaaggcagtttgtttggaagacttctaaagaaactgctccagcttttgcagccaatcaggttttccacaataaaagccagtttgttccaccattcaaaggtaactcagtcatccatgaaactgaatacaaaagaaatttcaagggtttatctccagtgaaagaaccaaaattaagaaatgatttgagagaaaacagaaatcttgaaacagtgtctcctgaaaggaagagtaataaaatagacgatcgtttaaaattggaagcagagatggaattaaaagact

SEQ ID NO: 152048 - DNA, 3059 bp, Homo sapiens
  Payload ID: 9930
  Gene Symbol: MTBP
  Gene Name: MDM2 binding protein
  Uniprot ID: Q96DY7
  ENST ID: ENST00000305949
  CDS Start-End: 46-2760
gatgtggaagccgagacctaaagttggggggtgatctctgaggagatggatcggtacctgctgctggtgatctggggggaaggaaaattcccgtcggcggccagtagggaggcagaacatgggccagaggtgtcgtcgggtgagggtactgagaatcagccggacttcacagcagcaaatgtttatcacctcttgaaaagaagcattagtgcttcaattaatccagaagatagtactttccctgcctgttcagtgggaggtatacctggttccaagaagtggttctttgcagtgcaggcaatatatggattttatcagttttgtagttctgattggcaagagatacattttgatacagaaaaagataaaattgaagatgttcttcaaacgaatatcgaagaatgtttgggtgctgttgagtgttttgaagaagaagacagtaatagcagggaatcattatccttggctgatctctatgaagaagctgcagaaaatttgcatcagctgtcagacaagcttcctgctcctggtagagcaatggtagatataatactgttgctttctgacaaagatcctcctaaattgaaagactatttacctactgtaggagcattaaaacatttgagagaatggtattcagcaaagatcactatagcaggaaatcattgtgaaataaactgtcagaaaattgcagaatacctttctgctaatgttgtatctttagaagatctcagaaatgttattgactcaaaggaattatggagggggaaaatacagatatgggaaagaaagtttggatttgaaattagttttcctgaattttgtttaaagggagtcacacttaagaattttagtacttctaatttaaatactgacttccttgccaaaaagatcataccatcaaaggataagaatattttgccaaaggttttccattattatggccctgctttagaatttgtgcagatgataaaattatcagatctaccctcctgctatatgtcggatattgaatttgagttaggattgacaaacagtaccaaacagaattctgtgttgctgttggagcagatttcttctctgtgtagcaaggttggtgctctttttgtattgccatgtaccattagtaacatactgattccacctcccaaccaactcagttcaagaaaatggaaggaatatatagctaaaaagcctaaaacaatcagtgttccagatgttgaagtgaaaggagagtgttctagctattatctcttgttacaaggtaatggcaatagaagatgtaaagccacattgattcactcagccaaccagatcaatggctcatttgcactcaatttaattcatggaaagatgaaaacaaagacagaagaagccaaattgagttttccttttgacttattatcacttccacatttttctggggagcagattgtacagagagagaaacagttagctaatgttcaagttttagctttggaagaatgcctaaaaagacgaaagttggcaaagcagcctgaaacagtttctgttgctgaactcaaaagtctgttagtactcacaaggaaacactttttagattattttgatgctgtgattcctaaaatgattctaagaaagatggacaaaattaaaaccttcaatatattaaatgattttagtccagtggaacctaattcctcaagtctaatggaaaccaatcctctggaatggccagaaaggcatgttcttcaaaatttggaaacttttgaaaaaactaaacaaaaaatgagaactggttcattacctcattcatctgaacagttgctgggccacaaagagggtcctcgggactcaatcacattgttggatgctaaagaattgctgaagtactttacctcagatggattacccattggagatcttcaacctttaccgattcaaaagggggaaaagacttttgttttgacaccagaacttagtcctgggaaacttcaggtcttaccttttgagaaagcctcagtatgtcattatcatggaattgaatattgcttggatgaccgaaaagctttggaaagagatggaggattttctgaacttcagtctcgtcttattcgttatgaaactcaaactacctgcaccagagaaagttttccagtacctactgtgttgagccctcttccatctcctgtagtttcgtcagatcctggaagtgtccctgacggagaagttttacaaaatgaacttcgaactgaagtatcccgattgaaacggagatctaaagatctgaattgcctttatcccagaaaaagacttgtgaaatctgaaagttcagagtctcttctttctcagacaactggtaatagtaatcactatcatcatcatgtgacatccagaaagccacaaacagaacggtccttaccagtgacttgtccattggttccaattcctagctgtgaaactccaaaacttgctacaaagaccagttcaggtcaaaaaagtatgcatgaatcaaaaacatcaaggcaaattaaggaatcaagatcacagaaacacacacggatactgaaagaagtagttactgaaaccctgaagaaacacagtattaccgagactcatgaatgtttcactgcatgcagccagcgtctctttgaaatctctaagttctatctaaaggatcttaaaacttcaaggggtctatttgaagaaatgaagaaaacagcaaacaacaatgctgtacaggtgattgactgggtattagaaaagacaagcaagaaatgatacataatcattctctttaagacaattataaattggatggagctattattcactacttcttttcttagtttgaaaattataaacaaattttaagctttattcaaagaatagatgttatatttctaaagaatttcatgaatatatattctatatttgtatagtttgagggatgctatgttaatgtatttttaattagatacatattttgtaaagtgttactatattttaaagttatttttatatgttttaaaatgtttactcttatttaattattacaataaacagaatttttttttttt

SEQ ID NO: 152049 - DNA, 467 bp, Homo sapiens
  Payload ID: 9930
  Gene Symbol: MTBP
  Gene Name: MDM2 binding protein
  ENST ID: ENST00000519556
  CDS Start-End: 1-202
gatactgaaagaagtagttactgaaaccctgaagaaacacagtattaccgagactcatgaatgtttcactgcatgcagccagcgtctctttgaaatctctaagttctatctaaaggatcttaaaacttcaaggggtctatttgaagaaatgaagaaaacagcaaacaacaatgctgtacagggtatcccttgtagttgctgaaactgacagaggagtctgggacagttacatacgactcttgagagctaaagctgactgtagcacgctacatctggtgcgctgctcactacagatggtgtctgacatcacgttctctggtggcattgcagcccttcttttctcaaagcatcctgattccatcatctgaagacattttgagcttttcataaggagactgtatgatggtcttgggaaaggcaccctcctgtggttcagtggtaatagaaaatccattctcataatgtat

SEQ ID NO: 152050 - DNA, 1219 bp, Homo sapiens
  Payload ID: 9930
  Gene Symbol: MTBP
  Gene Name: MDM2 binding protein
  Uniprot ID: Q96DY7
  ENST ID: ENST00000523373
  CDS Start-End: 50-1039
tttggatgtggaagccgagacctaaagttggggggtgatctctgaggagatggatcggtacctgctgctggtgatctggggggaaggaaaattcccgtcggcggccagtagggaggcagaacatgggccagaggtgtcgtcgggtgagggtactgagaatcagccggacttcacagcagcaaatgtttatcacctcttgaaaagaagcattagtgcttcaattaatccagaagatagtactttccctgcctgttcagtgggaggtatacctggttccaagaagtggttctttgcagtgcaggcaatatatggattttatcagttttgtagttctgattggcaagagatacattttgatacagaaaaagataaaattgaagatgttcttcaaacgaatatcgaagaatgtttgggtgctgttgagtgttttgaagaagaagacagtaatagcagggaatcattatccttggctgatctctatgaagaagctgcagaaaatttgcatcagctgtcagacaagcttcctgctcctggtagagcaatggtagatataatactgttgctttctgacaaagatcctcctaaattgaaagactatttacctactgtaggagcattaaaacatttgagagaatggtattcagcaaagatcactatagcaggaaatcattgtgaaataaactgtcagaaaattgcagaatacctttctgctaatgttgtatctttagaagatctcagaaatgttattgactcaaaggaattatggagggggaaaatacagatatgggaaagaaagtttggatttgaaattagttttcctgaattttgtttaaagggagtcacacttaagaattttagtacttctaatttaaatactgacttccttgccaaaaagatcataccatcaaaggataagaatattttgccaaaggttttccattattatggccctgctttagaatttgtgcagatgataaaattatcagatctaccctcctgctatatgtcggatattgaatttgagtttacagaggattgacaaacagtaccaaacagaattctgtgttgctgttggagcagatttcttctctgtgtagcaaggttggtgctctttttgtattgccatgtaccattagtaacatactgattccacctcccaaccaactcagttcaagaaaatggaaggaatatatagctaaaaagcctaaaacaatcagtg

SEQ ID NO: 152051 - DNA, 1361 bp, Homo sapiens
  Payload ID: 9931
  Gene Symbol: MDM2
  Gene Name: MDM2 proto-oncogene, E3 ubiquitin protein ligase
  ENST ID: ENST00000258148
  CDS Start-End: 15-1343
cgcgaaaaccccggatggtgaggagcaggcaaatgtgcaataccaacatgtctgtacctactgatggtgctgtaaccacctcacagattccagcttcggaacaagagaccctggttagaccaaagccattgcttttgaagttattaaagtctgttggtgcacaaaaagacacttatactatgaaagaggttcttttttatcttggccagtatattatgactaaacgattatatgatgagaagcaacaacatattgtatattgttcaaatgatcttctaggagatttgtttggcgtgccaagcttctctgtgaaagagcacaggaaaatatataccatgatctacaggaacttggtagtagtcaatcagcaggaagaaaattcagatgaattatctggtgaacgacaaagaaaacgccacaaatctgatagtatttccctttcctttgatgaaagcctggctctgtgtgtaataagggagatatgttgtgaaagaagcagtagcagtgaatctacagggacgccatcgaatccggatcttgatgctggtgtaagtgaacattcaggtgattggttggatcaggattcagtttcagatcagtttagtgtagaatttgaagttgaatctctcgactcagaagattatagccttagtgaagaaggacaagaactctcagatgaagatgatgaggtatatcaagttactgtgtatcaggcaggggagagtgatacagattcatttgaagaagatcctgaaatttccttagctgactattggaaatgcacttcatgcaatgaaatgaatcccccccttccatcacattgcaacagatgttgggcccttcgtgagaattggcttcctgaagataaagggaaagataaaggggaaatctctgagaaagccaaactggaaaactcaacacaagctgaagagggctttgatgttcctgattgtaaaaaaactatagtgaatgattccagagagtcatgtgttgaggaaaatgatgataaaattacacaagcttcacaatcacaagaaagtgaagactattctcagccatcaacttctagtagcattatttatagcagccaagaagatgtgaaagagtttgaaagggaagaaacccaagacaaagaagagagtgtggaatctagtttgccccttaatgccattgaaccttgtgtgatttgtcaaggtcgacctaaaaatggttgcattgtccatggcaaaacaggacatcttatggcctgctttacatgtgcaaagaagctaaagaaaaggaataagccctgcccagtatgtagacaaccaattcaaatgattgtgctaacttatttcccctagttgacctgtctataagag

SEQ ID NO: 152052 - DNA, 12633 bp, Homo sapiens
  Payload ID: 9931
  Gene Symbol: MDM2
  Gene Name: MDM2 proto-oncogene, E3 ubiquitin protein ligase
  Uniprot ID: Q00987
  ENST ID: ENST00000258149
  CDS Start-End: 303-1796
ggggcgcgcaccgaggcaccgcggcgagcttggctgcttctggggcctgtgtggccctgtgtgtcggaaagatggagcaagaagccgagcccgaggggcggccgcgacccctctgaccgagatcctgctgctttcgcagccaggagcaccgtccctccccggattagtgcgtacgagcgcccagtgccctggcccggagagtggaatgatccccgaggcccagggcgtcgtgcttccgcgcgccccgtgaaggaaactggggagtcttgagggacccccgactccaagcgcgaaaaccccggatggtgaggagcaggcaaatgtgcaataccaacatgtctgtacctactgatggtgctgtaaccacctcacagattccagcttcggaacaagagaccctggttagaccaaagccattgcttttgaagttattaaagtctgttggtgcacaaaaagacacttatactatgaaagaggttcttttttatcttggccagtatattatgactaaacgattatatgatgagaagcaacaacatattgtatattgttcaaatgatcttctaggagatttgtttggcgtgccaagcttctctgtgaaagagcacaggaaaatatataccatgatctacaggaacttggtagtagtcaatcagcaggaatcatcggactcaggtacatctgtgagtgagaacaggtgtcaccttgaaggtgggagtgatcaaaaggaccttgtacaagagcttcaggaagagaaaccttcatcttcacatttggtttctagaccatctacctcatctagaaggagagcaattagtgagacagaagaaaattcagatgaattatctggtgaacgacaaagaaaacgccacaaatctgatagtatttccctttcctttgatgaaagcctggctctgtgtgtaataagggagatatgttgtgaaagaagcagtagcagtgaatctacagggacgccatcgaatccggatcttgatgctggtgtaagtgaacattcaggtgattggttggatcaggattcagtttcagatcagtttagtgtagaatttgaagttgaatctctcgactcagaagattatagccttagtgaagaaggacaagaactctcagatgaagatgatgaggtatatcaagttactgtgtatcaggcaggggagagtgatacagattcatttgaagaagatcctgaaatttccttagctgactattggaaatgcacttcatgcaatgaaatgaatcccccccttccatcacattgcaacagatgttgggcccttcgtgagaattggcttcctgaagataaagggaaagataaaggggaaatctctgagaaagccaaactggaaaactcaacacaagctgaagagggctttgatgttcctgattgtaaaaaaactatagtgaatgattccagagagtcatgtgttgaggaaaatgatgataaaattacacaagcttcacaatcacaagaaagtgaagactattctcagccatcaacttctagtagcattatttatagcagccaagaagatgtgaaagagtttgaaagggaagaaacccaagacaaagaagagagtgtggaatctagtttgccccttaatgccattgaaccttgtgtgatttgtcaaggtcgacctaaaaatggttgcattgtccatggcaaaacaggacatcttatggcctgctttacatgtgcaaagaagctaaagaaaaggaataagccctgcccagtatgtagacaaccaattcaaatgattgtgctaacttatttcccctagttgacctgtctataagagaattatatatttctaactatataaccctaggaatttagacaacctgaaatttattcacatatatcaaagtgagaaaatgcctcaattcacatagatttcttctctttagtataattgacctactttggtagtggaatagtgaatacttactataatttgacttgaatatgtagctcatcctttacaccaactcctaattttaaataatttctactctgtcttaaatgagaagtacttggtttttttttttcttaaatatgtatatgacatttaaatgtaacttattattttttttgagaccgagtcttgctctgttacccaggctggagtgcagtggcgtgatcttggctcactgcaagctctgcctcccgggttcgcaccattctcctgcctcagcctcccaattagcttggcctacagtcatctgccaccacacctggctaattttttgtacttttagtagagacagggtttcaccgtgttagccaggatggtctcgatctcctgacctcgtgatccgcccacctcggcctcccaaagtgctgggattacaggcatgagccaccgcgtccggcctaaatgtcacttagtacctttgatataaagagaaaatgtgtgaaagatttagttttttgtttttttgtttgtttgtttgtttgtttgttttgagatgagtctctctgtcgcccaggctggagtgcagtgtcatgatctagcagtctccgcttcccgggttcaagccattctcctggctcagcctctggagcagctgggattacaggcatgcaccaccatgcccagctaatttttgtatttttagtagagatagggtttcaccatgttggccaggctggtcacgaactcctgacctcaagtgaggtcacccgcctcggcctcccgaagtgctgggattgcagatgtgagccaccatgtccagccaagaattagtatttaaattttagatactctttttttttttttttttttttttttttgagacagagtcttgctccatcacccatgctagagtgcagtggagtgatctcggctcactgcaacttccgccttctgggttcaagctattctcctgcctcagccttccaagtaactgggattacaggcatgtaccaccataccagctgatttttttgtatttttagtaaagacagggtttcaccatgttagccaggctgatcttgaactcctaaactcaagtgatctactcacctcagcctcccaaaatgctgggattacagatgtgaggcacctggcctcagatttttgatactcttaaaccttctgatccttagtttctctctccaaaatactctttctaggttaaaaaaaaaaaggctcttatatttggtgctatgtaaatgaaaatgttttttaggttttcttgatttaacaatagagacagggtctccctgtgttgcccaggctggtctcgaactcctgggctcaagagatcctcctgtcttggcctcgcaaagtgctaagtaggattacaggcgttagccaccacacccggctgtaaaaatgtacttattctccagcctcttttgtataaaccatagtaagggatgggagtaatgatgttatctgtgaaaatagccaccatttacccgtaagacaaaacttgttaaagcctcctgagtctaacctagattacatcaggccctttttcacacacaaaaaaatcctttatgggatttaatggaatctgttgtttccccctaagttgaaaaacaactctaagacactttaaagtaccttcttggcctgggttacatggttcccagcctaggtttcagacttttgcttaaggccagttttagaaacccgtgaattcagaaaagttaattcagaaatttgataaacagaattgttatttaaaaactaactggaaagattgttaagttctttctgaattattcagaaattatgcatcattttccttcaagaatgacagggtcagcatgtggaattccaagatacctcttgacttcctctcaagctccgtgtttggtcagtggaggcccatccgagctcagcactgagaagtgttagtttctttgggacccatctaccctgaccacatcatgatgttcatctgcagctgttgcaaggtgttcagattgtataaacataaatgtcacaaaaactttaaaagaagtgcaattctcaaaaggttaggtggactaaagcattctgtaaagcaactgctaataatgagcttacagtggatttgaatttgaaaaatatagtaacaagcctgtcaaatatctgcaagaactatggaataaaactactgatgcagtgaagacagttgaaaagatcaaacaaatgccaagctatatttataatgaacaaattcaagaaaaaggactacggaaagttcaggacatcaaagaagtcaggcaaaactcatcttgacccctgttgcaggcaaaggaacgcagctggaagaaaagatgatataacagttaacaggatgcagacatggcagaggtttcctaaaaatctcattatctataaccatttctatatttacatttgaaaatctcctttggagacttagaacctctaaattattgacttattttttatataaggtcactccgatgaaaggtgattacaaaatcatctacattgctgtctacaaaacagataatatggatgtttgatcgcatctcattgttaactctttactgatatgtttgtaaatacagaagtgaaatgtggacataaaatagttacgctatttggttaatggtactagacaacatgtaattaatgacattcaaaaatttatggctagtgatatatataaagtaaaattttctttgcagtaaaatatgccctttattatagaagggaggatataaggaaccaacagtttgtatgaaaatagctcaaataatatcttttattttgattttaatatttcttattttggtttattagtgtcttagaacaaaatggccttatataatgaagcctagttatgctggactgttttgatctcttttaattgttctgacagatagttggggatgagagccgaataaggtttgcctgaaataactgacactatataatttctgctttggcaaatactaagttctaacttgtcattcctggtagaacaagctttatttttcgagcctagcaatgatctagaagcagatgttatctcagtgccttttgcaatttgttgtgtgggtttttttttttttaaagccacacaataattttggaaaacaatgtatgggtagaacatgtgtctgttaattgcacacaaaaccacttttaatgggtacagagttaaatttgaaggaataagttctagctgaagtattatgaactccaaataatgctttgaggacctccaaaggtaaaagtactaatccctttggccatttattgagagagagagagagagagagtagggtgactatagttaatgtattgaatgttcttgctacaaataaatgatatttgagctgatgggtgtgctaattacactgatttgatcaatacccattgtatgtgaaacagtacatacaccatatttacaattatgtatttaacatttaaaatttctaatataagtatctctcaaactgtggattaacttcttgatttatatttaaatatgaatcttaagcaaaacagtgaaaataaccatcttgatttagtgtttttctcccatatgtgaattgtatatacttaggtgaagacaataaaatcaactgaactgtaagcttagaataggactgaggtaattctgcacagcaactttactaatggtacattgttgcttcaaaactctctctctctctctctgtctgtctcaataaatggccaaagggattagtagtttacctgtggaggtcctccaagcattatttggagttgataatacttcagctacaaccaagcagaatctcttttttttggaggtcctcgaagcattatttggagttgataatacttcagcttcaatttggagttgataatatttcagctagaacctagtagaatctgtttttttcctttggaggtcctcaaagcattattggagttcataatactgaagctagaaccaagcagaatctgtttttttctgaggagtatcggtagcataaatgtgattataaacatagtacacttgatatatggaggcagtgacagctatttttacaaaatttaaatctgcaaatggattcaacatgtttatgggttattaaaattgtctgatttcttaggttctttatagtacacgtgttgaaaataaatgattaagaattgtttcaagaatgcaattatttgatcttaaatttttatgagttgttaaaatagaaattatttgaatatcatatatttgggtaacaaaaggcacaagtctgaatgtgtttctttttctggaatggccatgcctgcccactttagaaatacaaatatcactgggcagcttgaagcagttgggagcctccaatgagagcaacttgagagaatgatgttgcaagttagtaggagtaagaaatgctgtgttctccctgtcttctcttaggtcacatggcagcctggcctaagtgatcgtgaatggtctataagggaggtagctgggacagggaggggagtttgggctagccaccgtaccacttgtcagcgtgaaaagtaagattgtaattgcctgtttagttttctgcctcatctttgaaagttccaccaagctgggaacctcttgattgtgaggcacaaatgtaagtacatcagaaaaaaacaaaaaaactggctttaaagcaggagcttgtgggcccctaagccagacggggactagcttttggcattatataattaagattttttaaatccttaataagggttttattttatttttatttattttttgagacggagtcttgctctgtggctcaggctggagtacagtggtgcaatcttggctcactgcaacctctgcctcctggctgtgttcaagtggttctgcttcagcctcccaagtagctggggttagagcaccctgtcaccacgccccgctaatttttgtatttctagcagagatgaagtttcactatgttggccaggctgggctcaaactcctgacctcaagtgatctgcccgccttggccccccaaagtgctgtgattacaggcgtgagccgccacgcccagcctaataagggttttaaagataattagtgtgtaggtctgtaggcttatgatggtaaccacaagttgttaatggcattgtgaaaagtttttagttgcgctttatgggtggatgctgaattacattttgatttgatacttataaaaagaaaaagtatttcttcagcttaaaaaattgtttaaaagtttgtgatcatattgtctaccatgtagccagctttcaattatatgtaagagggactttttgacatttacaaataatactttgaggtagatatctgaaagcaccagcacttggaaggtgttcagaagtaacaaattataaaatgagctaacaaacgaaaggcaaaataaaaccgtaaagcaagcagatgggaggcgtgttcagtaacttattcataatgcatctgaaatgattgctgtactcaaatatttaacgttagagtaatagtattttgaatgaaaaccatagttgattgtctttagagagaggagtggtactgaaacatacttgaattcgtattgctttcctttaaagctctcctttaaagactttaaaaaaaattcgataggcattttcatgtttcagtcctacaatcccacatctctgctgccttcagaatgctacaacttagatgtccagccaacagcttaaagccaatttataaaaatagcatctttcctaattccaaaatttcaccttttgtttgttttgttttgagatgcggtcttgctctgtcgcccaggctggaatgcagtgctgcaaacatgactcactacagcctcaacctcctgggctcaagcaatcctcccacctcagcctcccaagtagctggggaccacaggtgcaagccaccaggtccagctaaccttccccccacctcccccgaccccgctgccacccgccctgagacagagtcttgctctttcacccagactggagtgcagtggtgcaatctcggctcattgcaacctccacctcccaggttcaagcaattctgcctcagcctcctgagtagctggaattataggtgctcgccaaccacacctggctaattttttttgtatttttagtagagatggggtttcagcatgttgtccaggctggtctcgaactcctgacctcatgatccgcccacctcggcctcccaaagtactgggattacaggcgtgagccaccgtgcccggcctaatttttgtattttttgtagagacagtttcaccatgttgcccaggctggtctcaaactcctggggtcaagtgatctgcccgtcttggcttcccaaagtgctgagattacaggtgtaagccaccacgccaagcccaaaatttcaccttttaaatttattccatttattttgtaggtgaatttcatttatttctcagggttaaattttagcgcttttgcctgtgtctatttttggttcacacctccccagcccactgtcctgtattaagtaggccttccttcaagatcacagtaatatctccctaaatggatttcactacgtttggtcctatttttggttcagttatagtttacagataccatcatgttgcttccctgatttaaatattgggggaaaaacttgctttttggattttatctctgatgttctactggattattttagacttttagaacactatgaaatgggtgcttgcttttcacttttcaaaccttttttgcttaaacaaagttcataagcttattgtagtgggaagttcaaagtcacagatctggtacttactcgcctagtgaccttagagacaataaatctatagagcctagtatggggtctggcaggtagtaagcacttttaatgaatggaagtttaatattctgtttgcatccactcgaccataatcaccccaaatccagcttaggtagccttgaattaacccctactccaccttgaagttttttatttgttttttgctgagacagggtctcattctgtcacccaggctggagtatagtggcgcaaacatgactcactgcagcctcctgagtagctgggaacacaggcctgttgccaccatgcctggctaatatatatattatatataatatacatatattacatatatatatataatacatatgtgtttatgtatgtatgtgtgtgtacattatatatatatatatactttttttagaggcagagtcctgctatgttgcccaggctggccttgaactcctgggctcaagcaatcctcgtgtcttgaccttgacctctcaaaatgctgggattacaggtgcgagccactgcatctggtgaattaagccttttttatacactcaactctgaggtattctgttcataccaatatgttcctttgtatcttcttgccatagcaggttgtaacatccttttgtatctcctttctttttttttttttttttttgagacggagtcccgctgtttagcccaggccggattgcagtggcgcaatctcggctcactgcaagctccgcctcccaggttcacgccattctcctgcctcagcctcccgagtagctgggactacaggcgcccgccaccgcgcctggctaattttttgtatttttagtagagacggggtttcaccgtgttagccaagatggtctcgatctcctgaccttgtgatccgcccgcctcggcctcccaaagtgctgggattacaggcgtgagccaccgcgcccagccgtatctcctttcaaatgtcaaataaatacattgtgtatacagtagtaaaggatgttgattggcattgaaagcaactatcaagttcttgttgatttagaagacaaaaagacaattttaaaataacatcctgggccaggctctgtgactcacgcctgtaatctcaacactttgggaggccaaggaaggaggatcacttgaggccaggagtttgagatcagcctgggcaacataatgacaccctgtatccaaaaaattgtggtggcatgcatgggagactgaggtgggaggatcacttgagcccaggagtccaatgttacaatgagctatgattgcgccactacactctgcttaggagacagatggagacttgtctcttaaaaaaataaaaaataacagtatgttcattaaacattaatctcactgattgtgattttttgtttgtttttttgagatggcgtcttgctctgttgcccagggtggagtgcaatggcgtgatcttggctcactgcagcctccacctcctgggttcaagtgattctcctgctttagcctcccaagtagctgtgttatttcagctaattttttcatttttagtggagatggggttttgccatgttggccaggctggtctcgaattcctgacctcatgtggtccacctgcctcggcctcccaaagtgctgggattacaggcattgagccactgtgcctggcctgattatgattttttaaagtccccccccaaattattgtttgtgcaataaatggcaaaaaagaagcattctaagaaaaaagtagtcttaaaagttgatatggtgtcagaattgtaagagagagggtcttggctgaaaagcctttttagaaaaaattgctccctacaaaaaaggccttttctaccttttctcacatttgtttctttttataggaggcatctgagaagaccaaatctcttcaaagttaagctttttgtttttttgggggggacgaagtctcgttctgtcacccaggctggagtgtagtggcatgatctcggctcactgcaacctctgcctcctgggttcaagcaattctcctgcctcagcctcccgagtagctggaaattcaggcgcctgccaccatgcccagctaatttttgtatttttaatagaggcagggtttcactatattggccaggctggtctcgaactcctgacctcatgatccgcctgcctctgcctcccaaagtgttgggattacaggcatgagccaccgcacccagcccaaagttaagcattttttaaccacaaggtgggaggtggaagtatctcgttggaagactaaaggtgtccactaacggtagacccttttttttttttttttgagatggagtttcactgtcgcccagactagactgaagtggcgcgatctcggctcactgcaacctctgccccccaggttcaagtgattctcctgcctcagcctctagagtagctaggattacaggggtccaccaccacacctggctagtttttgtattttcagtagagacggggtttcaccatgttggccaggctggtctcgaactcctgacctcaggtgacccacctgctttggcctcccaaagtgctgggattacaggtgtgagccactgcgcctggccgtttttttttttgttgttgttgttgtttgttcgtttgtttgttttgagacagtctctcactccaggttggagtgcagtggcactatctcagctcactgcaaactctgcctcccaaggtcaaatgattctcctgcctcagcctcccagtagttggaattacaggcgcatgccaccatgcatggctaattttttgtatttttagtagagacggggtttcaccatgctagccttgaactcctgaccttgtgatctgcctgcctcggcctcccaaagtgctgggattacagacatgagccaccatgctagccttgaactcctgacctcgtgatctgcctgcctcggcctcccaaagtgctgggattacagacatgagccaccatgcctggcaaatttttgtattttcagtagagatggggttttgctatgttagccaggctagtctcgaactcctgacctcaggtgatccagtcgcctcggcctcccaaagtgctgggattacagatgtgagtcactacgcttggtagactcttaacagcgctgagagaccactccaagagagcagagaaataatagttctattctcagttgtcaaacagcaaacaaaaaacccttggctggggggtgatggctcacccctgtaatcccagcactttgggaggctgaggtgggtggatcacttgaggccaggaattcaagaccaacctgggcaacatggtgcaaccctgtcttaactaaaaatacaaaaattagccaggcgtcatggcatgtgcctgttaattccagctgctcgagaggctgaggcatgagaattacttgaacctgggaggtggaggttgcagtgagccgagatcccaccactgcactccagcctgggtgacagagcgagacttcgtcccaaaaaaaaaaaaaaaagctgcaaatttaaacgttgaagtctaggtaaatataccagggaacttctgcttaagaggcttctatgtaatgaaattctcttgaaaacagagaaactatttcctgtttattttctaaattgagacgtcactttttaaaaattggtacctgtaatttagccatttcctactcagcaatgtctcatttaaactattatttgtttagcgtgtttcaaagagcagatgtaagcttgagcccatcctctgtcctatgactaagtcgatattagcaggggttaggactgttagttttccagttcctactggaggcaaattctttgtttaccactgttctctgtatttcaaaagcacctggaaatcaataaaatttgttattcagaacaaaa

SEQ ID NO: 152053 - DNA, 1401 bp, Homo sapiens
  Payload ID: 9931
  Gene Symbol: MDM2
  Gene Name: MDM2 proto-oncogene, E3 ubiquitin protein ligase
  ENST ID: ENST00000350057
  CDS Start-End: 1-1401
atgtgcaataccaacatgtctgtacctactgatggtgctgtaaccacctcacagattccagcttcggaacaagagaccctggttcttttttatcttggccagtatattatgactaaacgattatatgatgagaagcaacaacatattgtatattgttcaaatgatcttctaggagatttgtttggcgtgccaagcttctctgtgaaagagcacaggaaaatatataccatgatctacaggaacttggtagtagtcaatcagcaggaatcatcggactcaggtacatctgtgagtgagaacaggtgtcaccttgaaggtgggagtgatcaaaaggaccttgtacaagagcttcaggaagagaaaccttcatcttcacatttggtttctagaccatctacctcatctagaaggagagcaattagtgagacagaagaaaattcagatgaattatctggtgaacgacaaagaaaacgccacaaatctgatagtatttccctttcctttgatgaaagcctggctctgtgtgtaataagggagatatgttgtgaaagaagcagtagcagtgaatctacagggacgccatcgaatccggatcttgatgctggtgtaagtgaacattcaggtgattggttggatcaggattcagtttcagatcagtttagtgtagaatttgaagttgaatctctcgactcagaagattatagccttagtgaagaaggacaagaactctcagatgaagatgatgaggtatatcaagttactgtgtatcaggcaggggagagtgatacagattcatttgaagaagatcctgaaatttccttagctgactattggaaatgcacttcatgcaatgaaatgaatcccccccttccatcacattgcaacagatgttgggcccttcgtgagaattggcttcctgaagataaagggaaagataaaggggaaatctctgagaaagccaaactggaaaactcaacacaagctgaagagggctttgatgttcctgattgtaaaaaaactatagtgaatgattccagagagtcatgtgttgaggaaaatgatgataaaattacacaagcttcacaatcacaagaaagtgaagactattctcagccatcaacttctagtagcattatttatagcagccaagaagatgtgaaagagtttgaaagggaagaaacccaagacaaagaagagagtgtggaatctagtttgccccttaatgccattgaaccttgtgtgatttgtcaaggtcgacctaaaaatggttgcattgtccatggcaaaacaggacatcttatggcctgctttacatgtgcaaagaagctaaagaaaaggaataagccctgcccagtatgtagacaaccaattcaaatgattgtgctaacttatttcccctag

SEQ ID NO: 152054 - DNA, 966 bp, Homo sapiens
  Payload ID: 9931
  Gene Symbol: MDM2
  Gene Name: MDM2 proto-oncogene, E3 ubiquitin protein ligase
  Uniprot ID: Q00987
  ENST ID: ENST00000299252
  CDS Start-End: 1-966
atgtgcaataccaacatgtctgtacctactgatggtgctgtaaccacctcacagattccagcttcggaacaagagaccctggttagaccaaagccattgcttttgaagttattaaagtctgttggtgcacaaaaagacacttatactatgaaagaggatcttgatgctggtgtaagtgaacattcaggtgattggttggatcaggattcagtttcagatcagtttagtgtagaatttgaagttgaatctctcgactcagaagattatagccttagtgaagaaggacaagaactctcagatgaagatgatgaggtatatcaagttactgtgtatcaggcaggggagagtgatacagattcatttgaagaagatcctgaaatttccttagctgactattggaaatgcacttcatgcaatgaaatgaatcccccccttccatcacattgcaacagatgttgggcccttcgtgagaattggcttcctgaagataaagggaaagataaaggggaaatctctgagaaagccaaactggaaaactcaacacaagctgaagagggctttgatgttcctgattgtaaaaaaactatagtgaatgattccagagagtcatgtgttgaggaaaatgatgataaaattacacaagcttcacaatcacaagaaagtgaagactattctcagccatcaacttctagtagcattatttatagcagccaagaagatgtgaaagagtttgaaagggaagaaacccaagacaaagaagagagtgtggaatctagtttgccccttaatgccattgaaccttgtgtgatttgtcaaggtcgacctaaaaatggttgcattgtccatggcaaaacaggacatcttatggcctgctttacatgtgcaaagaagctaaagaaaaggaataagccctgcccagtatgtagacaaccaattcaaatgattgtgctaacttatttcccctag

SEQ ID NO: 152055 - DNA, 1583 bp, Homo sapiens
  Payload ID: 9931
  Gene Symbol: MDM2
  Gene Name: MDM2 proto-oncogene, E3 ubiquitin protein ligase
  ENST ID: ENST00000311420
  CDS Start-End: 206-460
gcggccgcgacccctctgaccgagatcctgctgctttcgcagccaggagcaccgtccctccccggattagtgcgtacgagcgcccagtgccctggcccggagagtggaatgatccccgaggcccagggcgtcgtgcttccgcgcgccccgtgaaggaaactggggagtcttgagggacccccgactccaagcgcgaaaaccccggatggtgaggagcaggcaaatgtgcaataccaacatgtctgtacctactgatggtgctgtaaccacctcacagattccagcttcggaacaagagaccctggttagaccaaagccattgcttttgaagttattaaagtctgttggtgcacaaaaagacacttatactatgaaagaggaaaatatataccatgatctacaggaacttggtagtagtcaatcagcaggaatcatcggactcaggtacatctgtgagtgagaacaggtgtcaccttgaaggtgggagtgatcaaaaggaccttgtacaagagcttcaggaagagaaaccttcatcttcacatttggtttctagaccatctacctcatctagaaggagagcaattagtgagacagaagaaaattcagatgaattatctggtgaacgacaaagaaaacgccacaaatctgatagtatttccctttcctttgatgaaagcctggctctgtgtgtaataagggagatatgttgtgaaagaagcagtagcagtgaatctacagggacgccatcgaatccggatcttgatgctggtgtaagtgaacattcaggtgattggttggatcaggattcagtttcagatcagtttagtgtagaatttgaagttgaatctctcgactcagaagattatagccttagtgaagaaggacaagaactctcagatgaagatgatgaggtatatcaagttactgtgtatcaggcaggggagagtgatacagattcatttgaagaagatcctgaaatttccttagctgactattggaaatgcacttcatgcaatgaaatgaatcccccccttccatcacattgcaacagatgttgggcccttcgtgagaattggcttcctgaagataaagggaaagataaaggggaaatctctgagaaagccaaactggaaaactcaacacaagctgaagagggctttgatgttcctgattgtaaaaaaactatagtgaatgattccagagagtcatgtgttgaggaaaatgatgataaaattacacaagcttcacaatcacaagaaagtgaagactattctcagccatcaacttctagtagcattatttatagcagccaagaagatgtgaaagagtttgaaagggaagaaacccaagacaaagaagagagtgtggaatctagtttgccccttaatgccattgaaccttgtgtgatttgtcaaggtcgacctaaaaatggttgcattgtccatggcaaaacaggacatcttatggcctgctttacatgtgcaaagaagctaaagaaaaggaataagccctgcccagtatgtagacaaccaattcaaatgattgtgctaacttatttcccctagttgacctgtctataagag

SEQ ID NO: 152056 - DNA, 798 bp, Homo sapiens
  Payload ID: 9931
  Gene Symbol: MDM2
  Gene Name: MDM2 proto-oncogene, E3 ubiquitin protein ligase
  ENST ID: ENST00000348801
  CDS Start-End: 1-798
atgtctgtacctactgatggtgctgtaaccacctcacagattccagcttcggaacaagagaccctggatcttgatgctggtgtaagtgaacattcaggtgattggttggatcaggattcagtttcagatcagtttagtgtagaatttgaagttgaatctctcgactcagaagattatagccttagtgaagaaggacaagaactctcagatgaagatgatgaggactattggaaatgcacttcatgcaatgaaatgaatcccccccttccatcacattgcaacagatgttgggcccttcgtgagaattggcttcctgaagataaagggaaagataaaggggaaatctctgagaaagccaaactggaaaactcaacacaagctgaagagggctttgatgttcctgattgtaaaaaaactatagtgaatgattccagagagtcatgtgttgaggaaaatgatgataaaattacacaagcttcacaatcacaagaaagtgaagactattctcagccatcaacttctagtagcattatttatagcagccaagaagatgtgaaagagtttgaaagggaagaaacccaagacaaagaagagagtgtggaatctagtttgccccttaatgccattgaaccttgtgtgatttgtcaaggtcgacctaaaaatggttgcattgtccatggcaaaacaggacatcttatggcctgctttacatgtgcaaagaagctaaagaaaaggaataagccctgcccagtatgtagacaaccaattcaaatgattgtgctaacttatttcccctag

SEQ ID NO: 152057 - DNA, 6735 bp, Homo sapiens
  Payload ID: 9931
  Gene Symbol: MDM2
  Gene Name: MDM2 proto-oncogene, E3 ubiquitin protein ligase
  Uniprot ID: Q00987
  ENST ID: ENST00000356290
  CDS Start-End: 75-1040
tgtgttcagtggcgattggagggtagacctgtgggcacggacgcacgccactttttctctgctgatccaggcaaatgtgcaataccaacatgtctgtacctactgatggtgctgtaaccacctcacagattccagcttcggaacaagagaccctggttagaccaaagccattgcttttgaagttattaaagtctgttggtgcacaaaaagacacttatactatgaaagaggatcttgatgctggtgtaagtgaacattcaggtgattggttggatcaggattcagtttcagatcagtttagtgtagaatttgaagttgaatctctcgactcagaagattatagccttagtgaagaaggacaagaactctcagatgaagatgatgaggtatatcaagttactgtgtatcaggcaggggagagtgatacagattcatttgaagaagatcctgaaatttccttagctgactattggaaatgcacttcatgcaatgaaatgaatcccccccttccatcacattgcaacagatgttgggcccttcgtgagaattggcttcctgaagataaagggaaagataaaggggaaatctctgagaaagccaaactggaaaactcaacacaagctgaagagggctttgatgttcctgattgtaaaaaaactatagtgaatgattccagagagtcatgtgttgaggaaaatgatgataaaattacacaagcttcacaatcacaagaaagtgaagactattctcagccatcaacttctagtagcattatttatagcagccaagaagatgtgaaagagtttgaaagggaagaaacccaagacaaagaagagagtgtggaatctagtttgccccttaatgccattgaaccttgtgtgatttgtcaaggtcgacctaaaaatggttgcattgtccatggcaaaacaggacatcttatggcctgctttacatgtgcaaagaagctaaagaaaaggaataagccctgcccagtatgtagacaaccaattcaaatgattgtgctaacttatttcccctagttgacctgtctataagagaattatatatttctaactatataaccctaggaatttagacaacctgaaatttattcacatatatcaaagtgagaaaatgcctcaattcacatagatttcttctctttagtataattgacctactttggtagtggaatagtgaatacttactataatttgacttgaatatgtagctcatcctttacaccaactcctaattttaaataatttctactctgtcttaaatgagaagtacttggtttttttttttcttaaatatgtatatgacatttaaatgtaacttattattttttttgagaccgagtcttgctctgttacccaggctggagtgcagtggcgtgatcttggctcactgcaagctctgcctcccgggttcgcaccattctcctgcctcagcctcccaattagcttggcctacagtcatctgccaccacacctggctaattttttgtacttttagtagagacagggtttcaccgtgttagccaggatggtctcgatctcctgacctcgtgatccgcccacctcggcctcccaaagtgctgggattacaggcatgagccaccgcgtccggcctaaatgtcacttagtacctttgatataaagagaaaatgtgtgaaagatttagttttttgtttttttgtttgtttgtttgtttgtttgttttgagatgagtctctctgtcgcccaggctggagtgcagtgtcatgatctagcagtctccgcttcccgggttcaagccattctcctggctcagcctctggagcagctgggattacaggcatgcaccaccatgcccagctaatttttgtatttttagtagagatagggtttcaccatgttggccaggctggtcacgaactcctgacctcaagtgaggtcacccgcctcggcctcccgaagtgctgggattgcagatgtgagccaccatgtccagccaagaattagtatttaaattttagatactctttttttttttttttttttttttttttgagacagagtcttgctccatcacccatgctagagtgcagtggagtgatctcggctcactgcaacttccgccttctgggttcaagctattctcctgcctcagccttccaagtaactgggattacaggcatgtaccaccataccagctgatttttttgtatttttagtaaagacagggtttcaccatgttagccaggctgatcttgaactcctaaactcaagtgatctactcacctcagcctcccaaaatgctgggattacagatgtgaggcacctggcctcagatttttgatactcttaaaccttctgatccttagtttctctctccaaaatactctttctaggttaaaaaaaaaaaggctcttatatttggtgctatgtaaatgaaaatgttttttaggttttcttgatttaacaatagagacagggtctccctgtgttgcccaggctggtctcgaactcctgggctcaagagatcctcctgtcttggcctcgcaaagtgctaagtaggattacaggcgttagccaccacacccggctgtaaaaatgtacttattctccagcctcttttgtataaaccatagtaagggatgggagtaatgatgttatctgtgaaaatagccaccatttacccgtaagacaaaacttgttaaagcctcctgagtctaacctagattacatcaggccctttttcacacacaaaaaaatcctttatgggatttaatggaatctgttgtttccccctaagttgaaaaacaactctaagacactttaaagtaccttcttggcctgggttacatggttcccagcctaggtttcagacttttgcttaaggccagttttagaaacccgtgaattcagaaaagttaattcagaaatttgataaacagaattgttatttaaaaactaactggaaagattgttaagttctttctgaattattcagaaattatgcatcattttccttcaagaatgacagggtcagcatgtggaattccaagatacctcttgacttcctctcaagctccgtgtttggtcagtggaggcccatccgagctcagcactgagaagtgttagtttctttgggacccatctaccctgaccacatcatgatgttcatctgcagctgttgcaaggtgttcagattgtataaacataaatgtcacaaaaactttaaaagaagtgcaattctcaaaaggttaggtggactaaagcattctgtaaagcaactgctaataatgagcttacagtggatttgaatttgaaaaatatagtaacaagcctgtcaaatatctgcaagaactatggaataaaactactgatgcagtgaagacagttgaaaagatcaaacaaatgccaagctatatttataatgaacaaattcaagaaaaaggactacggaaagttcaggacatcaaagaagtcaggcaaaactcatcttgacccctgttgcaggcaaaggaacgcagctggaagaaaagatgatataacagttaacaggatgcagacatggcagaggtttcctaaaaatctcattatctataaccatttctatatttacatttgaaaatctcctttggagacttagaacctctaaattattgacttattttttatataaggtcactccgatgaaaggtgattacaaaatcatctacattgctgtctacaaaacagataatatggatgtttgatcgcatctcattgttaactctttactgatatgtttgtaaatacagaagtgaaatgtggacataaaatagttacgctatttggttaatggtactagacaacatgtaattaatgacattcaaaaatttatggctagtgatatatataaagtaaaattttctttgcagtaaaatatgccctttattatagaagggaggatataaggaaccaacagtttgtatgaaaatagctcaaataatatcttttattttgattttaatatttcttattttggtttattagtgtcttagaacaaaatggccttatataatgaagcctagttatgctggactgttttgatctcttttaattgttctgacagatagttggggatgagagccgaataaggtttgcctgaaataactgacactatataatttctgctttggcaaatactaagttctaacttgtcattcctggtagaacaagctttatttttcgagcctagcaatgatctagaagcagatgttatctcagtgccttttgcaatttgttgtgtgggtttttttttttttaaagccacacaataattttggaaaacaatgtatgggtagaacatgtgtctgttaattgcacacaaaaccacttttaatgggtacagagttaaatttgaaggaataagttctagctgaagtattatgaactccaaataatgctttgaggacctccaaaggtaaaagtactaatccctttggccatttattgagagagagagagagagagagtagggtgactatagttaatgtattgaatgttcttgctacaaataaatgatatttgagctgatgggtgtgctaattacactgatttgatcaatacccattgtatgtgaaacagtacatacaccatatttacaattatgtatttaacatttaaaatttctaatataagtatctctcaaactgtggattaacttcttgatttatatttaaatatgaatcttaagcaaaacagtgaaaataaccatcttgatttagtgtttttctcccatatgtgaattgtatatacttaggtgaagacaataaaatcaactgaactgtaagcttagaataggactgaggtaattctgcacagcaactttactaatggtacattgttgcttcaaaactctctctctctctctctgtctgtctcaataaatggccaaagggattagtagtttacctgtggaggtcctccaagcattatttggagttgataatacttcagctacaaccaagcagaatctcttttttttggaggtcctcgaagcattatttggagttgataatacttcagcttcaatttggagttgataatatttcagctagaacctagtagaatctgtttttttcctttggaggtcctcaaagcattattggagttcataatactgaagctagaaccaagcagaatctgtttttttctgaggagtatcggtagcataaatgtgattataaacatagtacacttgatatatggaggcagtgacagctatttttacaaaatttaaatctgcaaatggattcaacatgtttatgggttattaaaattgtctgatttcttaggttctttatagtacacgtgttgaaaataaatgattaagaattgtttcaagaatgcaattatttgatcttaaatttttatgagttgttaaaatagaaattatttgaatatcatatatttgggtaacaaaaggcacaagtctgaatgtgtttctttttctggaatggccatgcctgcccactttagaaatacaaatatcactgggcagcttgaagcagttgggagcctccaatgagagcaacttgagagaatgatgttgcaagttagtaggagtaagaaatgctgtgttctccctgtcttctcttaggtcacatggcagcctggcctaagtgatcgtgaatggtctataagggaggtagctgggacagggaggggagtttgggctagccaccgtaccacttgtcagcgtgaaaagtaagattgtaattgcctgtttagttttctgcctcatctttgaaagttccaccaagctgggaacctcttgattgtgaggcacaaatgtaagtacatcagaaaaaaacaaaaaaactggctttaaagcaggagcttgtgggcccctaagccagacggggactagcttttggcattatataattaagattttttaaatccttaataagggttttattttatttttatttattttttgagacggagtcttgctctgtggctcaggctggagtacagtggtgcaatcttggctcactgcaacctctgcctcctggctgtgttcaagtggttctgcttcagcctcccaagtagctggggttagagcaccctgtcaccacgccccgctaatttttgtatttctagcagagatgaagtttcactatgttggccaggctgggctcaaactcctgacctcaagtgatctgcccgccttggccccccaaagtgctgtgattacaggcgtgagccgccacgcccagcctaataagggttttaaagataattagtgtgtaggtctgtaggcttatgatggtaaccacaagttgttaatggcattgtgaaaagtttttagttgcgctttatgggtggatgctgaattacattttgatttgatacttataaaaagaaaaagtatttcttcagcttaaaaaattgtttaaaagtttgtgatcatattgtctaccatgtagccagctttcaattatatgtaagagggactttttgacatttacaaataatactttgaggtagatatctgaaagcaccagcacttggaaggtgttcagaagtaacaaattataaaatgagctaacaaacgaaaggcaaaataaaaccgtaaagcaagcagatgggaggcgtgttcagtaacttattcataatgcatctgaaatgattgctgtactcaaatatttaacgttagagtaatagtattttgaatgaaaaccatagttgattgtct

SEQ ID NO: 152058 - DNA, 891 bp, Homo sapiens
  Payload ID: 9931
  Gene Symbol: MDM2
  Gene Name: MDM2 proto-oncogene, E3 ubiquitin protein ligase
  Uniprot ID: Q00987
  ENST ID: ENST00000360430
  CDS Start-End: 1-891
atgtgcaataccaacatgtctgtacctactgatggtgctgtaaccacctcacagattccagcttcggaacaagagaccctggatcttgatgctggtgtaagtgaacattcaggtgattggttggatcaggattcagtttcagatcagtttagtgtagaatttgaagttgaatctctcgactcagaagattatagccttagtgaagaaggacaagaactctcagatgaagatgatgaggtatatcaagttactgtgtatcaggcaggggagagtgatacagattcatttgaagaagatcctgaaatttccttagctgactattggaaatgcacttcatgcaatgaaatgaatcccccccttccatcacattgcaacagatgttgggcccttcgtgagaattggcttcctgaagataaagggaaagataaaggggaaatctctgagaaagccaaactggaaaactcaacacaagctgaagagggctttgatgttcctgattgtaaaaaaactatagtgaatgattccagagagtcatgtgttgaggaaaatgatgataaaattacacaagcttcacaatcacaagaaagtgaagactattctcagccatcaacttctagtagcattatttatagcagccaagaagatgtgaaagagtttgaaagggaagaaacccaagacaaagaagagagtgtggaatctagtttgccccttaatgccattgaaccttgtgtgatttgtcaaggtcgacctaaaaatggttgcattgtccatggcaaaacaggacatcttatggcctgctttacatgtgcaaagaagctaaagaaaaggaataagccctgcccagtatgtagacaaccaattcaaatgattgtgctaacttatttcccctag

SEQ ID NO: 152059 - DNA, 732 bp, Homo sapiens
  Payload ID: 9931
  Gene Symbol: MDM2
  Gene Name: MDM2 proto-oncogene, E3 ubiquitin protein ligase
  ENST ID: ENST00000393410
  CDS Start-End: 1-732
atgtgcaataccaacatgtctgtacctactgatggtgctgtaaccacctcacagattccagcttcggaacaagagaccctggttagaccaaagccattgcttttgaagttattaaagtctgttggtgcacaaaaagacacttatactatgaaagaggactattggaaatgcacttcatgcaatgaaatgaatcccccccttccatcacattgcaacagatgttgggcccttcgtgagaattggcttcctgaagataaagggaaagataaaggggaaatctctgagaaagccaaactggaaaactcaacacaagctgaagagggctttgatgttcctgattgtaaaaaaactatagtgaatgattccagagagtcatgtgttgaggaaaatgatgataaaattacacaagcttcacaatcacaagaaagtgaagactattctcagccatcaacttctagtagcattatttatagcagccaagaagatgtgaaagagtttgaaagggaagaaacccaagacaaagaagagagtgtggaatctagtttgccccttaatgccattgaaccttgtgtgatttgtcaaggtcgacctaaaaatggttgcattgtccatggcaaaacaggacatcttatggcctgctttacatgtgcaaagaagctaaagaaaaggaataagccctgcccagtatgtagacaaccaattcaaatgattgtgctaacttatttcccctag

SEQ ID NO: 152060 - DNA, 1404 bp, Homo sapiens
  Payload ID: 9931
  Gene Symbol: MDM2
  Gene Name: MDM2 proto-oncogene, E3 ubiquitin protein ligase
  ENST ID: ENST00000393412
  CDS Start-End: 306-1037
gcaccgcggcgagcttggctgcttctggggcctgtgtggccctgtgtgtcggaaagatggagcaagaagccgagcccgaggggcggccgcgacccctctgaccgagatcctgctgctttcgcagccaggagcaccgtccctccccggattagtgcgtacgagcgcccagtgccctggcccggagagtggaatgatccccgaggcccagggcgtcgtgcttccgcgcgccccgtgaaggaaactggggagtcttgagggacccccgactccaagcgcgaaaaccccggatggtgaggagcaggcaaatgtgcaataccaacatgtctgtacctactgatggtgctgtaaccacctcacagattccagcttcggaacaagagaccctggttagaccaaagccattgcttttgaagttattaaagtctgttggtgcacaaaaagacacttatactatgaaagaggactattggaaatgcacttcatgcaatgaaatgaatcccccccttccatcacattgcaacagatgttgggcccttcgtgagaattggcttcctgaagataaagggaaagataaaggggaaatctctgagaaagccaaactggaaaactcaacacaagctgaagagggctttgatgttcctgattgtaaaaaaactatagtgaatgattccagagagtcatgtgttgaggaaaatgatgataaaattacacaagcttcacaatcacaagaaagtgaagactattctcagccatcaacttctagtagcattatttatagcagccaagaagatgtgaaagagtttgaaagggaagaaacccaagacaaagaagagagtgtggaatctagtttgccccttaatgccattgaaccttgtgtgatttgtcaaggtcgacctaaaaatggttgcattgtccatggcaaaacaggacatcttatggcctgctttacatgtgcaaagaagctaaagaaaaggaataagccctgcccagtatgtagacaaccaattcaaatgattgtgctaacttatttcccctagttgacctgtctataagagaattatatatttctaactatataaccctaggaatttagacaacctgaaatttattcacatatatcaaagtgagaaaatgcctcaattcacatagatttcttctctttagtataattgacctactttggtagtggaatagtgaatacttactataatttgacttgaatatgtagctcatcctttacaccaactcctaattttaaataatttctactctgtcttaaatgagaagtacttggtttttttttttcttaaatatgtatatgacatttaaatgtaacttattattttttttgagaccgagtcttgctctgttacccaggctggagtgcagtggcgtgatcttggc

SEQ ID NO: 152061 - DNA, 657 bp, Homo sapiens
  Payload ID: 9931
  Gene Symbol: MDM2
  Gene Name: MDM2 proto-oncogene, E3 ubiquitin protein ligase
  Uniprot ID: Q00987
  ENST ID: ENST00000393413
  CDS Start-End: 1-657
atgtgcaataccaacatgtctgtacctactgatggtgctgtaaccacctcacagattccagcttcggaacaagagaccctggactattggaaatgcacttcatgcaatgaaatgaatcccccccttccatcacattgcaacagatgttgggcccttcgtgagaattggcttcctgaagataaagggaaagataaaggggaaatctctgagaaagccaaactggaaaactcaacacaagctgaagagggctttgatgttcctgattgtaaaaaaactatagtgaatgattccagagagtcatgtgttgaggaaaatgatgataaaattacacaagcttcacaatcacaagaaagtgaagactattctcagccatcaacttctagtagcattatttatagcagccaagaagatgtgaaagagtttgaaagggaagaaacccaagacaaagaagagagtgtggaatctagtttgccccttaatgccattgaaccttgtgtgatttgtcaaggtcgacctaaaaatggttgcattgtccatggcaaaacaggacatcttatggcctgctttacatgtgcaaagaagctaaagaaaaggaataagccctgcccagtatgtagacaaccaattcaaatgattgtgctaacttatttcccctag

SEQ ID NO: 152062 - DNA, 842 bp, Homo sapiens
  Payload ID: 9931
  Gene Symbol: MDM2
  Gene Name: MDM2 proto-oncogene, E3 ubiquitin protein ligase
  ENST ID: ENST00000393415
  CDS Start-End: 75-842
tgtgttcagtggcgattggagggtagacctgtgggcacggacgcacgccactttttctctgctgatccaggcaaatgtgcaataccaacatgtctgtacctactgatggtgctgtaaccacctcacagattccagcttcggaacaagagaccctggttagaccaaagccattgcttttgaagttattaaagtctgttggtgcacaaaaagacacttatactatgaaagaggttcttttttatcttggccagtatattatgactaaacgattatatgatgagaagcaacaacatattgtatattgttcaaatgatcttctaggagatttgtttggcgtgccaagcttctctgtgaaagagcacaggaaaatatataccatgatctacaggaacttggtagtagtcaatcagcaggaatcatcggactcaggtacatctgtgagtgagaacaggtgtcaccttgaaggtgggagtgatcaaaaggaccttgtacaagagcttcaggaagagaaaccttcatcttcacatttggtttctagaccatctacctcatctagaaggagagcaattagtgagacagaagaaaattcagatgaattatctggtgaacgacaaagaaaacgccacaaatctgatagtatttccctttcctttgatgaaagcctggctctgtgtgtaataagggagatatgttgtgaaagaagcagtagcagtgaatctacagggacgccatcgaatccggatcttgatgctggtgtatatcaagttactgtgtatcaggcaggggagagtgatacagattcatttgaagaagatcctgaaatttccttagctgactattgg

SEQ ID NO: 152063 - DNA, 754 bp, Homo sapiens
  Payload ID: 9931
  Gene Symbol: MDM2
  Gene Name: MDM2 proto-oncogene, E3 ubiquitin protein ligase
  ENST ID: ENST00000393416
  CDS Start-End: 68-754
agtggcgattggagggtagacctgtgggcacggacgcacgccactttttctctgctgatccaggcaaatgtgcaataccaacatgtctgtacctactgatggtgctgtaaccacctcacagattccagcttcggaacaagagaccctggttagaccaaagccattgcttttgaagttattaaagtctgttggtgcacaaaaagacacttatactatgaaagagagatggagtttcactatgttgcccaggctggtctggaactcctgggctcaagggatctgcttacctcggcctcctaaagtgctagatttacaggttcttttttatcttggccagtatattatgactaaacgattatatgatgagaagcaacaacatattgtatattgttcaaatgatcttctaggagatttgtttggcgtgccaagcttctctgtgaaagagcacaggaaaatatataccatgatctacaggaacttggtagtagtcaatcagcaggaatcatcggactcaggtacatctgtgagtgagaacaggtgtcaccttgaaggtgggagtgatcaaaaggaccttgtacaagagcttcaggaagagaaaccttcatcttcacatttggtttctagaccatctacctcatctagaaggagagcaattagtgagacagaagaaaattcagatgaattatctggtgaacgacaaagaaaacgccacaaatctgatagtatttccctttcctttgatgaaagcctggct

SEQ ID NO: 152064 - DNA, 1037 bp, Homo sapiens
  Payload ID: 9931
  Gene Symbol: MDM2
  Gene Name: MDM2 proto-oncogene, E3 ubiquitin protein ligase
  ENST ID: ENST00000428863
  CDS Start-End: 306-1037
gcaccgcggcgagcttggctgcttctggggcctgtgtggccctgtgtgtcggaaagatggagcaagaagccgagcccgaggggcggccgcgacccctctgaccgagatcctgctgctttcgcagccaggagcaccgtccctccccggattagtgcgtacgagcgcccagtgccctggcccggagagtggaatgatccccgaggcccagggcgtcgtgcttccgcgcgccccgtgaaggaaactggggagtcttgagggacccccgactccaagcgcgaaaaccccggatggtgaggagcaggcaaatgtgcaataccaacatgtctgtacctactgatggtgctgtaaccacctcacagattccagcttcggaacaagagaccctggttagaccaaagccattgcttttgaagttattaaagtctgttggtgcacaaaaagacacttatactatgaaagaggttcttttttatcttggccagtatattatgactaaacgattatatgatgagaagcaacaacatattgtatattgttcaaatgatcttctaggagatttgtttggcgtgccaagcttctctgtgaaagagcacaggaaaatatataccatgatctacaggaacttggtagtagtcaatcagcaggaatcatcggactcaggtacatctgtgagtgagaacaggtgtcaccttgaaggtgggagtgatcaaaaggaccttgtacaagagcttcaggaagagaaaccttcatcttcacatttggtttctagaccatctacctcatctagaaggagagcaattagtgagacagaagaaacccaagacaaagaagagagtgtggaatctagtttgccccttaatgccattgaaccttgtgtgatttgtcaaggtcgacctaaaaatggttgcattgtccatggcaaaacaggacatcttatggcctgctttacatgtgcaaagaagctaaagaaaaggaataagccctgcccagtatgtagacaaccaattcaaatgattgtgctaacttatttcccctag

SEQ ID NO: 152065 - DNA, 7420 bp, Homo sapiens
  Payload ID: 9931
  Gene Symbol: MDM2
  Gene Name: MDM2 proto-oncogene, E3 ubiquitin protein ligase
  ENST ID: ENST00000462284
  CDS Start-End: 325-1725
gtagggggcgcgcaccgaggcaccgcggcgagcttggctgcttctggggcctgtgtggccctgtgtgtcggaaagatggagcaagaagccgagcccgaggggcggccgcgacccctctgaccgagatcctgctgctttcgcagccaggagcaccgtccctccccggattagtgcgtacgagcgcccagtgccctggcccggagagtggaatgatccccgaggcccagggcgtcgtgcttccgcgcgccccgtgaaggaaactggggagtcttgagggacccccgactccaagcgcgaaaaccccggatggtgaggagcaggcaaatgtgcaataccaacatgtctgtacctactgatggtgctgtaaccacctcacagattccagcttcggaacaagagaccctggttcttttttatcttggccagtatattatgactaaacgattatatgatgagaagcaacaacatattgtatattgttcaaatgatcttctaggagatttgtttggcgtgccaagcttctctgtgaaagagcacaggaaaatatataccatgatctacaggaacttggtagtagtcaatcagcaggaatcatcggactcaggtacatctgtgagtgagaacaggtgtcaccttgaaggtgggagtgatcaaaaggaccttgtacaagagcttcaggaagagaaaccttcatcttcacatttggtttctagaccatctacctcatctagaaggagagcaattagtgagacagaagaaaattcagatgaattatctggtgaacgacaaagaaaacgccacaaatctgatagtatttccctttcctttgatgaaagcctggctctgtgtgtaataagggagatatgttgtgaaagaagcagtagcagtgaatctacagggacgccatcgaatccggatcttgatgctggtgtaagtgaacattcaggtgattggttggatcaggattcagtttcagatcagtttagtgtagaatttgaagttgaatctctcgactcagaagattatagccttagtgaagaaggacaagaactctcagatgaagatgatgaggtatatcaagttactgtgtatcaggcaggggagagtgatacagattcatttgaagaagatcctgaaatttccttagctgactattggaaatgcacttcatgcaatgaaatgaatcccccccttccatcacattgcaacagatgttgggcccttcgtgagaattggcttcctgaagataaagggaaagataaaggggaaatctctgagaaagccaaactggaaaactcaacacaagctgaagagggctttgatgttcctgattgtaaaaaaactatagtgaatgattccagagagtcatgtgttgaggaaaatgatgataaaattacacaagcttcacaatcacaagaaagtgaagactattctcagccatcaacttctagtagcattatttatagcagccaagaagatgtgaaagagtttgaaagggaagaaacccaagacaaagaagagagtgtggaatctagtttgccccttaatgccattgaaccttgtgtgatttgtcaaggtcgacctaaaaatggttgcattgtccatggcaaaacaggacatcttatggcctgctttacatgtgcaaagaagctaaagaaaaggaataagccctgcccagtatgtagacaaccaattcaaatgattgtgctaacttatttcccctagttgacctgtctataagagaattatatatttctaactatataaccctaggaatttagacaacctgaaatttattcacatatatcaaagtgagaaaatgcctcaattcacatagatttcttctctttagtataattgacctactttggtagtggaatagtgaatacttactataatttgacttgaatatgtagctcatcctttacaccaactcctaattttaaataatttctactctgtcttaaatgagaagtacttggtttttttttttcttaaatatgtatatgacatttaaatgtaacttattattttttttgagaccgagtcttgctctgttacccaggctggagtgcagtggcgtgatcttggctcactgcaagctctgcctcccgggttcgcaccattctcctgcctcagcctcccaattagcttggcctacagtcatctgccaccacacctggctaattttttgtacttttagtagagacagggtttcaccgtgttagccaggatggtctcgatctcctgacctcgtgatccgcccacctcggcctcccaaagtgctgggattacaggcatgagccaccgcgtccggcctaaatgtcacttagtacctttgatataaagagaaaatgtgtgaaagatttagttttttgtttttttgtttgtttgtttgtttgtttgttttgagatgagtctctctgtcgcccaggctggagtgcagtgtcatgatctagcagtctccgcttcccgggttcaagccattctcctggctcagcctctggagcagctgggattacaggcatgcaccaccatgcccagctaatttttgtatttttagtagagatagggtttcaccatgttggccaggctggtcacgaactcctgacctcaagtgaggtcacccgcctcggcctcccgaagtgctgggattgcagatgtgagccaccatgtccagccaagaattagtatttaaattttagatactctttttttttttttttttttttttttttgagacagagtcttgctccatcacccatgctagagtgcagtggagtgatctcggctcactgcaacttccgccttctgggttcaagctattctcctgcctcagccttccaagtaactgggattacaggcatgtaccaccataccagctgatttttttgtatttttagtaaagacagggtttcaccatgttagccaggctgatcttgaactcctaaactcaagtgatctactcacctcagcctcccaaaatgctgggattacagatgtgaggcacctggcctcagatttttgatactcttaaaccttctgatccttagtttctctctccaaaatactctttctaggttaaaaaaaaaaaggctcttatatttggtgctatgtaaatgaaaatgttttttaggttttcttgatttaacaatagagacagggtctccctgtgttgcccaggctggtctcgaactcctgggctcaagagatcctcctgtcttggcctcgcaaagtgctaagtaggattacaggcgttagccaccacacccggctgtaaaaatgtacttattctccagcctcttttgtataaaccatagtaagggatgggagtaatgatgttatctgtgaaaatagccaccatttacccgtaagacaaaacttgttaaagcctcctgagtctaacctagattacatcaggccctttttcacacacaaaaaaatcctttatgggatttaatggaatctgttgtttccccctaagttgaaaaacaactctaagacactttaaagtaccttcttggcctgggttacatggttcccagcctaggtttcagacttttgcttaaggccagttttagaaacccgtgaattcagaaaagttaattcagaaatttgataaacagaattgttatttaaaaactaactggaaagattgttaagttctttctgaattattcagaaattatgcatcattttccttcaagaatgacagggtcagcatgtggaattccaagatacctcttgacttcctctcaagctccgtgtttggtcagtggaggcccatccgagctcagcactgagaagtgttagtttctttgggacccatctaccctgaccacatcatgatgttcatctgcagctgttgcaaggtgttcagattgtataaacataaatgtcacaaaaactttaaaagaagtgcaattctcaaaaggttaggtggactaaagcattctgtaaagcaactgctaataatgagcttacagtggatttgaatttgaaaaatatagtaacaagcctgtcaaatatctgcaagaactatggaataaaactactgatgcagtgaagacagttgaaaagatcaaacaaatgccaagctatatttataatgaacaaattcaagaaaaaggactacggaaagttcaggacatcaaagaagtcaggcaaaactcatcttgacccctgttgcaggcaaaggaacgcagctggaagaaaagatgatataacagttaacaggatgcagacatggcagaggtttcctaaaaatctcattatctataaccatttctatatttacatttgaaaatctcctttggagacttagaacctctaaattattgacttattttttatataaggtcactccgatgaaaggtgattacaaaatcatctacattgctgtctacaaaacagataatatggatgtttgatcgcatctcattgttaactctttactgatatgtttgtaaatacagaagtgaaatgtggacataaaatagttacgctatttggttaatggtactagacaacatgtaattaatgacattcaaaaatttatggctagtgatatatataaagtaaaattttctttgcagtaaaatatgccctttattatagaagggaggatataaggaaccaacagtttgtatgaaaatagctcaaataatatcttttattttgattttaatatttcttattttggtttattagtgtcttagaacaaaatggccttatataatgaagcctagttatgctggactgttttgatctcttttaattgttctgacagatagttggggatgagagccgaataaggtttgcctgaaataactgacactatataatttctgctttggcaaatactaagttctaacttgtcattcctggtagaacaagctttatttttcgagcctagcaatgatctagaagcagatgttatctcagtgccttttgcaatttgttgtgtgggtttttttttttttaaagccacacaataattttggaaaacaatgtatgggtagaacatgtgtctgttaattgcacacaaaaccacttttaatgggtacagagttaaatttgaaggaataagttctagctgaagtattatgaactccaaataatgctttgaggacctccaaaggtaaaagtactaatccctttggccatttattgagagagagagagagagagagtagggtgactatagttaatgtattgaatgttcttgctacaaataaatgatatttgagctgatgggtgtgctaattacactgatttgatcaatacccattgtatgtgaaacagtacatacaccatatttacaattatgtatttaacatttaaaatttctaatataagtatctctcaaactgtggattaacttcttgatttatatttaaatatgaatcttaagcaaaacagtgaaaataaccatcttgatttagtgtttttctcccatatgtgaattgtatatacttaggtgaagacaataaaatcaactgaactgtaagcttagaataggactgaggtaattctgcacagcaactttactaatggtacattgttgcttcaaaactctctctctctctctctgtctgtctcaataaatggccaaagggattagtagtttacctgtggaggtcctccaagcattatttggagttgataatacttcagctacaaccaagcagaatctcttttttttggaggtcctcgaagcattatttggagttgataatacttcagcttcaatttggagttgataatatttcagctagaacctagtagaatctgtttttttcctttggaggtcctcaaagcattattggagttcataatactgaagctagaaccaagcagaatctgtttttttctgaggagtatcggtagcataaatgtgattataaacatagtacacttgatatatggaggcagtgacagctatttttacaaaatttaaatctgcaaatggattcaacatgtttatgggttattaaaattgtctgatttcttaggttctttatagtacacgtgttgaaaataaatgattaagaattgtttcaagaatgcaattatttgatcttaaatttttatgagttgttaaaatagaaattatttgaatatcatatatttgggtaacaaaaggcacaagtctgaatgtgtttctttttctggaatggccatgcctgcccactttagaaatacaaatatcactgggcagcttgaagcagttgggagcctccaatgagagcaacttgagagaatgatgttgcaagttagtaggagtaagaaatgctgtgttctccctgtcttctcttaggtcacatggcagcctggcctaagtgatcgtgaatggtctataagggaggtagctgggacagggaggggagtttgggctagccaccgtaccacttgtcagcgtgaaaagtaagattgtaattgcctgtttagttttctgcctcatctttgaaagttccaccaagctgggaacctcttgattgtgaggcacaaatgtaagtacatcagaaaaaaacaaaaaaactggctttaaagcaggagcttgtgggcccctaagccagacggggactagcttttggcattatataattaagattttttaaatccttaataagggttttattttatttttatttattttttgagacggagtcttgctctgtggctcaggctggagtacagtggtgcaatcttggctcactgcaacctctgcctcctggctgtgttcaagtggttctgcttcagcctcccaagtagctggggttagagcaccctgtcaccacgccccgctaatttttgtatttctagcagagatgaagtttcactatgttggccaggctgggctcaaactcctgacctcaagtgatctgcccgccttggccccccaaagtgctgtgattacaggcgtgagccgccacgcccagcctaataagggttttaaagataattagtgtgtaggtctgtaggcttatgatggtaaccacaagttgttaatggcattgtgaaaagtttttagttgcgctttatgggtggatgctgaattacattttgatttgatacttataaaaagaaaaagtatttcttcagcttaaaaaattgtttaaaagtttgtgatcatattgtctaccatgtagccagctttcaattatatgtaagagggactttttgacatttacaaataatactttgaggtagatatctgaaagcaccagcacttggaaggtgttcagaagtaacaaattataaaatgagctaacaaacgaaaggcaaaataaaaccgtaaagcaagcagatgggaggcgtgttcagtaacttattcataatgcatctgaaatgattgctgtactcaaatatttaacgttagagtaatagtattttgaatgaaaaccatagttgattgtct

SEQ ID NO: 152066 - DNA, 505 bp, Homo sapiens
  Payload ID: 9931
  Gene Symbol: MDM2
  Gene Name: MDM2 proto-oncogene, E3 ubiquitin protein ligase
  ENST ID: ENST00000523991
  CDS Start-End: 75-505
tgtgttcagtggcgattggagggtagacctgtgggcacggacgcacgccactttttctctgctgatccaggcaaatgtgcaataccaacatgtctgtacctactgatggtgctgtaaccacctcacagattccagcttcggaacaagagaccctggttagaccaaagccattgcttttgaagttattaaagtctgttggtgcacaaaaagacacttatactatgaaagaggatcttgatgctggtgtaagtgaacattcaggtgattggttggatcaggattcagtttcagatcagtttagtgtagaatttgaagttgaatctctcgactcagaagattatagccttagtgaagaaggacaagaactctcagatgaagatgatgaggtatatcaagttactgtgtatcaggcaggggagagtgatacagattcatttgaagaagatcctgaaatttccttagctgactattggaaatgcacttcatgcaatgaaatgaatccccc

SEQ ID NO: 152067 - DNA, 1683 bp, Homo sapiens
  Payload ID: 9931
  Gene Symbol: MDM2
  Gene Name: MDM2 proto-oncogene, E3 ubiquitin protein ligase
  ENST ID: ENST00000393417
  CDS Start-End: 114-326
gatccccgaggcccagggcgtcgtgcttccgcgcgccccgtgaaggaaactggggagtcttgagggacccccgactccaagcgcgaaaaccccggatggtgaggagcaggcaaatgtgcaataccaacatgtctgtacctactgatggtgctgtaaccacctcacagattccagcttcggaacaagagaccctggttagaccaaagccattgcttttgaagttattaaagtctgttggtgcacaaaaagacacttatactatgaaagaggacttcttgggcatccctggatcccaggttaagaacttctgcactagagatacatgagtacagtatactgatctttctgggatagaggttcttttttatcttggccagtatattatgactaaacgattatatgatgagaagcaacaacatattgtatattgttcaaatgatcttctaggagatttgtttggcgtgccaagcttctctgtgaaagagcacaggaaaatatataccatgatctacaggaacttggtagtagtcaatcagcaggaatcatcggactcaggtacatctgtgagtgagaacaggtgtcaccttgaaggtgggagtgatcaaaaggaccttgtacaagagcttcaggaagagaaaccttcatcttcacatttggtttctagaccatctacctcatctagaaggagagcaattagtgagacagaagaaaattcagatgaattatctggtgaacgacaaagaaaacgccacaaatctgatagtatttccctttcctttgatgaaagcctggctctgtgtgtaataagggagatatgttgtgaaagaagcagtagcagtgaatctacagggacgccatcgaatccggatcttgatgctggtgtaagtgaacattcaggtgattggttggatcaggattcagtttcagatcagtttagtgtagaatttgaagttgaatctctcgactcagaagattatagccttagtgaagaaggacaagaactctcagatgaagatgatgaggtatatcaagttactgtgtatcaggcaggggagagtgatacagattcatttgaagaagatcctgaaatttccttagctgactattggaaatgcacttcatgcaatgaaatgaatcccccccttccatcacattgcaacagatgttgggcccttcgtgagaattggcttcctgaagataaagggaaagataaaggggaaatctctgagaaagccaaactggaaaactcaacacaagctgaagagggctttgatgttcctgattgtaaaaaaactatagtgaatgattccagagagtcatgtgttgaggaaaatgatgataaaattacacaagcttcacaatcacaagaaagtgaagactattctcagccatcaacttctagtagcattatttatagcagccaagaagatgtgaaagagtttgaaagggaagaaacccaagacaaagaagagagtgtggaatctagtttgccccttaatgccattgaaccttgtgtgatttgtcaaggtcgacctaaaaatggttgcattgtccatggcaaaacaggacatcttatggcctgctttacatgtgcaaagaagctaaagaaaaggaataagccctgcccagtatgtagacaaccaattcaaatgattgtgctaacttatttcccctagttgacct

SEQ ID NO: 152068 - DNA, 897 bp, Homo sapiens
  Payload ID: 9931
  Gene Symbol: MDM2
  Gene Name: MDM2 proto-oncogene, E3 ubiquitin protein ligase
  ENST ID: ENST00000496959
  CDS Start-End: 1-183
atgtgcaataccaacatgtctgtacctactgatggtgctgtaaccacctcacagattccagcttcggaacaagagaccctggttagaccaaagccattgcttttgaagttattaaagtctgttggtgcacaaaaagacacttatactatgaaagagaatcatcggactcaggtacatctgtgagtgagaacaggtgtcaccttgaaggtgggagtgatcaaaaggaccttgtacaagagcttcaggaagagaaaccttcatcttcacatttggtttctagaccatctacctcatctagaaggagagcaattagtgagacaggactattggaaatgcacttcatgcaatgaaatgaatcccccccttccatcacattgcaacagatgttgggcccttcgtgagaattggcttcctgaagataaagggaaagataaaggggaaatctctgagaaagccaaactggaaaactcaacacaagctgaagagggctttgatgttcctgattgtaaaaaaactatagtgaatgattccagagagtcatgtgttgaggaaaatgatgataaaattacacaagcttcacaatcacaagaaagtgaagactattctcagccatcaacttctagtagcattatttatagcagccaagaagatgtgaaagagtttgaaagggaagaaacccaagacaaagaagagagtgtggaatctagtttgccccttaatgccattgaaccttgtgtgatttgtcaaggtcgacctaaaaatggttgcattgtccatggcaaaacaggacatcttatggcctgctttacatgtgcaaagaagctaaagaaaaggaataagccctgcccagtatgtagacaaccaattcaaatgattgtgctaacttatttcccctag

SEQ ID NO: 152069 - DNA, 393 bp, Homo sapiens
  Payload ID: 9931
  Gene Symbol: MDM2
  Gene Name: MDM2 proto-oncogene, E3 ubiquitin protein ligase
  ENST ID: ENST00000517852
  CDS Start-End: 1-393
atgtgcaataccaacatgtctgtacctactgatggtgctgtaaccacctcacagattccagcttcggaacaagagaccctggttagaccaaagccattgcttttgaagttattaaagtctgttggtgcacaaaaagacacttatactatgaaagagtttgaaagggaagaaacccaagacaaagaagagagtgtggaatctagtttgccccttaatgccattgaaccttgtgtgatttgtcaaggtcgacctaaaaatggttgcattgtccatggcaaaacaggacatcttatggcctgctttacatgtgcaaagaagctaaagaaaaggaataagccctgcccagtatgtagacaaccaattcaaatgattgtgctaacttatttcccctag

SEQ ID NO: 152070 - DNA, 692 bp, Homo sapiens
  Payload ID: 9931
  Gene Symbol: MDM2
  Gene Name: MDM2 proto-oncogene, E3 ubiquitin protein ligase
  ENST ID: ENST00000478070
  CDS Start-End: 1-150
atgtctgtacctactgatggtgctgtaaccacctcacagattccagcttcggaacaagagaccctggaaaatatataccatgatctacaggaacttggtagtagtcaatcagcagggactattggaaatgcacttcatgcaatgaaatgaatcccccccttccatcacattgcaacagatgttgggcccttcgtgagaattggcttcctgaagataaagggaaagataaaggggaaatctctgagaaagccaaactggaaaactcaacacaagctgaagagggctttgatgttcctgattgtaaaaaaactatagtgaatgattccagagagtcatgtgttgaggaaaatgatgataaaattacacaagcttcacaatcacaagaaagtgaagactattctcagccatcaacttctagtagcattatttatagcagccaagaagatgtgaaagagtttgaaagggaagaaacccaagacaaagaagagagtgtggaatctagtttgccccttaatgccattgaaccttgtgtgatttgtcaaggtcgacctaaaaatggttgcattgtccatggcaaaacaggacatcttatggcctgctttacatgtgcaaagaagctaaagaaaaggaataagccctgcccagtatgtagacaaccaattcaaatgattgtgctaacttatttcccctag

SEQ ID NO: 152071 - DNA, 1056 bp, Homo sapiens
  Payload ID: 9931
  Gene Symbol: MDM2
  Gene Name: MDM2 proto-oncogene, E3 ubiquitin protein ligase
  ENST ID: ENST00000481186
  CDS Start-End: 1-108
atgtgcaataccaacatgtctgtacctactgatggtgctgtaaccacctcacagattccagcttcggaacaagagaccctgaatcatcggactcaggtacatctgtgagtgagaacaggtgtcaccttgaaggtgggagtgatcaaaaggaccttgtacaagagcttcaggaagagaaaccttcatcttcacatttggtttctagaccatctacctcatctagaaggagagcaattagtgagacaggatcttgatgctggtgtaagtgaacattcaggtgattggttggatcaggattcagtttcagatcagtttagtgtagaatttgaagttgaatctctcgactcagaagattatagccttagtgaagaaggacaagaactctcagatgaagatgatgaggtatatcaagttactgtgtatcaggcaggggagagtgatacagattcatttgaagaagatcctgaaatttccttagctgactattggaaatgcacttcatgcaatgaaatgaatcccccccttccatcacattgcaacagatgttgggcccttcgtgagaattggcttcctgaagataaagggaaagataaaggggaaatctctgagaaagccaaactggaaaactcaacacaagctgaagagggctttgatgttcctgattgtaaaaaaactatagtgaatgattccagagagtcatgtgttgaggaaaatgatgataaaattacacaagcttcacaatcacaagaaagtgaagactattctcagccatcaacttctagtagcattatttatagcagccaagaagatgtgaaagagtttgaaagggaagaaacccaagacaaagaagagagtgtggaatctagtttgccccttaatgccattgaaccttgtgtgatttgtcaaggtcgacctaaaaatggttgcattgtccatggcaaaacaggacatcttatggcctgctttacatgtgcaaagaagctaaagaaaaggaataagccctgcccagtatgtagacaaccaattcaaatgattgtgctaacttatttcccctag

SEQ ID NO: 152072 - DNA, 427 bp, Homo sapiens
  Payload ID: 9931
  Gene Symbol: MDM2
  Gene Name: MDM2 proto-oncogene, E3 ubiquitin protein ligase
  ENST ID: ENST00000543323
  CDS Start-End: 75-427
tgtgttcagtggcgattggagggtagacctgtgggcacggacgcacgccactttttctctgctgatccaggcaaatgtgcaataccaacatgtctgtacctactgatggtgctgtaaccacctcacagattccagcttcggaacaagagaccctggttagaccaaagccattgcttttgaagttattaaagtctgttggtgcacaaaaagacacttatactatgaaagaggatcttgatgctggtgtaagtgaacattcaggtgattggttggatcaggattcagtttcagatcagtttagtgtagaatttgaagttgaatctctcgactcagaagattatagccttagtgaagaaggacaagaactctcagatgaagatgatgaggactattggaaatgcacttcatgcaatgaaatgaatccccc

SEQ ID NO: 152073 - DNA, 213 bp, Homo sapiens
  Payload ID: 9931
  Gene Symbol: MDM2
  Gene Name: MDM2 proto-oncogene, E3 ubiquitin protein ligase
  ENST ID: ENST00000544561
  CDS Start-End: 1-213
atgtgcaataccaacatgtctgtacctactgatggtgctgtaaccacctcacagattccagcttcggaacaagagaccctggttagaccaaagccattgcttttgaagttattaaagtctgttggtgcacaaaaagacacttatactatgaaagaggttcttttttatcttggccagtatattatgtgcaaagaagctaaagaaaaggaataa

SEQ ID NO: 152074 - DNA, 1011 bp, Homo sapiens
  Payload ID: 9931
  Gene Symbol: MDM2
  Gene Name: MDM2 proto-oncogene, E3 ubiquitin protein ligase
  ENST ID: ENST00000537182
  CDS Start-End: 1-237
atgtgcaataccaacatgtctgtacctactgatggtgctgtaaccacctcacagattccagcttcggaacaagagaccctggttagaccaaagccattgcttttgaagttattaaagtctgttggtgcacaaaaagacacttatactatgaaagaggaaaatatataccatgatctacaggaacttggtagtagtcaatcagcaggaatcatcggactcaggtacatctgtgagtgagaacaggtgtcaccttgaaggtgggagtgatcaaaagaagaaaattcagatgaattatctggtgaacgacaaagaaaacgccacaaatctgatagtatttccctttcctttgatgaaagcctggctctgtgtgtaataagggagatatgttgtgaaagaagcagtagcagtgaatctacagggacgccatcgaatccggactattggaaatgcacttcatgcaatgaaatgaatcccccccttccatcacattgcaacagatgttgggcccttcgtgagaattggcttcctgaagataaagggaaagataaaggggaaatctctgagaaagccaaactggaaaactcaacacaagctgaagagggctttgatgttcctgattgtaaaaaaactatagtgaatgattccagagagtcatgtgttgaggaaaatgatgataaaattacacaagcttcacaatcacaagaaagtgaagactattctcagccatcaacttctagtagcattatttatagcagccaagaagatgtgaaagagtttgaaagggaagaaacccaagacaaagaagagagtgtggaatctagtttgccccttaatgccattgaaccttgtgtgatttgtcaaggtcgacctaaaaatggttgcattgtccatggcaaaacaggacatcttatggcctgctttacatgtgcaaagaagctaaagaaaaggaataagccctgcccagtatgtagacaaccaattcaaatgattgtgctaacttatttcccctag

SEQ ID NO: 152075 - DNA, 1181 bp, Homo sapiens
  Payload ID: 9931
  Gene Symbol: MDM2
  Gene Name: MDM2 proto-oncogene, E3 ubiquitin protein ligase
  ENST ID: ENST00000536089
  CDS Start-End: 1-237
atgtgcaataccaacatgtctgtacctactgatggtgctgtaaccacctcacagattccagcttcggaacaagagaccctggttagaccaaagccattgcttttgaagttattaaagtctgttggtgcacaaaaagacacttatactatgaaagaggaaaatatataccatgatctacaggaacttggtagtagtcaatcagcaggaatcatcggactcaggtacatctgtgagtgagaacaggtgtcaccttgaaggtgggagtgatcaaaaggaccttgtacaagagcttcaggaagagaaaccttcatcttcacatttggtttctagaccatctacctcatctagaaggagagcaattagtgagacaggatcttgatgctggtgtaagtgaacattcaggtgattggttggatcaggattcagtttcagatcagtttagtgtagaatttgaagttgaatctctcgactcagaagattatagccttagtgaagaaggacaagaactctcagatgaagatgatgaggtatatcaagttactgtgtatcaggcaggggagagtgatacagattcatttgaagaagatcctgaaatttccttagctgactattggaaatgcacttcatgcaatgaaatgaatcccccccttccatcacattgcaacagatgttgggcccttcgtgagaattggcttcctgaagataaagggaaagataaaggggaaatctctgagaaagccaaactggaaaactcaacacaagctgaagagggctttgatgttcctgattgtaaaaaaactatagtgaatgattccagagagtcatgtgttgaggaaaatgatgataaaattacacaagcttcacaatcacaagaaagtgaagactattctcagccatcaacttctagtagcattatttatagcagccaagaagatgtgaaagagtttgaaagggaagaaacccaagacaaagaagagagtgtggaatctagtttgccccttaatgccattgaaccttgtgtgatttgtcaaggtcgacctaaaaatggttgcattgtccatggcaaaacaggacatcttatggcctgctttacatgtgcaaagaagctaaagaaaaggaataagccctgcccagtatgtagacaaccaattcaaatgattgtgctaacttatttcccctag

SEQ ID NO: 152076 - DNA, 845 bp, Homo sapiens
  Payload ID: 9931
  Gene Symbol: MDM2
  Gene Name: MDM2 proto-oncogene, E3 ubiquitin protein ligase
  ENST ID: ENST00000539479
  CDS Start-End: 75-845
tgtgttcagtggcgattggagggtagacctgtgggcacggacgcacgccactttttctctgctgatccaggcaaatgtgcaataccaacatgtctgtacctactgatggtgctgtaaccacctcacagattccagcttcggaacaagagaccctggttagaccaaagccattgcttttgaagttattaaagtctgttggtgcacaaaaagacacttatactatgaaagaggttcttttttatcttggccagtatattatgactaaacgattatatgatgagaagcaacaacatattgtatattgttcaaatgatcttctaggagatttgtttggcgtgccaagcttctctgtgaaagagcacaggaaaatatataccatgatctacaggaacttggtagtagtcaatcagcaggaatcatcggactcaggtacatctgtgagtgagaacaggtgtcaccttgaaggtgggagtgatcaaaaggaccttgtacaagagcttcaggaagagaaaccttcatcttcacatttggtttctagaccatctacctcatctagaaggagagcaattagtgagacagaagaaaattcagatgaattatctggtgaacgacaaagaaaacgccacaaatctgatagtatttccctttcctttgatgaaagcctggctctgtgtgtaataagggagatatgttgtgaaagaagcagtagcagtgaatctacagggacgccatcgaatccggatcttgatgctggtgtaagtgaacattcaggtgattggttggatcaggattcagtttcagatcagtttagtgtagaatttgaagttgaatctctcgactcagaa

SEQ ID NO: 152077 - DNA, 1127 bp, Homo sapiens
  Payload ID: 9931
  Gene Symbol: MDM2
  Gene Name: MDM2 proto-oncogene, E3 ubiquitin protein ligase
  ENST ID: ENST00000542502
  CDS Start-End: 1-255
atgtgcaataccaacatgtctgtacctactgatggtgctgtaaccacctcacagattccagcttcggaacaagagaccctggttagaccaaagccattgcttttgaagttattaaagtctgttggtgcacaaaaagacacttatactatgaaagagaagaaaattcagatgaattatctggtgaacgacaaagaaaacgccacaaatctgatagtatttccctttcctttgatgaaagcctggctctgtgtgtaataagggagatatgttgtgaaagaagcagtagcagtgaatctacagggacgccatcgaatccggatcttgatgctggtgtaagtgaacattcaggtgattggttggatcaggattcagtttcagatcagtttagtgtagaatttgaagttgaatctctcgactcagaagattatagccttagtgaagaaggacaagaactctcagatgaagatgatgaggtatatcaagttactgtgtatcaggcaggggagagtgatacagattcatttgaagaagatcctgaaatttccttagctgactattggaaatgcacttcatgcaatgaaatgaatcccccccttccatcacattgcaacagatgttgggcccttcgtgagaattggcttcctgaagataaagggaaagataaaggggaaatctctgagaaagccaaactggaaaactcaacacaagctgaagagggctttgatgttcctgattgtaaaaaaactatagtgaatgattccagagagtcatgtgttgaggaaaatgatgataaaattacacaagcttcacaatcacaagaaagtgaagactattctcagccatcaacttctagtagcattatttatagcagccaagaagatgtgaaagagtttgaaagggaagaaacccaagacaaagaagagagtgtggaatctagtttgccccttaatgccattgaaccttgtgtgatttgtcaaggtcgacctaaaaatggttgcattgtccatggcaaaacaggacatcttatggcctgctttacatgtgcaaagaagctaaagaaaaggaataagccctgcccagtatgtagacaaccaattcaaatgattgtgctaacttatttcccctag

SEQ ID NO: 152078 - DNA, 398 bp, Homo sapiens
  Payload ID: 9931
  Gene Symbol: MDM2
  Gene Name: MDM2 proto-oncogene, E3 ubiquitin protein ligase
  ENST ID: ENST00000545204
  CDS Start-End: 1-156
atgtgcaataccaacatgtctgtacctactgatggtgctgtaaccacctcacagattccagcttcggaacaagagaccctggttagtaagaaagtgaagactattctcagccatcaacttctagtagcattatttatagcagccaagaagatgtgaaagagtttgaaagggaagaaacccaagacaaagaagagagtgtggaatctagtttgccccttaatgccattgaaccttgtgtgatttgtcaaggtcgacctaaaaatggttgcattgtccatggcaaaacaggacatcttatggcctgctttacatgtgcaaagaagctaaagaaaaggaataagccctgcccagtatgtagacaaccaattcaaatgattgtgctaacttatttcccctag

SEQ ID NO: 152079 - DNA, 1315 bp, Homo sapiens
  Payload ID: 9931
  Gene Symbol: MDM2
  Gene Name: MDM2 proto-oncogene, E3 ubiquitin protein ligase
  ENST ID: ENST00000540352
  CDS Start-End: 1-513
atgtgcaataccaacatgtctgtacctactgatggtgctgtaaccacctcacagattccagcttcggaacaagagaccctggttagaccaaagccattgcttttgaagttattaaagtctgttggtgcacaaaaagacacttatactatgaaagaggttcttttttatcttggccagtatattatgactaaacgattatatgatgagaagcaacaacatattgtatattgttcaaatgatcttctaggagatttgtttggcgtgccaagcttctctgtgaaagagcacaggaaaatatataccatgatctacaggaacttggtagtagtcaatcagcaggaatcatcggactcaggtacatctgtgagtgagaacaggtgtcaccttgaaggtgggagtgatcaaaaggaccttgtacaagagcttcaggaagagaaaccttcatcttcacatttggtttctagaccatctacctcatctagaaggagagcaattagtgagacaggatcttgatgctggtgtaagtgaacattcaggtgattggttggatcaggattcagtttcagatcagtttagtgtagaatttgaagttgaatctctcgactcagaagattatagccttagtgaagaaggacaagaactctcagatgaagatgatgaggtatatcaagttactgtgtatcaggcaggggagagtgatacagattcatttgaagaagatcctgaaatttccttagctgactattggaaatgcacttcatgcaatgaaatgaatcccccccttccatcacattgcaacagatgttgggcccttcgtgagaattggcttcctgaagataaagggaaagataaaggggaaatctctgagaaagccaaactggaaaactcaacacaagctgaagagggctttgatgttcctgattgtaaaaaaactatagtgaatgattccagagagtcatgtgttgaggaaaatgatgataaaattacacaagcttcacaatcacaagaaagtgaagactattctcagccatcaacttctagtagcattatttatagcagccaagaagatgtgaaagagtttgaaagggaagaaacccaagacaaagaagagagtgtggaatctagtttgccccttaatgccattgaaccttgtgtgatttgtcaaggtcgacctaaaaatggttgcattgtccatggcaaaacaggacatcttatggcctgctttacatgtgcaaagaagctaaagaaaaggaataagccctgcccagtatgtagacaaccaattcaaatgattgtgctaacttatttcccctag

SEQ ID NO: 152080 - DNA, 363 bp, Homo sapiens
  Payload ID: 9931
  Gene Symbol: MDM2
  Gene Name: MDM2 proto-oncogene, E3 ubiquitin protein ligase
  ENST ID: ENST00000546048
  CDS Start-End: 1-237
atgtgcaataccaacatgtctgtacctactgatggtgctgtaaccacctcacagattccagcttcggaacaagagaccctggttagaccaaagccattgcttttgaagttattaaagtctgttggtgcacaaaaagacacttatactatgaaagaggaaaatatataccatgatctacaggaacttggtagtagtcaatcagcaggaatcatcggactcaggtacatctgtgagtgagaacaggtgtcaccttgaaggtgggagtgatcaaaaggaccttgtacaagactaaagaaaaggaataagccctgcccagtatgtagacaaccaattcaaatgattgtgctaacttatttcccctag

SEQ ID NO: 152081 - DNA, 697 bp, Homo sapiens
  Payload ID: 9932
  Gene Symbol: MDM4
  Gene Name: MDM4, p53 regulator
  ENST ID: ENST00000367179
  CDS Start-End: 58-697
ggggaaactttatagtcatcttggtacgtggcgagggtttcatatgttttctgaattatgcctaattttgtagtagactggagggtttatacagatagcctgtttttaacagtagattttggcctttgtgcagaggaaagttccacttccagaaaaagaactacagaagacgatatccccacactgcctacctcagagcataaatgcatacattctagagaagatgaagacttaattgaaaatttagcccaagatgaaacatctaggctggaccttggatttgaggagtgggatgtagctggcctgccttggtggtttttaggaaacttgagaagcaactatacacctagaagtaatggctcaactgatttacagacaaatcaggatgtgggtactgccattgtttcagatactacagatgacttgtggtttttgaatgagtcagtatcagagcagttaggtgttggaataaaagttgaagctgctgatactgaacaaacaagtgaagaagtagggaaagtaagtgacaaaaaggtgattgaagtgggaaaaaatgatgacctggaggactctaagtccttaagtgatgataccgatgtagaggttacctctgaggatgagtggcagtgtactgaatgcaagaaatttaactctccaagcaagaggtactgttttcgttgttgggccttgaggaagg

SEQ ID NO: 152082 - DNA, 547 bp, Homo sapiens
  Payload ID: 9932
  Gene Symbol: MDM4
  Gene Name: MDM4, p53 regulator
  ENST ID: ENST00000367180
  CDS Start-End: 30-425
caacagactgcagtttcttcactaccaaaatgacatcattttccacctctgctcagtgttcaacatctgacagtgcttgcaggatctctcctggacaaatcaatcaggtacgaccaaaactgccgcttttgaagattttgcatgcagcaggtgcgcaaggtgaaatgttcactgttaaagaggtcatgcactatttaggtcagtacataatggtgaagcaactttatgatcagcaggagcagcatatggtatattgtggtggagatcttttgggagaactactgggacgtcagagcttctccgtgaaagacccaagccctctctatgatatgctaagaaagaatcttgtcactttagccactgctactacagaaatgggtcatttgttctgtagaatttcccacgctctagagttggcagattaatgtcgctttagatgaagatgctattgttttatgaagcaaacggggaaaaatccagatttcaagatcccataaccctgtatgacttaacacttgaaagttgaaattaaatgtaaaaagccata

SEQ ID NO: 152083 - DNA, 10073 bp, Homo sapiens
  Payload ID: 9932
  Gene Symbol: MDM4
  Gene Name: MDM4, p53 regulator
  Uniprot ID: O15151
  ENST ID: ENST00000367182
  CDS Start-End: 163-1635
gggaggccggaagttgcggcttcattactcgccatttcaaaatgctgccgaggccctaggatctgtgactgccacccctccccccacccgggctcggcgggggagcgactcatggagctgccgtaagttttaccaacagactgcagtttcttcactaccaaaatgacatcattttccacctctgctcagtgttcaacatctgacagtgcttgcaggatctctcctggacaaatcaatcaggtacgaccaaaactgccgcttttgaagattttgcatgcagcaggtgcgcaaggtgaaatgttcactgttaaagaggtcatgcactatttaggtcagtacataatggtgaagcaactttatgatcagcaggagcagcatatggtatattgtggtggagatcttttgggagaactactgggacgtcagagcttctccgtgaaagacccaagccctctctatgatatgctaagaaagaatcttgtcactttagccactgctactacagatgctgctcagactctcgctctcgcacaggatcacagtatggatattccaagtcaagaccaactgaagcaaagtgcagaggaaagttccacttccagaaaaagaactacagaagacgatatccccacactgcctacctcagagcataaatgcatacattctagagaagatgaagacttaattgaaaatttagcccaagatgaaacatctaggctggaccttggatttgaggagtgggatgtagctggcctgccttggtggtttttaggaaacttgagaagcaactatacacctagaagtaatggctcaactgatttacagacaaatcaggatgtgggtactgccattgtttcagatactacagatgacttgtggtttttgaatgagtcagtatcagagcagttaggtgttggaataaaagttgaagctgctgatactgaacaaacaagtgaagaagtagggaaagtaagtgacaaaaaggtgattgaagtgggaaaaaatgatgacctggaggactctaagtccttaagtgatgataccgatgtagaggttacctctgaggatgagtggcagtgtactgaatgcaagaaatttaactctccaagcaagaggtactgttttcgttgttgggccttgaggaaggattggtattcagattgttcaaagttaacccattctctctccacgtctgatatcactgccatacctgaaaaggaaaatgaaggaaatgatgtccctgattgtcgaagaaccatttcggctcctgtcgttagacctaaagatgcgtatataaagaaagaaaactccaaactttttgatccctgcaactcagtggaattcttggatttggctcacagttctgaaagccaagagaccatctcaagcatgggagaacagttagataacctttctgaacagagaacagatacagaaaacatggaggattgccagaatctcttgaagccatgtagcttatgtgagaaaagaccacgagacgggaacattattcatggaaggacgggccatcttgtcacttgttttcactgtgccagaagactaaagaaggctggggcttcatgccctatttgcaagaaagagattcagctggttattaaggtttttatagcataatggtagtacgaacataaaaatgcatttattccgttcacttaccacattatttgaaaatcaatcctttatttaattttatttccaacctgtcagagaatgttcttaggcatcaaaatccaaggtagctgtaagaaaaatactggagctaacaatgaagaacagaagtaatctgattagtcaaattattaagtgccatggattactttatgcagcagtcaggtacatagttaggtgaacccaaaagaaaaactcttgaaaacaagagatttcttccatgcacatttacaatattgaggtataattaacatgataaagtgtttccttctaacgagttgtagaaatctgagtaaccacccaaaaaagcaatagaatgtttctgtcaccccaaaacactcccttctgcccctcttcagacagtccttcagctatttcatggctctcaccctagttttttttttttttgcacttttttttttccgggggtataggggaggtgtggggcgacagggtctgtcttgttctgtctcccaggctgaagtgcagtgcagtggtatgatcatggctcactgcagccttggtttcctgggcataagtggtcttcccacttcagcctcctgagtagctgagactatagactagcataaccacactggctaattttttgtggagatgaagtctcactatgttgcccaggctggtctcgaactcctgggctcaaacaatcctcccgcctcagccttccaaattgctgggattatagtcatgaggcacctagtctggcccttttgcaagactttaatctgaaatctaaatttttaaaatttaagtacttacaaaggatatactatccaacatattgcatattatatatgtgctttaaagtttttttttttttttgagagacggtctcactttgtcatccaagctggagtgcagtggtgcaaacacggcccacctcctgggctcaagtgatcctccagcctcagcttccctcacaggcattcactatcactcccagctaattaaaataatttgtagacggtgtctcgttatgttgcccaggctggtctcgaactcctgggtttaagtgattcccccgcctcagcctcccaaagtgttgggcttacagccttgagccactatgcttggctcaaagatatttttatgaaagccctgggactatagatttagctgattaaatttatagaaaaagtcctgtcatataaactggcaaagtctgttcttaatttaattagccaaatcagacttaacttccgtcagaacatgtcttggttttaattcagataaacacacaaacatacttctctggcacagccttcagaagcatcagtttttgttttgttttgttttgttttttgagacagggtcttgctctgtcgcccaggctggagtgcactggcacaatcacagttcactgcagcctcgacctcccagatccaagcaatcctcccacctaagcctcccaagtagctgggtctataggcgcgtgccaccaccatgcccagctgaattttgtattttttgtacagacagcattttgccatgttgcccaggctggtcccaaacttctagcctcaagcaaccctcctgcctcagcctctcaaagtgctaggattgcagtcctgagctactgccccctaccctctttgcgtcttaggagtcatttagattttttttgatccttttgtttagtgcctctggagctgcttacaccaaggcaatacgccttgatatactggatggttgagaggcagcctctttttttttttttttttttttttttttttggaggatagggagtatggctgttgtgaaaagggaggtaaagagaaatggtagatctgaagaggcctcatcagagcacatattttaggacaacacatatggaaattggacatctttaagttggtttccatagagctatgcatgtatccttacccccatgggaaaatgttggtgtgttctcaagggtatgcatgtgtcattttgaagaccaaggccctagaattgtcaaacttaaggatcataaaaatcatgagggttgcttgttaaaaatgtccaaacgtgcagagactgatctttgagatctggaccaggaatttgcatttgaacaagtgttcctggaatctctatgcaagttttatacagaacatacttttggaatccttgccctagacaggggtgtccaatcttttggcttccctggtccacaatggaagaagaattgtcttggaccacacataaaatacactaacactaacaatagctgatgagctaaaaaaaaaaaaaaaaaaaatcgtggaccgggcgtagtggctcacgcctgtaatcccaacactttgggagatcacctaggtcgggagtttgagaccagcctgaccgacatggagaaaccccatttttactaaaaatacaaaaaattagctgggcatggtggtgcatgcctgtagtcccagctactcaggaggctgaggcaggagaatcgcttgaacctgagagggggagattgcggtgagctgagattgcgccattgcaccccagcctgggcaacaatagcgaaactgtctcagaaaaaagaaaaaaaaaatcgcaaaaagaaaaatctcataatgtcgttgttggtttttttttttttttttgagacagtctcactctgttgcccaggctggagtgcaatggcatgatctctgctcaccgcaacctctgcctcccgggttcaggtgattctcctgcctcagcctcccagatagctgggactacaggcacataccaccatgcctggctaatttttgtatttttagtagagatgggggtttcactgtgttggccaggctggtctcgaactcctgacctcatgatccacacacctcggcctcccaaagtcctgcgattacaggcgtgagctaccgcacccagccaagttgtaatttttaataaaacttaagaagtaaacattttacttatgtttataggtatttgatcctaaatttgacacatcattgcccatgaaagaatcctcttaggctgctcagcttcactcttcctgcttgcccaccggggtttttcactgcttctgttagcactaagtacttagacgatcctaagatatgtgcttgagccgaatttcatctttacttgtaggaaactttaaactatttcttttcttttcttttttttttttttttacttgagatggagttttgctcttgtcgcccaggctggagtgcagtggagtgatctcggctcactgcaacctctgcctcccgggttcaaatgattctcctgcctcagcctcccaagtagctgggattacaggtgtgcaccaccatgtctggctaattttgtatttttagtagagatggtttcaccatgttggtcaggctggtctcgaactcctgacctcaggtcatccacccacctcagcctcgcaaagtgctgagattacaggcatgagccacagcgcccagcttaaactattttcttggtctgtttttgattttcttttttccttgccactgcggtacagattttttttactcactgccactaaactaaagcaaggcatagtttatatgtgaagtgttcagagtttactgctataaggaaacttccaaatactgacatttaccttttagctgtagttattgggaccatgtgctctggttttctggagactgccaaattgctcccatttttctgcatcccacctggtttctttctgcatgtcccctttcactttcaaacctcttcatttggatgttaaattatatggtcacctagttataggtaagccttgttcgagttgatatcttgattgtgaggaaggatctgtgtcattggagcttgtttctgctgcaacgtgctgtagactatgaataatgaaatcacaccacattaccatcagatttcttgttttagttgtcaaattaatatttatgattgttatcttgggcgaaaagttcagagcagagatgacaaatcattagaacaacgatgaatttcagtattacggctaaaaagttcttctgtctgaatattaactcactctccttccagtgtacttcacagtaattggtatgcttttttatttaatgcttaaatcaaactttataaaaatcttagaccagatctttaatatggtatgccatttccccagtctaccaatggaatagtatgggtttctaatcctaggcttgtacaatggattggagttgagccatgccagcctccacactgccactaacttctgtaatgtaagattgagtcactgccaagcatttgaaatatgcagttgtgttttaattataatttatgtatagttagatgtatgtagtgcattgtgtggtattatttggtttgtaagaatttatttttaagggtcaaggtcatttgtaacattttgtgtgtgtcaattcaatgcaatgttggctgccttttgaagtctttgatatattggtgaatattcttctgatctataatacaaagctatgtaatgttacctcttgactcgcttttgaaaggaagacaattgttaactagatatttgagttttttcccctcagaattatgtgaatttctgatatatggctttagatactgtgaatctgttttccatttagtcagttatctgcttaaattgttcagaactatatcctaacgagcaattagttctgatggttctcccagtcatgagtgtgcatgtgtgcaagcatgttttgatcctgatgctacctttgctaaaaatggccatagattaggaactagctatgtttttagaatcaaagatgaaccggtaagctgtctcatgtaccaaacgtgaaatttacagtgtttacaaatgtctggaattttgcactgccatagggaatgttaaggttacttggctggaatttatcagacttgtgagtaaacaagttgaagtttagcagatgagggggaatattgaggcccctaaggctaaacaaaataatcagtatctgagatagtggctaatgtggctccccaggcctaatttgggaacagtttttcctgattgctttgagaagtactttcttttgacagaaattttcattctgcttgccattgctatattctccctttataggagccattggatttctttccttttgtgggaaatgtcccattagcattttcagatcttttgatgtgcactaatgccattattggtaatgccgttattggtgaatacagcatagttaaataaactgttacagtaaatctacacttggatttgctgcacctctaccaatagccttttgaatgactgaaagtgttaacagagaaagaggcatgtctgcagaaagagatagctaatattttttggtactttatctgaaatccaagatgctgcttcccctgcaggttgttttccttcttacgatcctcattgaatcccctctgggagcacaggacagttagtagaactctccatttctttttttttttttttagacggagtctctctctgtcgccccggctggagtgcagtggcgcgatctcggctcactgcaacctccgcctcccgggttcaccccattctcctgcctcagcctccctagtagctgggactataggcgcccgccaccacgcctggctaatttttgtatttttattggagacggggtttcaccgtcttagccaggatggtcttgatctcctgacctcgtgatctgcccacctcagcctcccaaagtactgggattacaggcgtgagccaccgcgcccggccggaactctccatttcttaaggtaaagagggtcaaggatacctaaaaagggtcaaataatgctagaagagcaattcctctttcagagcagttgctgtaatttggcaaatgctttatcgaagattgatattaggctaggggcggtggcttacgcctgtaatcccagcactttgggaggccgaggtgggtggattgcctgagctcaggagttcgagaccagtctgaccagtatggtgaaaccctgtctctactaaaaatacaaaaattagccggtcgtggtggcgtgcacctgtagtcccagctacttggcaggttgagacaggagaatcgcttgaacctgggaggtggaggttgcagtgagccgagactgcaccactgcgctcccacctgggtgacagagactctgtctcaaaaaaaaggacatttatcattataacatcttattagagcccctaatttcttatctgaaggcactgtttttttttttaaacagttaagtactgatgtcaacagacaaatatttctgatcagatagtcccctgtcaacagtagcaaatgtggtttcataaagtgggaagaaaacagcattttaaagtaactttttgggagactgatttgagtaataataaaactctggtctcccttaagaaaaaaaaacccttccacctttactgtgtcatttatatccccttagttccaaagttaattatcttatttctggatattgcttttataccaaagacccttatcagcccttgtaactacagtatctttagataagattcctctttccagtcagtcctgggaaatgtttctgttgcagagttaggcggtagatgggaagctgtgatggcagagctactatctaataaagtaacaactcgtagttgaggcttcctttctgtgtgtgatgggggatagggagttagctcccctgttgtctcagcactaagaaattgaggtcaggccaggcgcggtggttcactcctgttattccagcactggggtggccaaagtgggcagattgcttgcgctctggagctcgagaccagcctgggcaacatggtgaaaccctgtctctaccaaaaatacaaaaaaaaagctgggcatggtgggtgcatgcttgtcccagctactgaggaggctgaggtgggaggatcgcttgagcctgggaggtggaggttgcagtgagctgagatggcaccactgcaatccaaggtgggtgacagagacgctgtctcaaagaaattgaggtcaggcttccttcttacagaattatttttttctctgtagtttgcctcattttttcactttcttttcaatgagaatcgaagtgtttcttttgggtttttttttcccccttttaaaatcaacaggaaatgtttcaaaggagggatgaaatgcttcttggcttcctcagcacttggcaaggtagacctcatagcaaccttgaatatgactttctttagtctctagctatgcactattaagtgcctcttgggtagaggtagagttaagtattgagtgccagtcttgacgtccgtatgcctcagtttttctcatatataaaaagcagtatacatacctacccttttctacctcatcatttgttgtagggattaaatccgggagagcaattctgaagcctataaatttccttgaagagatctaagaacctattatgctcttggtgtaccaagctctggggtatatattcagaatacctcatgttctggaagctgagcactagctcccctttattgcctgcctggcagagcctgtttgattactgcaggcccttttacccatgcttctagtttaggtattctttctttgatatgaggctcttgaccagaaaagagttctttctctaggtgttctgagagaagtttgtaaatttggatagtacattctatcctgataaaaccaccttgctgtggtcttgatgtacaaaaaaaaattttttttttgagacagagtcttactctgtcacccaggctggaatgcagtggcgcaatcttggttcactgcaacccccgcctcctgggttcaagcgatcctcctgcctcaacctctcaagtagctgggactacaggcgtgcaccaccacacctggctaattttgtatttttagtagagacagggtttcaccatgttggccaggctggtcttgaactcctgacctcaggcgatctgcccgccttggcctcccaaagtactgggattacaggcgtgagcaactgctcctggcccaaaacatctctttctacatacacttgagtaggtggcataaaatgcactgtcaatatatagaaaacatgaaattttccaaatatttccgatcagagaatcacaagagcagcaaatgtggtttcatcaagtgggaagaaagcagcaatttaaaataactttttgggagactgaattgagtaataataaaacttcagtctttcgctaataataataataataataataataacaacaacttattgaatgtggccagctcactagatgaggaaagaggaaggcattttctgcattcttgcctagttttccttataagcaccactaagttaatagctctgtctttttggtgtttgcactatgtaatgcttttaatactttttaattgtgcttttttatgtattaaatgtttttccttttgcca

SEQ ID NO: 152084 - DNA, 9098 bp, Homo sapiens
  Payload ID: 9932
  Gene Symbol: MDM4
  Gene Name: MDM4, p53 regulator
  Uniprot ID: O15151
  ENST ID: ENST00000367183
  CDS Start-End: 167-661
gtgtgggaggccggaagttgcggcttcattactcgccatttcaaaatgctgccgaggccctaggatctgtgactgccacccctccccccacccgggctcggcgggggagcgactcatggagctgccgtaagttttaccaacagactgcagtttcttcactaccaaaatgacatcattttccacctctgctcagtgttcaacatctgacagtgcttgcaggatctctcctggacaaatcaatcaggaaaatgaaggaaatgatgtccctgattgtcgaagaaccatttcggctcctgtcgttagacctaaagatgcgtatataaagaaagaaaactccaaactttttgatccctgcaactcagtggaattcttggatttggctcacagttctgaaagccaagagaccatctcaagcatgggagaacagttagataacctttctgaacagagaacagatacagaaaacatggaggattgccagaatctcttgaagccatgtagcttatgtgagaaaagaccacgagacgggaacattattcatggaaggacgggccatcttgtcacttgttttcactgtgccagaagactaaagaaggctggggcttcatgccctatttgcaagaaagagattcagctggttattaaggtttttatagcataatggtagtacgaacataaaaatgcatttattccgttcacttaccacattatttgaaaatcaatcctttatttaattttatttccaacctgtcagagaatgttcttaggcatcaaaatccaaggtagctgtaagaaaaatactggagctaacaatgaagaacagaagtaatctgattagtcaaattattaagtgccatggattactttatgcagcagtcaggtacatagttaggtgaacccaaaagaaaaactcttgaaaacaagagatttcttccatgcacatttacaatattgaggtataattaacatgataaagtgtttccttctaacgagttgtagaaatctgagtaaccacccaaaaaagcaatagaatgtttctgtcaccccaaaacactcccttctgcccctcttcagacagtccttcagctatttcatggctctcaccctagttttttttttttttgcacttttttttttccgggggtataggggaggtgtggggcgacagggtctgtcttgttctgtctcccaggctgaagtgcagtgcagtggtatgatcatggctcactgcagccttggtttcctgggcataagtggtcttcccacttcagcctcctgagtagctgagactatagactagcataaccacactggctaattttttgtggagatgaagtctcactatgttgcccaggctggtctcgaactcctgggctcaaacaatcctcccgcctcagccttccaaattgctgggattatagtcatgaggcacctagtctggcccttttgcaagactttaatctgaaatctaaatttttaaaatttaagtacttacaaaggatatactatccaacatattgcatattatatatgtgctttaaagtttttttttttttttgagagacggtctcactttgtcatccaagctggagtgcagtggtgcaaacacggcccacctcctgggctcaagtgatcctccagcctcagcttccctcacaggcattcactatcactcccagctaattaaaataatttgtagacggtgtctcgttatgttgcccaggctggtctcgaactcctgggtttaagtgattcccccgcctcagcctcccaaagtgttgggcttacagccttgagccactatgcttggctcaaagatatttttatgaaagccctgggactatagatttagctgattaaatttatagaaaaagtcctgtcatataaactggcaaagtctgttcttaatttaattagccaaatcagacttaacttccgtcagaacatgtcttggttttaattcagataaacacacaaacatacttctctggcacagccttcagaagcatcagtttttgttttgttttgttttgttttttgagacagggtcttgctctgtcgcccaggctggagtgcactggcacaatcacagttcactgcagcctcgacctcccagatccaagcaatcctcccacctaagcctcccaagtagctgggtctataggcgcgtgccaccaccatgcccagctgaattttgtattttttgtacagacagcattttgccatgttgcccaggctggtcccaaacttctagcctcaagcaaccctcctgcctcagcctctcaaagtgctaggattgcagtcctgagctactgccccctaccctctttgcgtcttaggagtcatttagattttttttgatccttttgtttagtgcctctggagctgcttacaccaaggcaatacgccttgatatactggatggttgagaggcagcctctttttttttttttttttttttttttttttggaggatagggagtatggctgttgtgaaaagggaggtaaagagaaatggtagatctgaagaggcctcatcagagcacatattttaggacaacacatatggaaattggacatctttaagttggtttccatagagctatgcatgtatccttacccccatgggaaaatgttggtgtgttctcaagggtatgcatgtgtcattttgaagaccaaggccctagaattgtcaaacttaaggatcataaaaatcatgagggttgcttgttaaaaatgtccaaacgtgcagagactgatctttgagatctggaccaggaatttgcatttgaacaagtgttcctggaatctctatgcaagttttatacagaacatacttttggaatccttgccctagacaggggtgtccaatcttttggcttccctggtccacaatggaagaagaattgtcttggaccacacataaaatacactaacactaacaatagctgatgagctaaaaaaaaaaaaaaaaaaaatcgtggaccgggcgtagtggctcacgcctgtaatcccaacactttgggagatcacctaggtcgggagtttgagaccagcctgaccgacatggagaaaccccatttttactaaaaatacaaaaaattagctgggcatggtggtgcatgcctgtagtcccagctactcaggaggctgaggcaggagaatcgcttgaacctgagagggggagattgcggtgagctgagattgcgccattgcaccccagcctgggcaacaatagcgaaactgtctcagaaaaaagaaaaaaaaaatcgcaaaaagaaaaatctcataatgtcgttgttggtttttttttttttttttgagacagtctcactctgttgcccaggctggagtgcaatggcatgatctctgctcaccgcaacctctgcctcccgggttcaggtgattctcctgcctcagcctcccagatagctgggactacaggcacataccaccatgcctggctaatttttgtatttttagtagagatgggggtttcactgtgttggccaggctggtctcgaactcctgacctcatgatccacacacctcggcctcccaaagtcctgcgattacaggcgtgagctaccgcacccagccaagttgtaatttttaataaaacttaagaagtaaacattttacttatgtttataggtatttgatcctaaatttgacacatcattgcccatgaaagaatcctcttaggctgctcagcttcactcttcctgcttgcccaccggggtttttcactgcttctgttagcactaagtacttagacgatcctaagatatgtgcttgagccgaatttcatctttacttgtaggaaactttaaactatttcttttcttttcttttttttttttttttacttgagatggagttttgctcttgtcgcccaggctggagtgcagtggagtgatctcggctcactgcaacctctgcctcccgggttcaaatgattctcctgcctcagcctcccaagtagctgggattacaggtgtgcaccaccatgtctggctaattttgtatttttagtagagatggtttcaccatgttggtcaggctggtctcgaactcctgacctcaggtcatccacccacctcagcctcgcaaagtgctgagattacaggcatgagccacagcgcccagcttaaactattttcttggtctgtttttgattttcttttttccttgccactgcggtacagattttttttactcactgccactaaactaaagcaaggcatagtttatatgtgaagtgttcagagtttactgctataaggaaacttccaaatactgacatttaccttttagctgtagttattgggaccatgtgctctggttttctggagactgccaaattgctcccatttttctgcatcccacctggtttctttctgcatgtcccctttcactttcaaacctcttcatttggatgttaaattatatggtcacctagttataggtaagccttgttcgagttgatatcttgattgtgaggaaggatctgtgtcattggagcttgtttctgctgcaacgtgctgtagactatgaataatgaaatcacaccacattaccatcagatttcttgttttagttgtcaaattaatatttatgattgttatcttgggcgaaaagttcagagcagagatgacaaatcattagaacaacgatgaatttcagtattacggctaaaaagttcttctgtctgaatattaactcactctccttccagtgtacttcacagtaattggtatgcttttttatttaatgcttaaatcaaactttataaaaatcttagaccagatctttaatatggtatgccatttccccagtctaccaatggaatagtatgggtttctaatcctaggcttgtacaatggattggagttgagccatgccagcctccacactgccactaacttctgtaatgtaagattgagtcactgccaagcatttgaaatatgcagttgtgttttaattataatttatgtatagttagatgtatgtagtgcattgtgtggtattatttggtttgtaagaatttatttttaagggtcaaggtcatttgtaacattttgtgtgtgtcaattcaatgcaatgttggctgccttttgaagtctttgatatattggtgaatattcttctgatctataatacaaagctatgtaatgttacctcttgactcgcttttgaaaggaagacaattgttaactagatatttgagttttttcccctcagaattatgtgaatttctgatatatggctttagatactgtgaatctgttttccatttagtcagttatctgcttaaattgttcagaactatatcctaacgagcaattagttctgatggttctcccagtcatgagtgtgcatgtgtgcaagcatgttttgatcctgatgctacctttgctaaaaatggccatagattaggaactagctatgtttttagaatcaaagatgaaccggtaagctgtctcatgtaccaaacgtgaaatttacagtgtttacaaatgtctggaattttgcactgccatagggaatgttaaggttacttggctggaatttatcagacttgtgagtaaacaagttgaagtttagcagatgagggggaatattgaggcccctaaggctaaacaaaataatcagtatctgagatagtggctaatgtggctccccaggcctaatttgggaacagtttttcctgattgctttgagaagtactttcttttgacagaaattttcattctgcttgccattgctatattctccctttataggagccattggatttctttccttttgtgggaaatgtcccattagcattttcagatcttttgatgtgcactaatgccattattggtaatgccgttattggtgaatacagcatagttaaataaactgttacagtaaatctacacttggatttgctgcacctctaccaatagccttttgaatgactgaaagtgttaacagagaaagaggcatgtctgcagaaagagatagctaatattttttggtactttatctgaaatccaagatgctgcttcccctgcaggttgttttccttcttacgatcctcattgaatcccctctgggagcacaggacagttagtagaactctccatttctttttttttttttttagacggagtctctctctgtcgccccggctggagtgcagtggcgcgatctcggctcactgcaacctccgcctcccgggttcaccccattctcctgcctcagcctccctagtagctgggactataggcgcccgccaccacgcctggctaatttttgtatttttattggagacggggtttcaccgtcttagccaggatggtcttgatctcctgacctcgtgatctgcccacctcagcctcccaaagtactgggattacaggcgtgagccaccgcgcccggccggaactctccatttcttaaggtaaagagggtcaaggatacctaaaaagggtcaaataatgctagaagagcaattcctctttcagagcagttgctgtaatttggcaaatgctttatcgaagattgatattaggctaggggcggtggcttacgcctgtaatcccagcactttgggaggccgaggtgggtggattgcctgagctcaggagttcgagaccagtctgaccagtatggtgaaaccctgtctctactaaaaatacaaaaattagccggtcgtggtggcgtgcacctgtagtcccagctacttggcaggttgagacaggagaatcgcttgaacctgggaggtggaggttgcagtgagccgagactgcaccactgcgctcccacctgggtgacagagactctgtctcaaaaaaaaggacatttatcattataacatcttattagagcccctaatttcttatctgaaggcactgtttttttttttaaacagttaagtactgatgtcaacagacaaatatttctgatcagatagtcccctgtcaacagtagcaaatgtggtttcataaagtgggaagaaaacagcattttaaagtaactttttgggagactgatttgagtaataataaaactctggtctcccttaagaaaaaaaaacccttccacctttactgtgtcatttatatccccttagttccaaagttaattatcttatttctggatattgcttttataccaaagacccttatcagcccttgtaactacagtatctttagataagattcctctttccagtcagtcctgggaaatgtttctgttgcagagttaggcggtagatgggaagctgtgatggcagagctactatctaataaagtaacaactcgtagttgaggcttcctttctgtgtgtgatgggggatagggagttagctcccctgttgtctcagcactaagaaattgaggtcaggccaggcgcggtggttcactcctgttattccagcactggggtggccaaagtgggcagattgcttgcgctctggagctcgagaccagcctgggcaacatggtgaaaccctgtctctaccaaaaatacaaaaaaaaagctgggcatggtgggtgcatgcttgtcccagctactgaggaggctgaggtgggaggatcgcttgagcctgggaggtggaggttgcagtgagctgagatggcaccactgcaatccaaggtgggtgacagagacgctgtctcaaagaaattgaggtcaggcttccttcttacagaattatttttttctctgtagtttgcctcattttttcactttcttttcaatgagaatcgaagtgtttcttttgggtttttttttcccccttttaaaatcaacaggaaatgtttcaaaggagggatgaaatgcttcttggcttcctcagcacttggcaaggtagacctcatagcaaccttgaatatgactttctttagtctctagctatgcactattaagtgcctcttgggtagaggtagagttaagtattgagtgccagtcttgacgtccgtatgcctcagtttttctcatatataaaaagcagtatacatacctacccttttctacctcatcatttgttgtagggattaaatccgggagagcaattctgaagcctataaatttccttgaagagatctaagaacctattatgctcttggtgtaccaagctctggggtatatattcagaatacctcatgttctggaagctgagcactagctcccctttattgcctgcctggcagagcctgtttgattactgcaggcccttttacccatgcttctagtttaggtattctttctttgatatgaggctcttgaccagaaaagagttctttctctaggtgttctgagagaagtttgtaaatttggatagtacattctatcctgataaaaccaccttgctgtggtcttgatgtacaaaaaaaaattttttttttgagacagagtcttactctgtcacccaggctggaatgcagtggcgcaatcttggttcactgcaacccccgcctcctgggttcaagcgatcctcctgcctcaacctctcaagtagctgggactacaggcgtgcaccaccacacctggctaattttgtatttttagtagagacagggtttcaccatgttggccaggctggtcttgaactcctgacctcaggcgatctgcccgccttggcctcccaaagtactgggattacaggcgtgagcaactgctcctggcccaaaacatctctttctacatacacttgagtaggtggcataaaatgcactgtcaatatatagaaaacatgaaattttccaaatatttccgatcagagaatcacaagagcagcaaatgtggtttcatcaagtgggaagaaagcagcaatttaaaataactttttgggagactgaattgagtaataataaaacttcagtctttcgctaataataataataataataataataacaacaacttattgaatgtggccagctcactagatgaggaaagaggaaggcattttctgcattcttgcctagttttccttataagcaccactaagttaatagctctgtctttttggtgtttgcactatgtaatgcttttaatactttttaattgtgcttttttatgtattaaatgtttttccttttgcc

SEQ ID NO: 152085 - DNA, 10008 bp, Homo sapiens
  Payload ID: 9932
  Gene Symbol: MDM4
  Gene Name: MDM4, p53 regulator
  ENST ID: ENST00000391947
  CDS Start-End: 167-589
gtgtgggaggccggaagttgcggcttcattactcgccatttcaaaatgctgccgaggccctaggatctgtgactgccacccctccccccacccgggctcggcgggggagcgactcatggagctgccgtaagttttaccaacagactgcagtttcttcactaccaaaatgacatcattttccacctctgctcagtgttcaacatctgacagtgcttgcaggatctctcctggacaaatcaatcaggtacgaccaaaactgccgcttttgaagattttgcatgcagcaggtgcgcaaggtgaaatgttcactgttaaagaggtcatgcactatttaggtcagtacataatggtgaagcaactttatgatcagcaggagcagcatatggtatattgtggtggagatcttttgggagaactactgggacgtcagagcttctccgtgaaagacccaagccctctctatgatatgctaagaaagaatcttgtcactttagccactgctactacagcaaagtgcagaggaaagttccacttccagaaaaagaactacagaagacgatatccccacactgcctacctcagagcataaatgcatacattctagagaagatgaagacttaattgaaaatttagcccaagatgaaacatctaggctggaccttggatttgaggagtgggatgtagctggcctgccttggtggtttttaggaaacttgagaagcaactatacacctagaagtaatggctcaactgatttacagacaaatcaggatgtgggtactgccattgtttcagatactacagatgacttgtggtttttgaatgagtcagtatcagagcagttaggtgttggaataaaagttgaagctgctgatactgaacaaacaagtgaagaagtagggaaagtaagtgacaaaaaggtgattgaagtgggaaaaaatgatgacctggaggactctaagtccttaagtgatgataccgatgtagaggttacctctgaggatgagtggcagtgtactgaatgcaagaaatttaactctccaagcaagaggtactgttttcgttgttgggccttgaggaaggattggtattcagattgttcaaagttaacccattctctctccacgtctgatatcactgccatacctgaaaaggaaaatgaaggaaatgatgtccctgattgtcgaagaaccatttcggctcctgtcgttagacctaaagatgcgtatataaagaaagaaaactccaaactttttgatccctgcaactcagtggaattcttggatttggctcacagttctgaaagccaagagaccatctcaagcatgggagaacagttagataacctttctgaacagagaacagatacagaaaacatggaggattgccagaatctcttgaagccatgtagcttatgtgagaaaagaccacgagacgggaacattattcatggaaggacgggccatcttgtcacttgttttcactgtgccagaagactaaagaaggctggggcttcatgccctatttgcaagaaagagattcagctggttattaaggtttttatagcataatggtagtacgaacataaaaatgcatttattccgttcacttaccacattatttgaaaatcaatcctttatttaattttatttccaacctgtcagagaatgttcttaggcatcaaaatccaaggtagctgtaagaaaaatactggagctaacaatgaagaacagaagtaatctgattagtcaaattattaagtgccatggattactttatgcagcagtcaggtacatagttaggtgaacccaaaagaaaaactcttgaaaacaagagatttcttccatgcacatttacaatattgaggtataattaacatgataaagtgtttccttctaacgagttgtagaaatctgagtaaccacccaaaaaagcaatagaatgtttctgtcaccccaaaacactcccttctgcccctcttcagacagtccttcagctatttcatggctctcaccctagttttttttttttttgcacttttttttttccgggggtataggggaggtgtggggcgacagggtctgtcttgttctgtctcccaggctgaagtgcagtgcagtggtatgatcatggctcactgcagccttggtttcctgggcataagtggtcttcccacttcagcctcctgagtagctgagactatagactagcataaccacactggctaattttttgtggagatgaagtctcactatgttgcccaggctggtctcgaactcctgggctcaaacaatcctcccgcctcagccttccaaattgctgggattatagtcatgaggcacctagtctggcccttttgcaagactttaatctgaaatctaaatttttaaaatttaagtacttacaaaggatatactatccaacatattgcatattatatatgtgctttaaagtttttttttttttttgagagacggtctcactttgtcatccaagctggagtgcagtggtgcaaacacggcccacctcctgggctcaagtgatcctccagcctcagcttccctcacaggcattcactatcactcccagctaattaaaataatttgtagacggtgtctcgttatgttgcccaggctggtctcgaactcctgggtttaagtgattcccccgcctcagcctcccaaagtgttgggcttacagccttgagccactatgcttggctcaaagatatttttatgaaagccctgggactatagatttagctgattaaatttatagaaaaagtcctgtcatataaactggcaaagtctgttcttaatttaattagccaaatcagacttaacttccgtcagaacatgtcttggttttaattcagataaacacacaaacatacttctctggcacagccttcagaagcatcagtttttgttttgttttgttttgttttttgagacagggtcttgctctgtcgcccaggctggagtgcactggcacaatcacagttcactgcagcctcgacctcccagatccaagcaatcctcccacctaagcctcccaagtagctgggtctataggcgcgtgccaccaccatgcccagctgaattttgtattttttgtacagacagcattttgccatgttgcccaggctggtcccaaacttctagcctcaagcaaccctcctgcctcagcctctcaaagtgctaggattgcagtcctgagctactgccccctaccctctttgcgtcttaggagtcatttagattttttttgatccttttgtttagtgcctctggagctgcttacaccaaggcaatacgccttgatatactggatggttgagaggcagcctctttttttttttttttttttttttttttttggaggatagggagtatggctgttgtgaaaagggaggtaaagagaaatggtagatctgaagaggcctcatcagagcacatattttaggacaacacatatggaaattggacatctttaagttggtttccatagagctatgcatgtatccttacccccatgggaaaatgttggtgtgttctcaagggtatgcatgtgtcattttgaagaccaaggccctagaattgtcaaacttaaggatcataaaaatcatgagggttgcttgttaaaaatgtccaaacgtgcagagactgatctttgagatctggaccaggaatttgcatttgaacaagtgttcctggaatctctatgcaagttttatacagaacatacttttggaatccttgccctagacaggggtgtccaatcttttggcttccctggtccacaatggaagaagaattgtcttggaccacacataaaatacactaacactaacaatagctgatgagctaaaaaaaaaaaaaaaaaaaatcgtggaccgggcgtagtggctcacgcctgtaatcccaacactttgggagatcacctaggtcgggagtttgagaccagcctgaccgacatggagaaaccccatttttactaaaaatacaaaaaattagctgggcatggtggtgcatgcctgtagtcccagctactcaggaggctgaggcaggagaatcgcttgaacctgagagggggagattgcggtgagctgagattgcgccattgcaccccagcctgggcaacaatagcgaaactgtctcagaaaaaagaaaaaaaaaatcgcaaaaagaaaaatctcataatgtcgttgttggtttttttttttttttttgagacagtctcactctgttgcccaggctggagtgcaatggcatgatctctgctcaccgcaacctctgcctcccgggttcaggtgattctcctgcctcagcctcccagatagctgggactacaggcacataccaccatgcctggctaatttttgtatttttagtagagatgggggtttcactgtgttggccaggctggtctcgaactcctgacctcatgatccacacacctcggcctcccaaagtcctgcgattacaggcgtgagctaccgcacccagccaagttgtaatttttaataaaacttaagaagtaaacattttacttatgtttataggtatttgatcctaaatttgacacatcattgcccatgaaagaatcctcttaggctgctcagcttcactcttcctgcttgcccaccggggtttttcactgcttctgttagcactaagtacttagacgatcctaagatatgtgcttgagccgaatttcatctttacttgtaggaaactttaaactatttcttttcttttcttttttttttttttttacttgagatggagttttgctcttgtcgcccaggctggagtgcagtggagtgatctcggctcactgcaacctctgcctcccgggttcaaatgattctcctgcctcagcctcccaagtagctgggattacaggtgtgcaccaccatgtctggctaattttgtatttttagtagagatggtttcaccatgttggtcaggctggtctcgaactcctgacctcaggtcatccacccacctcagcctcgcaaagtgctgagattacaggcatgagccacagcgcccagcttaaactattttcttggtctgtttttgattttcttttttccttgccactgcggtacagattttttttactcactgccactaaactaaagcaaggcatagtttatatgtgaagtgttcagagtttactgctataaggaaacttccaaatactgacatttaccttttagctgtagttattgggaccatgtgctctggttttctggagactgccaaattgctcccatttttctgcatcccacctggtttctttctgcatgtcccctttcactttcaaacctcttcatttggatgttaaattatatggtcacctagttataggtaagccttgttcgagttgatatcttgattgtgaggaaggatctgtgtcattggagcttgtttctgctgcaacgtgctgtagactatgaataatgaaatcacaccacattaccatcagatttcttgttttagttgtcaaattaatatttatgattgttatcttgggcgaaaagttcagagcagagatgacaaatcattagaacaacgatgaatttcagtattacggctaaaaagttcttctgtctgaatattaactcactctccttccagtgtacttcacagtaattggtatgcttttttatttaatgcttaaatcaaactttataaaaatcttagaccagatctttaatatggtatgccatttccccagtctaccaatggaatagtatgggtttctaatcctaggcttgtacaatggattggagttgagccatgccagcctccacactgccactaacttctgtaatgtaagattgagtcactgccaagcatttgaaatatgcagttgtgttttaattataatttatgtatagttagatgtatgtagtgcattgtgtggtattatttggtttgtaagaatttatttttaagggtcaaggtcatttgtaacattttgtgtgtgtcaattcaatgcaatgttggctgccttttgaagtctttgatatattggtgaatattcttctgatctataatacaaagctatgtaatgttacctcttgactcgcttttgaaaggaagacaattgttaactagatatttgagttttttcccctcagaattatgtgaatttctgatatatggctttagatactgtgaatctgttttccatttagtcagttatctgcttaaattgttcagaactatatcctaacgagcaattagttctgatggttctcccagtcatgagtgtgcatgtgtgcaagcatgttttgatcctgatgctacctttgctaaaaatggccatagattaggaactagctatgtttttagaatcaaagatgaaccggtaagctgtctcatgtaccaaacgtgaaatttacagtgtttacaaatgtctggaattttgcactgccatagggaatgttaaggttacttggctggaatttatcagacttgtgagtaaacaagttgaagtttagcagatgagggggaatattgaggcccctaaggctaaacaaaataatcagtatctgagatagtggctaatgtggctccccaggcctaatttgggaacagtttttcctgattgctttgagaagtactttcttttgacagaaattttcattctgcttgccattgctatattctccctttataggagccattggatttctttccttttgtgggaaatgtcccattagcattttcagatcttttgatgtgcactaatgccattattggtaatgccgttattggtgaatacagcatagttaaataaactgttacagtaaatctacacttggatttgctgcacctctaccaatagccttttgaatgactgaaagtgttaacagagaaagaggcatgtctgcagaaagagatagctaatattttttggtactttatctgaaatccaagatgctgcttcccctgcaggttgttttccttcttacgatcctcattgaatcccctctgggagcacaggacagttagtagaactctccatttctttttttttttttttagacggagtctctctctgtcgccccggctggagtgcagtggcgcgatctcggctcactgcaacctccgcctcccgggttcaccccattctcctgcctcagcctccctagtagctgggactataggcgcccgccaccacgcctggctaatttttgtatttttattggagacggggtttcaccgtcttagccaggatggtcttgatctcctgacctcgtgatctgcccacctcagcctcccaaagtactgggattacaggcgtgagccaccgcgcccggccggaactctccatttcttaaggtaaagagggtcaaggatacctaaaaagggtcaaataatgctagaagagcaattcctctttcagagcagttgctgtaatttggcaaatgctttatcgaagattgatattaggctaggggcggtggcttacgcctgtaatcccagcactttgggaggccgaggtgggtggattgcctgagctcaggagttcgagaccagtctgaccagtatggtgaaaccctgtctctactaaaaatacaaaaattagccggtcgtggtggcgtgcacctgtagtcccagctacttggcaggttgagacaggagaatcgcttgaacctgggaggtggaggttgcagtgagccgagactgcaccactgcgctcccacctgggtgacagagactctgtctcaaaaaaaaggacatttatcattataacatcttattagagcccctaatttcttatctgaaggcactgtttttttttttaaacagttaagtactgatgtcaacagacaaatatttctgatcagatagtcccctgtcaacagtagcaaatgtggtttcataaagtgggaagaaaacagcattttaaagtaactttttgggagactgatttgagtaataataaaactctggtctcccttaagaaaaaaaaacccttccacctttactgtgtcatttatatccccttagttccaaagttaattatcttatttctggatattgcttttataccaaagacccttatcagcccttgtaactacagtatctttagataagattcctctttccagtcagtcctgggaaatgtttctgttgcagagttaggcggtagatgggaagctgtgatggcagagctactatctaataaagtaacaactcgtagttgaggcttcctttctgtgtgtgatgggggatagggagttagctcccctgttgtctcagcactaagaaattgaggtcaggccaggcgcggtggttcactcctgttattccagcactggggtggccaaagtgggcagattgcttgcgctctggagctcgagaccagcctgggcaacatggtgaaaccctgtctctaccaaaaatacaaaaaaaaagctgggcatggtgggtgcatgcttgtcccagctactgaggaggctgaggtgggaggatcgcttgagcctgggaggtggaggttgcagtgagctgagatggcaccactgcaatccaaggtgggtgacagagacgctgtctcaaagaaattgaggtcaggcttccttcttacagaattatttttttctctgtagtttgcctcattttttcactttcttttcaatgagaatcgaagtgtttcttttgggtttttttttcccccttttaaaatcaacaggaaatgtttcaaaggagggatgaaatgcttcttggcttcctcagcacttggcaaggtagacctcatagcaaccttgaatatgactttctttagtctctagctatgcactattaagtgcctcttgggtagaggtagagttaagtattgagtgccagtcttgacgtccgtatgcctcagtttttctcatatataaaaagcagtatacatacctacccttttctacctcatcatttgttgtagggattaaatccgggagagcaattctgaagcctataaatttccttgaagagatctaagaacctattatgctcttggtgtaccaagctctggggtatatattcagaatacctcatgttctggaagctgagcactagctcccctttattgcctgcctggcagagcctgtttgattactgcaggcccttttacccatgcttctagtttaggtattctttctttgatatgaggctcttgaccagaaaagagttctttctctaggtgttctgagagaagtttgtaaatttggatagtacattctatcctgataaaaccaccttgctgtggtcttgatgtacaaaaaaaaattttttttttgagacagagtcttactctgtcacccaggctggaatgcagtggcgcaatcttggttcactgcaacccccgcctcctgggttcaagcgatcctcctgcctcaacctctcaagtagctgggactacaggcgtgcaccaccacacctggctaattttgtatttttagtagagacagggtttcaccatgttggccaggctggtcttgaactcctgacctcaggcgatctgcccgccttggcctcccaaagtactgggattacaggcgtgagcaactgctcctggcccaaaacatctctttctacatacacttgagtaggtggcataaaatgcactgtcaatatatagaaaacatgaaattttccaaatatttccgatcagagaatcacaagagcagcaaatgtggtttcatcaagtgggaagaaagcagcaatttaaaataactttttgggagactgaattgagtaataataaaacttcagtctttcgctaataataataataataataataataacaacaacttattgaatgtggccagctcactagatgaggaaagaggaaggcattttctgcattcttgcctagttttccttataagcaccactaagttaatagctctgtctttttggtgtttgcactatgtaatgcttttaatactttttaattgtgcttttttatgtattaaatgtttttccttttgcc

SEQ ID NO: 152086 - DNA, 513 bp, Homo sapiens
  Payload ID: 9932
  Gene Symbol: MDM4
  Gene Name: MDM4, p53 regulator
  ENST ID: ENST00000444261
  CDS Start-End: 1-513
gacttaattgaaaatttagcccaagatgaaacatctaggctggaccttggatttgaggagtgggatgtagctggcctgccttggtggtttttaggaaacttgagaagcaactatacacctagaagtaatggctcaactgatttacagacaaatcaggtgattgaagtgggaaaaaatgatgacctggaggactctaagtccttaagtgatgataccgatgtagaggttacctctgaggatgagtggcagtgtactgaatgcaagaaatttaactctccaagcaagaggtactgttttcgttgttgggccttgaggaaggattggtattcagattgttcaaagttaacccattctctctccacgtctgatatcactgccatacctgaaaaggaaaatgaaggaaatgatgtccctgattgtcgaagaaccatttcggctcctgtcgttagacctaaagatgcgtatataaagaaagaaaactccaaactttttgatccctgcaactcagtggaa

SEQ ID NO: 152087 - DNA, 9926 bp, Homo sapiens
  Payload ID: 9932
  Gene Symbol: MDM4
  Gene Name: MDM4, p53 regulator
  Uniprot ID: O15151
  ENST ID: ENST00000454264
  CDS Start-End: 167-1489
gtgtgggaggccggaagttgcggcttcattactcgccatttcaaaatgctgccgaggccctaggatctgtgactgccacccctccccccacccgggctcggcgggggagcgactcatggagctgccgtaagttttaccaacagactgcagtttcttcactaccaaaatgacatcattttccacctctgctcagtgttcaacatctgacagtgcttgcaggatctctcctggacaaatcaatcaggtacgaccaaaactgccgcttttgaagattttgcatgcagcaggtgcgcaaggtgaaatgttcactgttaaagaggtcatgcactatttaggtcagtacataatggtgaagcaactttatgatcagcaggagcagcatatggtatattgtggtggagatcttttgggagaactactgggacgtcagagcttctccgtgaaagacccaagccctctctatgatatgctaagaaagaatcttgtcactttagccactgctactacagatgctgctcagactctcgctctcgcacaggatcacagtatggatattccaagtcaagaccaactgaagcaaagtgcagaggaaagttccacttccagaaaaagaactacagaagacgatatccccacactgcctacctcagagcataaatgcatacattctagagaagatgaagacttaattgaaaatttagcccaagatgaaacatctaggctggaccttggatttgaggagtgggatgtagctggcctgccttggtggtttttaggaaacttgagaagcaactatacacctagaagtaatggctcaactgatttacagacaaatcaggtgattgaagtgggaaaaaatgatgacctggaggactctaagtccttaagtgatgataccgatgtagaggttacctctgaggatgagtggcagtgtactgaatgcaagaaatttaactctccaagcaagaggtactgttttcgttgttgggccttgaggaaggattggtattcagattgttcaaagttaacccattctctctccacgtctgatatcactgccatacctgaaaaggaaaatgaaggaaatgatgtccctgattgtcgaagaaccatttcggctcctgtcgttagacctaaagatgcgtatataaagaaagaaaactccaaactttttgatccctgcaactcagtggaattcttggatttggctcacagttctgaaagccaagagaccatctcaagcatgggagaacagttagataacctttctgaacagagaacagatacagaaaacatggaggattgccagaatctcttgaagccatgtagcttatgtgagaaaagaccacgagacgggaacattattcatggaaggacgggccatcttgtcacttgttttcactgtgccagaagactaaagaaggctggggcttcatgccctatttgcaagaaagagattcagctggttattaaggtttttatagcataatggtagtacgaacataaaaatgcatttattccgttcacttaccacattatttgaaaatcaatcctttatttaattttatttccaacctgtcagagaatgttcttaggcatcaaaatccaaggtagctgtaagaaaaatactggagctaacaatgaagaacagaagtaatctgattagtcaaattattaagtgccatggattactttatgcagcagtcaggtacatagttaggtgaacccaaaagaaaaactcttgaaaacaagagatttcttccatgcacatttacaatattgaggtataattaacatgataaagtgtttccttctaacgagttgtagaaatctgagtaaccacccaaaaaagcaatagaatgtttctgtcaccccaaaacactcccttctgcccctcttcagacagtccttcagctatttcatggctctcaccctagttttttttttttttgcacttttttttttccgggggtataggggaggtgtggggcgacagggtctgtcttgttctgtctcccaggctgaagtgcagtgcagtggtatgatcatggctcactgcagccttggtttcctgggcataagtggtcttcccacttcagcctcctgagtagctgagactatagactagcataaccacactggctaattttttgtggagatgaagtctcactatgttgcccaggctggtctcgaactcctgggctcaaacaatcctcccgcctcagccttccaaattgctgggattatagtcatgaggcacctagtctggcccttttgcaagactttaatctgaaatctaaatttttaaaatttaagtacttacaaaggatatactatccaacatattgcatattatatatgtgctttaaagtttttttttttttttgagagacggtctcactttgtcatccaagctggagtgcagtggtgcaaacacggcccacctcctgggctcaagtgatcctccagcctcagcttccctcacaggcattcactatcactcccagctaattaaaataatttgtagacggtgtctcgttatgttgcccaggctggtctcgaactcctgggtttaagtgattcccccgcctcagcctcccaaagtgttgggcttacagccttgagccactatgcttggctcaaagatatttttatgaaagccctgggactatagatttagctgattaaatttatagaaaaagtcctgtcatataaactggcaaagtctgttcttaatttaattagccaaatcagacttaacttccgtcagaacatgtcttggttttaattcagataaacacacaaacatacttctctggcacagccttcagaagcatcagtttttgttttgttttgttttgttttttgagacagggtcttgctctgtcgcccaggctggagtgcactggcacaatcacagttcactgcagcctcgacctcccagatccaagcaatcctcccacctaagcctcccaagtagctgggtctataggcgcgtgccaccaccatgcccagctgaattttgtattttttgtacagacagcattttgccatgttgcccaggctggtcccaaacttctagcctcaagcaaccctcctgcctcagcctctcaaagtgctaggattgcagtcctgagctactgccccctaccctctttgcgtcttaggagtcatttagattttttttgatccttttgtttagtgcctctggagctgcttacaccaaggcaatacgccttgatatactggatggttgagaggcagcctctttttttttttttttttttttttttttttggaggatagggagtatggctgttgtgaaaagggaggtaaagagaaatggtagatctgaagaggcctcatcagagcacatattttaggacaacacatatggaaattggacatctttaagttggtttccatagagctatgcatgtatccttacccccatgggaaaatgttggtgtgttctcaagggtatgcatgtgtcattttgaagaccaaggccctagaattgtcaaacttaaggatcataaaaatcatgagggttgcttgttaaaaatgtccaaacgtgcagagactgatctttgagatctggaccaggaatttgcatttgaacaagtgttcctggaatctctatgcaagttttatacagaacatacttttggaatccttgccctagacaggggtgtccaatcttttggcttccctggtccacaatggaagaagaattgtcttggaccacacataaaatacactaacactaacaatagctgatgagctaaaaaaaaaaaaaaaaaaaatcgtggaccgggcgtagtggctcacgcctgtaatcccaacactttgggagatcacctaggtcgggagtttgagaccagcctgaccgacatggagaaaccccatttttactaaaaatacaaaaaattagctgggcatggtggtgcatgcctgtagtcccagctactcaggaggctgaggcaggagaatcgcttgaacctgagagggggagattgcggtgagctgagattgcgccattgcaccccagcctgggcaacaatagcgaaactgtctcagaaaaaagaaaaaaaaaatcgcaaaaagaaaaatctcataatgtcgttgttggtttttttttttttttttgagacagtctcactctgttgcccaggctggagtgcaatggcatgatctctgctcaccgcaacctctgcctcccgggttcaggtgattctcctgcctcagcctcccagatagctgggactacaggcacataccaccatgcctggctaatttttgtatttttagtagagatgggggtttcactgtgttggccaggctggtctcgaactcctgacctcatgatccacacacctcggcctcccaaagtcctgcgattacaggcgtgagctaccgcacccagccaagttgtaatttttaataaaacttaagaagtaaacattttacttatgtttataggtatttgatcctaaatttgacacatcattgcccatgaaagaatcctcttaggctgctcagcttcactcttcctgcttgcccaccggggtttttcactgcttctgttagcactaagtacttagacgatcctaagatatgtgcttgagccgaatttcatctttacttgtaggaaactttaaactatttcttttcttttcttttttttttttttttacttgagatggagttttgctcttgtcgcccaggctggagtgcagtggagtgatctcggctcactgcaacctctgcctcccgggttcaaatgattctcctgcctcagcctcccaagtagctgggattacaggtgtgcaccaccatgtctggctaattttgtatttttagtagagatggtttcaccatgttggtcaggctggtctcgaactcctgacctcaggtcatccacccacctcagcctcgcaaagtgctgagattacaggcatgagccacagcgcccagcttaaactattttcttggtctgtttttgattttcttttttccttgccactgcggtacagattttttttactcactgccactaaactaaagcaaggcatagtttatatgtgaagtgttcagagtttactgctataaggaaacttccaaatactgacatttaccttttagctgtagttattgggaccatgtgctctggttttctggagactgccaaattgctcccatttttctgcatcccacctggtttctttctgcatgtcccctttcactttcaaacctcttcatttggatgttaaattatatggtcacctagttataggtaagccttgttcgagttgatatcttgattgtgaggaaggatctgtgtcattggagcttgtttctgctgcaacgtgctgtagactatgaataatgaaatcacaccacattaccatcagatttcttgttttagttgtcaaattaatatttatgattgttatcttgggcgaaaagttcagagcagagatgacaaatcattagaacaacgatgaatttcagtattacggctaaaaagttcttctgtctgaatattaactcactctccttccagtgtacttcacagtaattggtatgcttttttatttaatgcttaaatcaaactttataaaaatcttagaccagatctttaatatggtatgccatttccccagtctaccaatggaatagtatgggtttctaatcctaggcttgtacaatggattggagttgagccatgccagcctccacactgccactaacttctgtaatgtaagattgagtcactgccaagcatttgaaatatgcagttgtgttttaattataatttatgtatagttagatgtatgtagtgcattgtgtggtattatttggtttgtaagaatttatttttaagggtcaaggtcatttgtaacattttgtgtgtgtcaattcaatgcaatgttggctgccttttgaagtctttgatatattggtgaatattcttctgatctataatacaaagctatgtaatgttacctcttgactcgcttttgaaaggaagacaattgttaactagatatttgagttttttcccctcagaattatgtgaatttctgatatatggctttagatactgtgaatctgttttccatttagtcagttatctgcttaaattgttcagaactatatcctaacgagcaattagttctgatggttctcccagtcatgagtgtgcatgtgtgcaagcatgttttgatcctgatgctacctttgctaaaaatggccatagattaggaactagctatgtttttagaatcaaagatgaaccggtaagctgtctcatgtaccaaacgtgaaatttacagtgtttacaaatgtctggaattttgcactgccatagggaatgttaaggttacttggctggaatttatcagacttgtgagtaaacaagttgaagtttagcagatgagggggaatattgaggcccctaaggctaaacaaaataatcagtatctgagatagtggctaatgtggctccccaggcctaatttgggaacagtttttcctgattgctttgagaagtactttcttttgacagaaattttcattctgcttgccattgctatattctccctttataggagccattggatttctttccttttgtgggaaatgtcccattagcattttcagatcttttgatgtgcactaatgccattattggtaatgccgttattggtgaatacagcatagttaaataaactgttacagtaaatctacacttggatttgctgcacctctaccaatagccttttgaatgactgaaagtgttaacagagaaagaggcatgtctgcagaaagagatagctaatattttttggtactttatctgaaatccaagatgctgcttcccctgcaggttgttttccttcttacgatcctcattgaatcccctctgggagcacaggacagttagtagaactctccatttctttttttttttttttagacggagtctctctctgtcgccccggctggagtgcagtggcgcgatctcggctcactgcaacctccgcctcccgggttcaccccattctcctgcctcagcctccctagtagctgggactataggcgcccgccaccacgcctggctaatttttgtatttttattggagacggggtttcaccgtcttagccaggatggtcttgatctcctgacctcgtgatctgcccacctcagcctcccaaagtactgggattacaggcgtgagccaccgcgcccggccggaactctccatttcttaaggtaaagagggtcaaggatacctaaaaagggtcaaataatgctagaagagcaattcctctttcagagcagttgctgtaatttggcaaatgctttatcgaagattgatattaggctaggggcggtggcttacgcctgtaatcccagcactttgggaggccgaggtgggtggattgcctgagctcaggagttcgagaccagtctgaccagtatggtgaaaccctgtctctactaaaaatacaaaaattagccggtcgtggtggcgtgcacctgtagtcccagctacttggcaggttgagacaggagaatcgcttgaacctgggaggtggaggttgcagtgagccgagactgcaccactgcgctcccacctgggtgacagagactctgtctcaaaaaaaaggacatttatcattataacatcttattagagcccctaatttcttatctgaaggcactgtttttttttttaaacagttaagtactgatgtcaacagacaaatatttctgatcagatagtcccctgtcaacagtagcaaatgtggtttcataaagtgggaagaaaacagcattttaaagtaactttttgggagactgatttgagtaataataaaactctggtctcccttaagaaaaaaaaacccttccacctttactgtgtcatttatatccccttagttccaaagttaattatcttatttctggatattgcttttataccaaagacccttatcagcccttgtaactacagtatctttagataagattcctctttccagtcagtcctgggaaatgtttctgttgcagagttaggcggtagatgggaagctgtgatggcagagctactatctaataaagtaacaactcgtagttgaggcttcctttctgtgtgtgatgggggatagggagttagctcccctgttgtctcagcactaagaaattgaggtcaggccaggcgcggtggttcactcctgttattccagcactggggtggccaaagtgggcagattgcttgcgctctggagctcgagaccagcctgggcaacatggtgaaaccctgtctctaccaaaaatacaaaaaaaaagctgggcatggtgggtgcatgcttgtcccagctactgaggaggctgaggtgggaggatcgcttgagcctgggaggtggaggttgcagtgagctgagatggcaccactgcaatccaaggtgggtgacagagacgctgtctcaaagaaattgaggtcaggcttccttcttacagaattatttttttctctgtagtttgcctcattttttcactttcttttcaatgagaatcgaagtgtttcttttgggtttttttttcccccttttaaaatcaacaggaaatgtttcaaaggagggatgaaatgcttcttggcttcctcagcacttggcaaggtagacctcatagcaaccttgaatatgactttctttagtctctagctatgcactattaagtgcctcttgggtagaggtagagttaagtattgagtgccagtcttgacgtccgtatgcctcagtttttctcatatataaaaagcagtatacatacctacccttttctacctcatcatttgttgtagggattaaatccgggagagcaattctgaagcctataaatttccttgaagagatctaagaacctattatgctcttggtgtaccaagctctggggtatatattcagaatacctcatgttctggaagctgagcactagctcccctttattgcctgcctggcagagcctgtttgattactgcaggcccttttacccatgcttctagtttaggtattctttctttgatatgaggctcttgaccagaaaagagttctttctctaggtgttctgagagaagtttgtaaatttggatagtacattctatcctgataaaaccaccttgctgtggtcttgatgtacaaaaaaaaattttttttttgagacagagtcttactctgtcacccaggctggaatgcagtggcgcaatcttggttcactgcaacccccgcctcctgggttcaagcgatcctcctgcctcaacctctcaagtagctgggactacaggcgtgcaccaccacacctggctaattttgtatttttagtagagacagggtttcaccatgttggccaggctggtcttgaactcctgacctcaggcgatctgcccgccttggcctcccaaagtactgggattacaggcgtgagcaactgctcctggcccaaaacatctctttctacatacacttgagtaggtggcataaaatgcactgtcaatatatagaaaacatgaaattttccaaatatttccgatcagagaatcacaagagcagcaaatgtggtttcatcaagtgggaagaaagcagcaatttaaaataactttttgggagactgaattgagtaataataaaacttcagtctttcgctaataataataataataataataataacaacaacttattgaatgtggccagctcactagatgaggaaagaggaaggcattttctgcattcttgcctagttttccttataagcaccactaagttaatagctctgtctttttggtgtttgcactatgtaatgcttttaatactttttaattgtgcttttttatgtattaaatgtttttccttttgcc

SEQ ID NO: 152088 - DNA, 481 bp, Homo sapiens
  Payload ID: 9932
  Gene Symbol: MDM4
  Gene Name: MDM4, p53 regulator
  ENST ID: ENST00000507825
  CDS Start-End: 1-423
atgacatcattttccacctctgctcagtgttcaacatctgacagtgcttgcaggatctctcctggacaaatcaatcaggtacgaccaaaactgccgcttttgaagattttgcatgcagcaggtgcgcaaggtgaaatgttcactgttaaagaggtcatgcactatttaggtcagtacataatggtgaagcaactttatgatcagcaggagcagcatatggtatattgtggtggagatcttttgggagaactactgggacgtcagagcttctccgtgaaagacccaagccctctctatgatatgctaagaaagaatcttgtcactttagccactgctactacagcaaagtgcagaggaaagttccacttccagaaaaagaactacagaagacgatatccccacactgcctacctcagagcataaatgcatacattctagagaaggtgattgaagtgggaaaaaatgatgacctggaggactc

SEQ ID NO: 152089 - DNA, 9407 bp, Homo sapiens
  Payload ID: 9932
  Gene Symbol: MDM4
  Gene Name: MDM4, p53 regulator
  ENST ID: ENST00000612738
  CDS Start-End: 167-970
gtgtgggaggccggaagttgcggcttcattactcgccatttcaaaatgctgccgaggccctaggatctgtgactgccacccctccccccacccgggctcggcgggggagcgactcatggagctgccgtaagttttaccaacagactgcagtttcttcactaccaaaatgacatcattttccacctctgctcagtgttcaacatctgacagtgcttgcaggatctctcctggacaaatcaatcaggtacgaccaaaactgccgcttttgaagattttgcatgcagcaggtgcgcaaggtgaaatgttcactgttaaagaggtgattgaagtgggaaaaaatgatgacctggaggactctaagtccttaagtgatgataccgatgtagaggttacctctgaggatgagtggcagtgtactgaatgcaagaaatttaactctccaagcaagaggtactgttttcgttgttgggccttgaggaaggattggtattcagattgttcaaagttaacccattctctctccacgtctgatatcactgccatacctgaaaaggaaaatgaaggaaatgatgtccctgattgtcgaagaaccatttcggctcctgtcgttagacctaaagatgcgtatataaagaaagaaaactccaaactttttgatccctgcaactcagtggaattcttggatttggctcacagttctgaaagccaagagaccatctcaagcatgggagaacagttagataacctttctgaacagagaacagatacagaaaacatggaggattgccagaatctcttgaagccatgtagcttatgtgagaaaagaccacgagacgggaacattattcatggaaggacgggccatcttgtcacttgttttcactgtgccagaagactaaagaaggctggggcttcatgccctatttgcaagaaagagattcagctggttattaaggtttttatagcataatggtagtacgaacataaaaatgcatttattccgttcacttaccacattatttgaaaatcaatcctttatttaattttatttccaacctgtcagagaatgttcttaggcatcaaaatccaaggtagctgtaagaaaaatactggagctaacaatgaagaacagaagtaatctgattagtcaaattattaagtgccatggattactttatgcagcagtcaggtacatagttaggtgaacccaaaagaaaaactcttgaaaacaagagatttcttccatgcacatttacaatattgaggtataattaacatgataaagtgtttccttctaacgagttgtagaaatctgagtaaccacccaaaaaagcaatagaatgtttctgtcaccccaaaacactcccttctgcccctcttcagacagtccttcagctatttcatggctctcaccctagttttttttttttttgcacttttttttttccgggggtataggggaggtgtggggcgacagggtctgtcttgttctgtctcccaggctgaagtgcagtgcagtggtatgatcatggctcactgcagccttggtttcctgggcataagtggtcttcccacttcagcctcctgagtagctgagactatagactagcataaccacactggctaattttttgtggagatgaagtctcactatgttgcccaggctggtctcgaactcctgggctcaaacaatcctcccgcctcagccttccaaattgctgggattatagtcatgaggcacctagtctggcccttttgcaagactttaatctgaaatctaaatttttaaaatttaagtacttacaaaggatatactatccaacatattgcatattatatatgtgctttaaagtttttttttttttttgagagacggtctcactttgtcatccaagctggagtgcagtggtgcaaacacggcccacctcctgggctcaagtgatcctccagcctcagcttccctcacaggcattcactatcactcccagctaattaaaataatttgtagacggtgtctcgttatgttgcccaggctggtctcgaactcctgggtttaagtgattcccccgcctcagcctcccaaagtgttgggcttacagccttgagccactatgcttggctcaaagatatttttatgaaagccctgggactatagatttagctgattaaatttatagaaaaagtcctgtcatataaactggcaaagtctgttcttaatttaattagccaaatcagacttaacttccgtcagaacatgtcttggttttaattcagataaacacacaaacatacttctctggcacagccttcagaagcatcagtttttgttttgttttgttttgttttttgagacagggtcttgctctgtcgcccaggctggagtgcactggcacaatcacagttcactgcagcctcgacctcccagatccaagcaatcctcccacctaagcctcccaagtagctgggtctataggcgcgtgccaccaccatgcccagctgaattttgtattttttgtacagacagcattttgccatgttgcccaggctggtcccaaacttctagcctcaagcaaccctcctgcctcagcctctcaaagtgctaggattgcagtcctgagctactgccccctaccctctttgcgtcttaggagtcatttagattttttttgatccttttgtttagtgcctctggagctgcttacaccaaggcaatacgccttgatatactggatggttgagaggcagcctctttttttttttttttttttttttttttttggaggatagggagtatggctgttgtgaaaagggaggtaaagagaaatggtagatctgaagaggcctcatcagagcacatattttaggacaacacatatggaaattggacatctttaagttggtttccatagagctatgcatgtatccttacccccatgggaaaatgttggtgtgttctcaagggtatgcatgtgtcattttgaagaccaaggccctagaattgtcaaacttaaggatcataaaaatcatgagggttgcttgttaaaaatgtccaaacgtgcagagactgatctttgagatctggaccaggaatttgcatttgaacaagtgttcctggaatctctatgcaagttttatacagaacatacttttggaatccttgccctagacaggggtgtccaatcttttggcttccctggtccacaatggaagaagaattgtcttggaccacacataaaatacactaacactaacaatagctgatgagctaaaaaaaaaaaaaaaaaaaatcgtggaccgggcgtagtggctcacgcctgtaatcccaacactttgggagatcacctaggtcgggagtttgagaccagcctgaccgacatggagaaaccccatttttactaaaaatacaaaaaattagctgggcatggtggtgcatgcctgtagtcccagctactcaggaggctgaggcaggagaatcgcttgaacctgagagggggagattgcggtgagctgagattgcgccattgcaccccagcctgggcaacaatagcgaaactgtctcagaaaaaagaaaaaaaaaatcgcaaaaagaaaaatctcataatgtcgttgttggtttttttttttttttttgagacagtctcactctgttgcccaggctggagtgcaatggcatgatctctgctcaccgcaacctctgcctcccgggttcaggtgattctcctgcctcagcctcccagatagctgggactacaggcacataccaccatgcctggctaatttttgtatttttagtagagatgggggtttcactgtgttggccaggctggtctcgaactcctgacctcatgatccacacacctcggcctcccaaagtcctgcgattacaggcgtgagctaccgcacccagccaagttgtaatttttaataaaacttaagaagtaaacattttacttatgtttataggtatttgatcctaaatttgacacatcattgcccatgaaagaatcctcttaggctgctcagcttcactcttcctgcttgcccaccggggtttttcactgcttctgttagcactaagtacttagacgatcctaagatatgtgcttgagccgaatttcatctttacttgtaggaaactttaaactatttcttttcttttcttttttttttttttttacttgagatggagttttgctcttgtcgcccaggctggagtgcagtggagtgatctcggctcactgcaacctctgcctcccgggttcaaatgattctcctgcctcagcctcccaagtagctgggattacaggtgtgcaccaccatgtctggctaattttgtatttttagtagagatggtttcaccatgttggtcaggctggtctcgaactcctgacctcaggtcatccacccacctcagcctcgcaaagtgctgagattacaggcatgagccacagcgcccagcttaaactattttcttggtctgtttttgattttcttttttccttgccactgcggtacagattttttttactcactgccactaaactaaagcaaggcatagtttatatgtgaagtgttcagagtttactgctataaggaaacttccaaatactgacatttaccttttagctgtagttattgggaccatgtgctctggttttctggagactgccaaattgctcccatttttctgcatcccacctggtttctttctgcatgtcccctttcactttcaaacctcttcatttggatgttaaattatatggtcacctagttataggtaagccttgttcgagttgatatcttgattgtgaggaaggatctgtgtcattggagcttgtttctgctgcaacgtgctgtagactatgaataatgaaatcacaccacattaccatcagatttcttgttttagttgtcaaattaatatttatgattgttatcttgggcgaaaagttcagagcagagatgacaaatcattagaacaacgatgaatttcagtattacggctaaaaagttcttctgtctgaatattaactcactctccttccagtgtacttcacagtaattggtatgcttttttatttaatgcttaaatcaaactttataaaaatcttagaccagatctttaatatggtatgccatttccccagtctaccaatggaatagtatgggtttctaatcctaggcttgtacaatggattggagttgagccatgccagcctccacactgccactaacttctgtaatgtaagattgagtcactgccaagcatttgaaatatgcagttgtgttttaattataatttatgtatagttagatgtatgtagtgcattgtgtggtattatttggtttgtaagaatttatttttaagggtcaaggtcatttgtaacattttgtgtgtgtcaattcaatgcaatgttggctgccttttgaagtctttgatatattggtgaatattcttctgatctataatacaaagctatgtaatgttacctcttgactcgcttttgaaaggaagacaattgttaactagatatttgagttttttcccctcagaattatgtgaatttctgatatatggctttagatactgtgaatctgttttccatttagtcagttatctgcttaaattgttcagaactatatcctaacgagcaattagttctgatggttctcccagtcatgagtgtgcatgtgtgcaagcatgttttgatcctgatgctacctttgctaaaaatggccatagattaggaactagctatgtttttagaatcaaagatgaaccggtaagctgtctcatgtaccaaacgtgaaatttacagtgtttacaaatgtctggaattttgcactgccatagggaatgttaaggttacttggctggaatttatcagacttgtgagtaaacaagttgaagtttagcagatgagggggaatattgaggcccctaaggctaaacaaaataatcagtatctgagatagtggctaatgtggctccccaggcctaatttgggaacagtttttcctgattgctttgagaagtactttcttttgacagaaattttcattctgcttgccattgctatattctccctttataggagccattggatttctttccttttgtgggaaatgtcccattagcattttcagatcttttgatgtgcactaatgccattattggtaatgccgttattggtgaatacagcatagttaaataaactgttacagtaaatctacacttggatttgctgcacctctaccaatagccttttgaatgactgaaagtgttaacagagaaagaggcatgtctgcagaaagagatagctaatattttttggtactttatctgaaatccaagatgctgcttcccctgcaggttgttttccttcttacgatcctcattgaatcccctctgggagcacaggacagttagtagaactctccatttctttttttttttttttagacggagtctctctctgtcgccccggctggagtgcagtggcgcgatctcggctcactgcaacctccgcctcccgggttcaccccattctcctgcctcagcctccctagtagctgggactataggcgcccgccaccacgcctggctaatttttgtatttttattggagacggggtttcaccgtcttagccaggatggtcttgatctcctgacctcgtgatctgcccacctcagcctcccaaagtactgggattacaggcgtgagccaccgcgcccggccggaactctccatttcttaaggtaaagagggtcaaggatacctaaaaagggtcaaataatgctagaagagcaattcctctttcagagcagttgctgtaatttggcaaatgctttatcgaagattgatattaggctaggggcggtggcttacgcctgtaatcccagcactttgggaggccgaggtgggtggattgcctgagctcaggagttcgagaccagtctgaccagtatggtgaaaccctgtctctactaaaaatacaaaaattagccggtcgtggtggcgtgcacctgtagtcccagctacttggcaggttgagacaggagaatcgcttgaacctgggaggtggaggttgcagtgagccgagactgcaccactgcgctcccacctgggtgacagagactctgtctcaaaaaaaaggacatttatcattataacatcttattagagcccctaatttcttatctgaaggcactgtttttttttttaaacagttaagtactgatgtcaacagacaaatatttctgatcagatagtcccctgtcaacagtagcaaatgtggtttcataaagtgggaagaaaacagcattttaaagtaactttttgggagactgatttgagtaataataaaactctggtctcccttaagaaaaaaaaacccttccacctttactgtgtcatttatatccccttagttccaaagttaattatcttatttctggatattgcttttataccaaagacccttatcagcccttgtaactacagtatctttagataagattcctctttccagtcagtcctgggaaatgtttctgttgcagagttaggcggtagatgggaagctgtgatggcagagctactatctaataaagtaacaactcgtagttgaggcttcctttctgtgtgtgatgggggatagggagttagctcccctgttgtctcagcactaagaaattgaggtcaggccaggcgcggtggttcactcctgttattccagcactggggtggccaaagtgggcagattgcttgcgctctggagctcgagaccagcctgggcaacatggtgaaaccctgtctctaccaaaaatacaaaaaaaaagctgggcatggtgggtgcatgcttgtcccagctactgaggaggctgaggtgggaggatcgcttgagcctgggaggtggaggttgcagtgagctgagatggcaccactgcaatccaaggtgggtgacagagacgctgtctcaaagaaattgaggtcaggcttccttcttacagaattatttttttctctgtagtttgcctcattttttcactttcttttcaatgagaatcgaagtgtttcttttgggtttttttttcccccttttaaaatcaacaggaaatgtttcaaaggagggatgaaatgcttcttggcttcctcagcacttggcaaggtagacctcatagcaaccttgaatatgactttctttagtctctagctatgcactattaagtgcctcttgggtagaggtagagttaagtattgagtgccagtcttgacgtccgtatgcctcagtttttctcatatataaaaagcagtatacatacctacccttttctacctcatcatttgttgtagggattaaatccgggagagcaattctgaagcctataaatttccttgaagagatctaagaacctattatgctcttggtgtaccaagctctggggtatatattcagaatacctcatgttctggaagctgagcactagctcccctttattgcctgcctggcagagcctgtttgattactgcaggcccttttacccatgcttctagtttaggtattctttctttgatatgaggctcttgaccagaaaagagttctttctctaggtgttctgagagaagtttgtaaatttggatagtacattctatcctgataaaaccaccttgctgtggtcttgatgtacaaaaaaaaattttttttttgagacagagtcttactctgtcacccaggctggaatgcagtggcgcaatcttggttcactgcaacccccgcctcctgggttcaagcgatcctcctgcctcaacctctcaagtagctgggactacaggcgtgcaccaccacacctggctaattttgtatttttagtagagacagggtttcaccatgttggccaggctggtcttgaactcctgacctcaggcgatctgcccgccttggcctcccaaagtactgggattacaggcgtgagcaactgctcctggcccaaaacatctctttctacatacacttgagtaggtggcataaaatgcactgtcaatatatagaaaacatgaaattttccaaatatttccgatcagagaatcacaagagcagcaaatgtggtttcatcaagtgggaagaaagcagcaatttaaaataactttttgggagactgaattgagtaataataaaacttcagtctttcgctaataataataataataataataataacaacaacttattgaatgtggccagctcactagatgaggaaagaggaaggcattttctgcattcttgcctagttttccttataagcaccactaagttaatagctctgtctttttggtgtttgcactatgtaatgcttttaatactttttaattgtgcttttttatgtattaaatgtttttccttttgcc

SEQ ID NO: 152090 - DNA, 9597 bp, Homo sapiens
  Payload ID: 9932
  Gene Symbol: MDM4
  Gene Name: MDM4, p53 regulator
  ENST ID: ENST00000616250
  CDS Start-End: 167-517
gtgtgggaggccggaagttgcggcttcattactcgccatttcaaaatgctgccgaggccctaggatctgtgactgccacccctccccccacccgggctcggcgggggagcgactcatggagctgccgtaagttttaccaacagactgcagtttcttcactaccaaaatgacatcattttccacctctgctcagtgttcaacatctgacagtgcttgcaggatctctcctggacaaatcaatcaggtacgaccaaaactgccgcttttgaagattttgcatgcagcaggtgcgcaaggtgaaatgttcactgttaaagaggtcatgcactatttaggtcagtacataatggtgaagcaactttatgatcagcaggagcagcatatggtatattgtggtggagatcttttgggagaactactgggacgtcagagcttctccgtgaaagacccaagccctctctatgatatgctaagaaagaatcttgtcactttagccactgctactacaggtgattgaagtgggaaaaaatgatgacctggaggactctaagtccttaagtgatgataccgatgtagaggttacctctgaggatgagtggcagtgtactgaatgcaagaaatttaactctccaagcaagaggtactgttttcgttgttgggccttgaggaaggattggtattcagattgttcaaagttaacccattctctctccacgtctgatatcactgccatacctgaaaaggaaaatgaaggaaatgatgtccctgattgtcgaagaaccatttcggctcctgtcgttagacctaaagatgcgtatataaagaaagaaaactccaaactttttgatccctgcaactcagtggaattcttggatttggctcacagttctgaaagccaagagaccatctcaagcatgggagaacagttagataacctttctgaacagagaacagatacagaaaacatggaggattgccagaatctcttgaagccatgtagcttatgtgagaaaagaccacgagacgggaacattattcatggaaggacgggccatcttgtcacttgttttcactgtgccagaagactaaagaaggctggggcttcatgccctatttgcaagaaagagattcagctggttattaaggtttttatagcataatggtagtacgaacataaaaatgcatttattccgttcacttaccacattatttgaaaatcaatcctttatttaattttatttccaacctgtcagagaatgttcttaggcatcaaaatccaaggtagctgtaagaaaaatactggagctaacaatgaagaacagaagtaatctgattagtcaaattattaagtgccatggattactttatgcagcagtcaggtacatagttaggtgaacccaaaagaaaaactcttgaaaacaagagatttcttccatgcacatttacaatattgaggtataattaacatgataaagtgtttccttctaacgagttgtagaaatctgagtaaccacccaaaaaagcaatagaatgtttctgtcaccccaaaacactcccttctgcccctcttcagacagtccttcagctatttcatggctctcaccctagttttttttttttttgcacttttttttttccgggggtataggggaggtgtggggcgacagggtctgtcttgttctgtctcccaggctgaagtgcagtgcagtggtatgatcatggctcactgcagccttggtttcctgggcataagtggtcttcccacttcagcctcctgagtagctgagactatagactagcataaccacactggctaattttttgtggagatgaagtctcactatgttgcccaggctggtctcgaactcctgggctcaaacaatcctcccgcctcagccttccaaattgctgggattatagtcatgaggcacctagtctggcccttttgcaagactttaatctgaaatctaaatttttaaaatttaagtacttacaaaggatatactatccaacatattgcatattatatatgtgctttaaagtttttttttttttttgagagacggtctcactttgtcatccaagctggagtgcagtggtgcaaacacggcccacctcctgggctcaagtgatcctccagcctcagcttccctcacaggcattcactatcactcccagctaattaaaataatttgtagacggtgtctcgttatgttgcccaggctggtctcgaactcctgggtttaagtgattcccccgcctcagcctcccaaagtgttgggcttacagccttgagccactatgcttggctcaaagatatttttatgaaagccctgggactatagatttagctgattaaatttatagaaaaagtcctgtcatataaactggcaaagtctgttcttaatttaattagccaaatcagacttaacttccgtcagaacatgtcttggttttaattcagataaacacacaaacatacttctctggcacagccttcagaagcatcagtttttgttttgttttgttttgttttttgagacagggtcttgctctgtcgcccaggctggagtgcactggcacaatcacagttcactgcagcctcgacctcccagatccaagcaatcctcccacctaagcctcccaagtagctgggtctataggcgcgtgccaccaccatgcccagctgaattttgtattttttgtacagacagcattttgccatgttgcccaggctggtcccaaacttctagcctcaagcaaccctcctgcctcagcctctcaaagtgctaggattgcagtcctgagctactgccccctaccctctttgcgtcttaggagtcatttagattttttttgatccttttgtttagtgcctctggagctgcttacaccaaggcaatacgccttgatatactggatggttgagaggcagcctctttttttttttttttttttttttttttttggaggatagggagtatggctgttgtgaaaagggaggtaaagagaaatggtagatctgaagaggcctcatcagagcacatattttaggacaacacatatggaaattggacatctttaagttggtttccatagagctatgcatgtatccttacccccatgggaaaatgttggtgtgttctcaagggtatgcatgtgtcattttgaagaccaaggccctagaattgtcaaacttaaggatcataaaaatcatgagggttgcttgttaaaaatgtccaaacgtgcagagactgatctttgagatctggaccaggaatttgcatttgaacaagtgttcctggaatctctatgcaagttttatacagaacatacttttggaatccttgccctagacaggggtgtccaatcttttggcttccctggtccacaatggaagaagaattgtcttggaccacacataaaatacactaacactaacaatagctgatgagctaaaaaaaaaaaaaaaaaaaatcgtggaccgggcgtagtggctcacgcctgtaatcccaacactttgggagatcacctaggtcgggagtttgagaccagcctgaccgacatggagaaaccccatttttactaaaaatacaaaaaattagctgggcatggtggtgcatgcctgtagtcccagctactcaggaggctgaggcaggagaatcgcttgaacctgagagggggagattgcggtgagctgagattgcgccattgcaccccagcctgggcaacaatagcgaaactgtctcagaaaaaagaaaaaaaaaatcgcaaaaagaaaaatctcataatgtcgttgttggtttttttttttttttttgagacagtctcactctgttgcccaggctggagtgcaatggcatgatctctgctcaccgcaacctctgcctcccgggttcaggtgattctcctgcctcagcctcccagatagctgggactacaggcacataccaccatgcctggctaatttttgtatttttagtagagatgggggtttcactgtgttggccaggctggtctcgaactcctgacctcatgatccacacacctcggcctcccaaagtcctgcgattacaggcgtgagctaccgcacccagccaagttgtaatttttaataaaacttaagaagtaaacattttacttatgtttataggtatttgatcctaaatttgacacatcattgcccatgaaagaatcctcttaggctgctcagcttcactcttcctgcttgcccaccggggtttttcactgcttctgttagcactaagtacttagacgatcctaagatatgtgcttgagccgaatttcatctttacttgtaggaaactttaaactatttcttttcttttcttttttttttttttttacttgagatggagttttgctcttgtcgcccaggctggagtgcagtggagtgatctcggctcactgcaacctctgcctcccgggttcaaatgattctcctgcctcagcctcccaagtagctgggattacaggtgtgcaccaccatgtctggctaattttgtatttttagtagagatggtttcaccatgttggtcaggctggtctcgaactcctgacctcaggtcatccacccacctcagcctcgcaaagtgctgagattacaggcatgagccacagcgcccagcttaaactattttcttggtctgtttttgattttcttttttccttgccactgcggtacagattttttttactcactgccactaaactaaagcaaggcatagtttatatgtgaagtgttcagagtttactgctataaggaaacttccaaatactgacatttaccttttagctgtagttattgggaccatgtgctctggttttctggagactgccaaattgctcccatttttctgcatcccacctggtttctttctgcatgtcccctttcactttcaaacctcttcatttggatgttaaattatatggtcacctagttataggtaagccttgttcgagttgatatcttgattgtgaggaaggatctgtgtcattggagcttgtttctgctgcaacgtgctgtagactatgaataatgaaatcacaccacattaccatcagatttcttgttttagttgtcaaattaatatttatgattgttatcttgggcgaaaagttcagagcagagatgacaaatcattagaacaacgatgaatttcagtattacggctaaaaagttcttctgtctgaatattaactcactctccttccagtgtacttcacagtaattggtatgcttttttatttaatgcttaaatcaaactttataaaaatcttagaccagatctttaatatggtatgccatttccccagtctaccaatggaatagtatgggtttctaatcctaggcttgtacaatggattggagttgagccatgccagcctccacactgccactaacttctgtaatgtaagattgagtcactgccaagcatttgaaatatgcagttgtgttttaattataatttatgtatagttagatgtatgtagtgcattgtgtggtattatttggtttgtaagaatttatttttaagggtcaaggtcatttgtaacattttgtgtgtgtcaattcaatgcaatgttggctgccttttgaagtctttgatatattggtgaatattcttctgatctataatacaaagctatgtaatgttacctcttgactcgcttttgaaaggaagacaattgttaactagatatttgagttttttcccctcagaattatgtgaatttctgatatatggctttagatactgtgaatctgttttccatttagtcagttatctgcttaaattgttcagaactatatcctaacgagcaattagttctgatggttctcccagtcatgagtgtgcatgtgtgcaagcatgttttgatcctgatgctacctttgctaaaaatggccatagattaggaactagctatgtttttagaatcaaagatgaaccggtaagctgtctcatgtaccaaacgtgaaatttacagtgtttacaaatgtctggaattttgcactgccatagggaatgttaaggttacttggctggaatttatcagacttgtgagtaaacaagttgaagtttagcagatgagggggaatattgaggcccctaaggctaaacaaaataatcagtatctgagatagtggctaatgtggctccccaggcctaatttgggaacagtttttcctgattgctttgagaagtactttcttttgacagaaattttcattctgcttgccattgctatattctccctttataggagccattggatttctttccttttgtgggaaatgtcccattagcattttcagatcttttgatgtgcactaatgccattattggtaatgccgttattggtgaatacagcatagttaaataaactgttacagtaaatctacacttggatttgctgcacctctaccaatagccttttgaatgactgaaagtgttaacagagaaagaggcatgtctgcagaaagagatagctaatattttttggtactttatctgaaatccaagatgctgcttcccctgcaggttgttttccttcttacgatcctcattgaatcccctctgggagcacaggacagttagtagaactctccatttctttttttttttttttagacggagtctctctctgtcgccccggctggagtgcagtggcgcgatctcggctcactgcaacctccgcctcccgggttcaccccattctcctgcctcagcctccctagtagctgggactataggcgcccgccaccacgcctggctaatttttgtatttttattggagacggggtttcaccgtcttagccaggatggtcttgatctcctgacctcgtgatctgcccacctcagcctcccaaagtactgggattacaggcgtgagccaccgcgcccggccggaactctccatttcttaaggtaaagagggtcaaggatacctaaaaagggtcaaataatgctagaagagcaattcctctttcagagcagttgctgtaatttggcaaatgctttatcgaagattgatattaggctaggggcggtggcttacgcctgtaatcccagcactttgggaggccgaggtgggtggattgcctgagctcaggagttcgagaccagtctgaccagtatggtgaaaccctgtctctactaaaaatacaaaaattagccggtcgtggtggcgtgcacctgtagtcccagctacttggcaggttgagacaggagaatcgcttgaacctgggaggtggaggttgcagtgagccgagactgcaccactgcgctcccacctgggtgacagagactctgtctcaaaaaaaaggacatttatcattataacatcttattagagcccctaatttcttatctgaaggcactgtttttttttttaaacagttaagtactgatgtcaacagacaaatatttctgatcagatagtcccctgtcaacagtagcaaatgtggtttcataaagtgggaagaaaacagcattttaaagtaactttttgggagactgatttgagtaataataaaactctggtctcccttaagaaaaaaaaacccttccacctttactgtgtcatttatatccccttagttccaaagttaattatcttatttctggatattgcttttataccaaagacccttatcagcccttgtaactacagtatctttagataagattcctctttccagtcagtcctgggaaatgtttctgttgcagagttaggcggtagatgggaagctgtgatggcagagctactatctaataaagtaacaactcgtagttgaggcttcctttctgtgtgtgatgggggatagggagttagctcccctgttgtctcagcactaagaaattgaggtcaggccaggcgcggtggttcactcctgttattccagcactggggtggccaaagtgggcagattgcttgcgctctggagctcgagaccagcctgggcaacatggtgaaaccctgtctctaccaaaaatacaaaaaaaaagctgggcatggtgggtgcatgcttgtcccagctactgaggaggctgaggtgggaggatcgcttgagcctgggaggtggaggttgcagtgagctgagatggcaccactgcaatccaaggtgggtgacagagacgctgtctcaaagaaattgaggtcaggcttccttcttacagaattatttttttctctgtagtttgcctcattttttcactttcttttcaatgagaatcgaagtgtttcttttgggtttttttttcccccttttaaaatcaacaggaaatgtttcaaaggagggatgaaatgcttcttggcttcctcagcacttggcaaggtagacctcatagcaaccttgaatatgactttctttagtctctagctatgcactattaagtgcctcttgggtagaggtagagttaagtattgagtgccagtcttgacgtccgtatgcctcagtttttctcatatataaaaagcagtatacatacctacccttttctacctcatcatttgttgtagggattaaatccgggagagcaattctgaagcctataaatttccttgaagagatctaagaacctattatgctcttggtgtaccaagctctggggtatatattcagaatacctcatgttctggaagctgagcactagctcccctttattgcctgcctggcagagcctgtttgattactgcaggcccttttacccatgcttctagtttaggtattctttctttgatatgaggctcttgaccagaaaagagttctttctctaggtgttctgagagaagtttgtaaatttggatagtacattctatcctgataaaaccaccttgctgtggtcttgatgtacaaaaaaaaattttttttttgagacagagtcttactctgtcacccaggctggaatgcagtggcgcaatcttggttcactgcaacccccgcctcctgggttcaagcgatcctcctgcctcaacctctcaagtagctgggactacaggcgtgcaccaccacacctggctaattttgtatttttagtagagacagggtttcaccatgttggccaggctggtcttgaactcctgacctcaggcgatctgcccgccttggcctcccaaagtactgggattacaggcgtgagcaactgctcctggcccaaaacatctctttctacatacacttgagtaggtggcataaaatgcactgtcaatatatagaaaacatgaaattttccaaatatttccgatcagagaatcacaagagcagcaaatgtggtttcatcaagtgggaagaaagcagcaatttaaaataactttttgggagactgaattgagtaataataaaacttcagtctttcgctaataataataataataataataataacaacaacttattgaatgtggccagctcactagatgaggaaagaggaaggcattttctgcattcttgcctagttttccttataagcaccactaagttaatagctctgtctttttggtgtttgcactatgtaatgcttttaatactttttaattgtgcttttttatgtattaaatgtttttccttttgcc

SEQ ID NO: 152091 - DNA, 9782 bp, Homo sapiens
  Payload ID: 9932
  Gene Symbol: MDM4
  Gene Name: MDM4, p53 regulator
  ENST ID: ENST00000614459
  CDS Start-End: 167-1345
gtgtgggaggccggaagttgcggcttcattactcgccatttcaaaatgctgccgaggccctaggatctgtgactgccacccctccccccacccgggctcggcgggggagcgactcatggagctgccgtaagttttaccaacagactgcagtttcttcactaccaaaatgacatcattttccacctctgctcagtgttcaacatctgacagtgcttgcaggatctctcctggacaaatcaatcaggatcacagtatggatattccaagtcaagaccaactgaagcaaagtgcagaggaaagttccacttccagaaaaagaactacagaagacgatatccccacactgcctacctcagagcataaatgcatacattctagagaagatgaagacttaattgaaaatttagcccaagatgaaacatctaggctggaccttggatttgaggagtgggatgtagctggcctgccttggtggtttttaggaaacttgagaagcaactatacacctagaagtaatggctcaactgatttacagacaaatcaggatgtgggtactgccattgtttcagatactacagatgacttgtggtttttgaatgagtcagtatcagagcagttaggtgttggaataaaagttgaagctgctgatactgaacaaacaagtgaagaagtagggaaagtaagtgacaaaaaggtgattgaagtgggaaaaaatgatgacctggaggactctaagtccttaagtgatgataccgatgtagaggttacctctgaggatgagtggcagtgtactgaatgcaagaaatttaactctccaagcaagaggtactgttttcgttgttgggccttgaggaaggattggtattcagattgttcaaagttaacccattctctctccacgtctgatatcactgccatacctgaaaaggaaaatgaaggaaatgatgtccctgattgtcgaagaaccatttcggctcctgtcgttagacctaaagatgcgtatataaagaaagaaaactccaaactttttgatccctgcaactcagtggaattcttggatttggctcacagttctgaaagccaagagaccatctcaagcatgggagaacagttagataacctttctgaacagagaacagatacagaaaacatggaggattgccagaatctcttgaagccatgtagcttatgtgagaaaagaccacgagacgggaacattattcatggaaggacgggccatcttgtcacttgttttcactgtgccagaagactaaagaaggctggggcttcatgccctatttgcaagaaagagattcagctggttattaaggtttttatagcataatggtagtacgaacataaaaatgcatttattccgttcacttaccacattatttgaaaatcaatcctttatttaattttatttccaacctgtcagagaatgttcttaggcatcaaaatccaaggtagctgtaagaaaaatactggagctaacaatgaagaacagaagtaatctgattagtcaaattattaagtgccatggattactttatgcagcagtcaggtacatagttaggtgaacccaaaagaaaaactcttgaaaacaagagatttcttccatgcacatttacaatattgaggtataattaacatgataaagtgtttccttctaacgagttgtagaaatctgagtaaccacccaaaaaagcaatagaatgtttctgtcaccccaaaacactcccttctgcccctcttcagacagtccttcagctatttcatggctctcaccctagttttttttttttttgcacttttttttttccgggggtataggggaggtgtggggcgacagggtctgtcttgttctgtctcccaggctgaagtgcagtgcagtggtatgatcatggctcactgcagccttggtttcctgggcataagtggtcttcccacttcagcctcctgagtagctgagactatagactagcataaccacactggctaattttttgtggagatgaagtctcactatgttgcccaggctggtctcgaactcctgggctcaaacaatcctcccgcctcagccttccaaattgctgggattatagtcatgaggcacctagtctggcccttttgcaagactttaatctgaaatctaaatttttaaaatttaagtacttacaaaggatatactatccaacatattgcatattatatatgtgctttaaagtttttttttttttttgagagacggtctcactttgtcatccaagctggagtgcagtggtgcaaacacggcccacctcctgggctcaagtgatcctccagcctcagcttccctcacaggcattcactatcactcccagctaattaaaataatttgtagacggtgtctcgttatgttgcccaggctggtctcgaactcctgggtttaagtgattcccccgcctcagcctcccaaagtgttgggcttacagccttgagccactatgcttggctcaaagatatttttatgaaagccctgggactatagatttagctgattaaatttatagaaaaagtcctgtcatataaactggcaaagtctgttcttaatttaattagccaaatcagacttaacttccgtcagaacatgtcttggttttaattcagataaacacacaaacatacttctctggcacagccttcagaagcatcagtttttgttttgttttgttttgttttttgagacagggtcttgctctgtcgcccaggctggagtgcactggcacaatcacagttcactgcagcctcgacctcccagatccaagcaatcctcccacctaagcctcccaagtagctgggtctataggcgcgtgccaccaccatgcccagctgaattttgtattttttgtacagacagcattttgccatgttgcccaggctggtcccaaacttctagcctcaagcaaccctcctgcctcagcctctcaaagtgctaggattgcagtcctgagctactgccccctaccctctttgcgtcttaggagtcatttagattttttttgatccttttgtttagtgcctctggagctgcttacaccaaggcaatacgccttgatatactggatggttgagaggcagcctctttttttttttttttttttttttttttttggaggatagggagtatggctgttgtgaaaagggaggtaaagagaaatggtagatctgaagaggcctcatcagagcacatattttaggacaacacatatggaaattggacatctttaagttggtttccatagagctatgcatgtatccttacccccatgggaaaatgttggtgtgttctcaagggtatgcatgtgtcattttgaagaccaaggccctagaattgtcaaacttaaggatcataaaaatcatgagggttgcttgttaaaaatgtccaaacgtgcagagactgatctttgagatctggaccaggaatttgcatttgaacaagtgttcctggaatctctatgcaagttttatacagaacatacttttggaatccttgccctagacaggggtgtccaatcttttggcttccctggtccacaatggaagaagaattgtcttggaccacacataaaatacactaacactaacaatagctgatgagctaaaaaaaaaaaaaaaaaaaatcgtggaccgggcgtagtggctcacgcctgtaatcccaacactttgggagatcacctaggtcgggagtttgagaccagcctgaccgacatggagaaaccccatttttactaaaaatacaaaaaattagctgggcatggtggtgcatgcctgtagtcccagctactcaggaggctgaggcaggagaatcgcttgaacctgagagggggagattgcggtgagctgagattgcgccattgcaccccagcctgggcaacaatagcgaaactgtctcagaaaaaagaaaaaaaaaatcgcaaaaagaaaaatctcataatgtcgttgttggtttttttttttttttttgagacagtctcactctgttgcccaggctggagtgcaatggcatgatctctgctcaccgcaacctctgcctcccgggttcaggtgattctcctgcctcagcctcccagatagctgggactacaggcacataccaccatgcctggctaatttttgtatttttagtagagatgggggtttcactgtgttggccaggctggtctcgaactcctgacctcatgatccacacacctcggcctcccaaagtcctgcgattacaggcgtgagctaccgcacccagccaagttgtaatttttaataaaacttaagaagtaaacattttacttatgtttataggtatttgatcctaaatttgacacatcattgcccatgaaagaatcctcttaggctgctcagcttcactcttcctgcttgcccaccggggtttttcactgcttctgttagcactaagtacttagacgatcctaagatatgtgcttgagccgaatttcatctttacttgtaggaaactttaaactatttcttttcttttcttttttttttttttttacttgagatggagttttgctcttgtcgcccaggctggagtgcagtggagtgatctcggctcactgcaacctctgcctcccgggttcaaatgattctcctgcctcagcctcccaagtagctgggattacaggtgtgcaccaccatgtctggctaattttgtatttttagtagagatggtttcaccatgttggtcaggctggtctcgaactcctgacctcaggtcatccacccacctcagcctcgcaaagtgctgagattacaggcatgagccacagcgcccagcttaaactattttcttggtctgtttttgattttcttttttccttgccactgcggtacagattttttttactcactgccactaaactaaagcaaggcatagtttatatgtgaagtgttcagagtttactgctataaggaaacttccaaatactgacatttaccttttagctgtagttattgggaccatgtgctctggttttctggagactgccaaattgctcccatttttctgcatcccacctggtttctttctgcatgtcccctttcactttcaaacctcttcatttggatgttaaattatatggtcacctagttataggtaagccttgttcgagttgatatcttgattgtgaggaaggatctgtgtcattggagcttgtttctgctgcaacgtgctgtagactatgaataatgaaatcacaccacattaccatcagatttcttgttttagttgtcaaattaatatttatgattgttatcttgggcgaaaagttcagagcagagatgacaaatcattagaacaacgatgaatttcagtattacggctaaaaagttcttctgtctgaatattaactcactctccttccagtgtacttcacagtaattggtatgcttttttatttaatgcttaaatcaaactttataaaaatcttagaccagatctttaatatggtatgccatttccccagtctaccaatggaatagtatgggtttctaatcctaggcttgtacaatggattggagttgagccatgccagcctccacactgccactaacttctgtaatgtaagattgagtcactgccaagcatttgaaatatgcagttgtgttttaattataatttatgtatagttagatgtatgtagtgcattgtgtggtattatttggtttgtaagaatttatttttaagggtcaaggtcatttgtaacattttgtgtgtgtcaattcaatgcaatgttggctgccttttgaagtctttgatatattggtgaatattcttctgatctataatacaaagctatgtaatgttacctcttgactcgcttttgaaaggaagacaattgttaactagatatttgagttttttcccctcagaattatgtgaatttctgatatatggctttagatactgtgaatctgttttccatttagtcagttatctgcttaaattgttcagaactatatcctaacgagcaattagttctgatggttctcccagtcatgagtgtgcatgtgtgcaagcatgttttgatcctgatgctacctttgctaaaaatggccatagattaggaactagctatgtttttagaatcaaagatgaaccggtaagctgtctcatgtaccaaacgtgaaatttacagtgtttacaaatgtctggaattttgcactgccatagggaatgttaaggttacttggctggaatttatcagacttgtgagtaaacaagttgaagtttagcagatgagggggaatattgaggcccctaaggctaaacaaaataatcagtatctgagatagtggctaatgtggctccccaggcctaatttgggaacagtttttcctgattgctttgagaagtactttcttttgacagaaattttcattctgcttgccattgctatattctccctttataggagccattggatttctttccttttgtgggaaatgtcccattagcattttcagatcttttgatgtgcactaatgccattattggtaatgccgttattggtgaatacagcatagttaaataaactgttacagtaaatctacacttggatttgctgcacctctaccaatagccttttgaatgactgaaagtgttaacagagaaagaggcatgtctgcagaaagagatagctaatattttttggtactttatctgaaatccaagatgctgcttcccctgcaggttgttttccttcttacgatcctcattgaatcccctctgggagcacaggacagttagtagaactctccatttctttttttttttttttagacggagtctctctctgtcgccccggctggagtgcagtggcgcgatctcggctcactgcaacctccgcctcccgggttcaccccattctcctgcctcagcctccctagtagctgggactataggcgcccgccaccacgcctggctaatttttgtatttttattggagacggggtttcaccgtcttagccaggatggtcttgatctcctgacctcgtgatctgcccacctcagcctcccaaagtactgggattacaggcgtgagccaccgcgcccggccggaactctccatttcttaaggtaaagagggtcaaggatacctaaaaagggtcaaataatgctagaagagcaattcctctttcagagcagttgctgtaatttggcaaatgctttatcgaagattgatattaggctaggggcggtggcttacgcctgtaatcccagcactttgggaggccgaggtgggtggattgcctgagctcaggagttcgagaccagtctgaccagtatggtgaaaccctgtctctactaaaaatacaaaaattagccggtcgtggtggcgtgcacctgtagtcccagctacttggcaggttgagacaggagaatcgcttgaacctgggaggtggaggttgcagtgagccgagactgcaccactgcgctcccacctgggtgacagagactctgtctcaaaaaaaaggacatttatcattataacatcttattagagcccctaatttcttatctgaaggcactgtttttttttttaaacagttaagtactgatgtcaacagacaaatatttctgatcagatagtcccctgtcaacagtagcaaatgtggtttcataaagtgggaagaaaacagcattttaaagtaactttttgggagactgatttgagtaataataaaactctggtctcccttaagaaaaaaaaacccttccacctttactgtgtcatttatatccccttagttccaaagttaattatcttatttctggatattgcttttataccaaagacccttatcagcccttgtaactacagtatctttagataagattcctctttccagtcagtcctgggaaatgtttctgttgcagagttaggcggtagatgggaagctgtgatggcagagctactatctaataaagtaacaactcgtagttgaggcttcctttctgtgtgtgatgggggatagggagttagctcccctgttgtctcagcactaagaaattgaggtcaggccaggcgcggtggttcactcctgttattccagcactggggtggccaaagtgggcagattgcttgcgctctggagctcgagaccagcctgggcaacatggtgaaaccctgtctctaccaaaaatacaaaaaaaaagctgggcatggtgggtgcatgcttgtcccagctactgaggaggctgaggtgggaggatcgcttgagcctgggaggtggaggttgcagtgagctgagatggcaccactgcaatccaaggtgggtgacagagacgctgtctcaaagaaattgaggtcaggcttccttcttacagaattatttttttctctgtagtttgcctcattttttcactttcttttcaatgagaatcgaagtgtttcttttgggtttttttttcccccttttaaaatcaacaggaaatgtttcaaaggagggatgaaatgcttcttggcttcctcagcacttggcaaggtagacctcatagcaaccttgaatatgactttctttagtctctagctatgcactattaagtgcctcttgggtagaggtagagttaagtattgagtgccagtcttgacgtccgtatgcctcagtttttctcatatataaaaagcagtatacatacctacccttttctacctcatcatttgttgtagggattaaatccgggagagcaattctgaagcctataaatttccttgaagagatctaagaacctattatgctcttggtgtaccaagctctggggtatatattcagaatacctcatgttctggaagctgagcactagctcccctttattgcctgcctggcagagcctgtttgattactgcaggcccttttacccatgcttctagtttaggtattctttctttgatatgaggctcttgaccagaaaagagttctttctctaggtgttctgagagaagtttgtaaatttggatagtacattctatcctgataaaaccaccttgctgtggtcttgatgtacaaaaaaaaattttttttttgagacagagtcttactctgtcacccaggctggaatgcagtggcgcaatcttggttcactgcaacccccgcctcctgggttcaagcgatcctcctgcctcaacctctcaagtagctgggactacaggcgtgcaccaccacacctggctaattttgtatttttagtagagacagggtttcaccatgttggccaggctggtcttgaactcctgacctcaggcgatctgcccgccttggcctcccaaagtactgggattacaggcgtgagcaactgctcctggcccaaaacatctctttctacatacacttgagtaggtggcataaaatgcactgtcaatatatagaaaacatgaaattttccaaatatttccgatcagagaatcacaagagcagcaaatgtggtttcatcaagtgggaagaaagcagcaatttaaaataactttttgggagactgaattgagtaataataaaacttcagtctttcgctaataataataataataataataataacaacaacttattgaatgtggccagctcactagatgaggaaagaggaaggcattttctgcattcttgcctagttttccttataagcaccactaagttaatagctctgtctttttggtgtttgcactatgtaatgcttttaatactttttaattgtgcttttttatgtattaaatgtttttccttttgcc

SEQ ID NO: 152092 - DNA, 5592 bp, Homo sapiens
  Payload ID: 9932
  Gene Symbol: MDM4
  Gene Name: MDM4, p53 regulator
  ENST ID: ENST00000621032
  CDS Start-End: 140-601
attactcgccatttcaaaatgctgccgaggccctaggatctgtgactgccacccctccccccacccgggctcggcgggggagcgactcatggagctgccgtaagttttaccaacagactgcagtttcttcactaccaaaatgacatcattttccacctctgctcagtgttcaacatctgacagtgcttgcaggatctctcctggacaaatcaatcaggtacgaccaaaactgccgcttttgaagattttgcatgcagcaggtgcgcaaggtgaaatgttcactgttaaagaggtcatgcactatttaggtcagtacataatggtgaagcaactttatgatcagcaggagcagcatatggtatattgtggtggagatcttttgggagaactactgggacgtcagagcttctccgtgaaagacccaagccctctctatgatatgctaagaaagaatcttgtcactttagccactgctactacaggatcacagtatggatattccaagtcaagaccaactgaagcaaagtgcagaggaaagttccacttccagaaaaagaactacagaagacgatatccccacactgcctacctcagagcataaatgcatacattctagagaagatgaagacttaattgaaaatttagcccaagatgaaacatctaggctggaccttggatttgaggagtgggatgtagctggcctgccttggtggtttttaggaaacttgagaagcaactatacacctagaagtaatggctcaactgatttacagacaaatcaggatgtgggtactgccattgtttcagatactacagatgacttgtggtttttgaatgagtcagtatcagagcagttaggtgttggaataaaagttgaagctgctgatactgaacaaacaagtgaagaagtagggaaagtaagtgacaaaaaggtgattgaagtgggaaaaaatgatgacctggaggactctaagtccttaagtgatgataccgatgtagaggttacctctgaggatgagtggcagtgtactgaatgcaagaaatttaactctccaagcaagaggtactgttttcgttgttgggccttgaggaaggattggtattcagattgttcaaagttaacccattctctctccacgtctgatatcactgccatacctgaaaaggaaaatgaaggaaatgatgtccctgattgtcgaagaaccatttcggctcctgtcgttagacctaaagatgcgtatataaagaaagaaaactccaaactttttgatccctgcaactcagtggaattcttggatttggctcacagttctgaaagccaagagaccatctcaagcatgggagaacagttagataacctttctgaacagagaacagatacagaaaacatggaggattgccagaatctcttgaagccatgtagcttatgtgagaaaagaccacgagacgggaacattattcatggaaggacgggccatcttgtcacttgttttcactgtgccagaagactaaagaaggctggggcttcatgccctatttgcaagaaagagattcagctggttattaaggtttttatagcataatggtagtacgaacataaaaatgcatttattccgttcacttaccacattatttgaaaatcaatcctttatttaattttatttccaacctgtcagagaatgttcttaggcatcaaaatccaaggtagctgtaagaaaaatactggagctaacaatgaagaacagaagtaatctgattagtcaaattattaagtgccatggattactttatgcagcagtcaggtacatagttaggtgaacccaaaagaaaaactcttgaaaacaagagatttcttccatgcacatttacaatattgaggtataattaacatgataaagtgtttccttctaacgagttgtagaaatctgagtaaccacccaaaaaagcaatagaatgtttctgtcaccccaaaacactcccttctgcccctcttcagacagtccttcagctatttcatggctctcaccctagttttttttttttttgcacttttttttttccgggggtataggggaggtgtggggcgacagggtctgtcttgttctgtctcccaggctgaagtgcagtgcagtggtatgatcatggctcactgcagccttggtttcctgggcataagtggtcttcccacttcagcctcctgagtagctgagactatagactagcataaccacactggctaattttttgtggagatgaagtctcactatgttgcccaggctggtctcgaactcctgggctcaaacaatcctcccgcctcagccttccaaattgctgggattatagtcatgaggcacctagtctggcccttttgcaagactttaatctgaaatctaaatttttaaaatttaagtacttacaaaggatatactatccaacatattgcatattatatatgtgctttaaagtttttttttttttttgagagacggtctcactttgtcatccaagctggagtgcagtggtgcaaacacggcccacctcctgggctcaagtgatcctccagcctcagcttccctcacaggcattcactatcactcccagctaattaaaataatttgtagacggtgtctcgttatgttgcccaggctggtctcgaactcctgggtttaagtgattcccccgcctcagcctcccaaagtgttgggcttacagccttgagccactatgcttggctcaaagatatttttatgaaagccctgggactatagatttagctgattaaatttatagaaaaagtcctgtcatataaactggcaaagtctgttcttaatttaattagccaaatcagacttaacttccgtcagaacatgtcttggttttaattcagataaacacacaaacatacttctctggcacagccttcagaagcatcagtttttgttttgttttgttttgttttttgagacagggtcttgctctgtcgcccaggctggagtgcactggcacaatcacagttcactgcagcctcgacctcccagatccaagcaatcctcccacctaagcctcccaagtagctgggtctataggcgcgtgccaccaccatgcccagctgaattttgtattttttgtacagacagcattttgccatgttgcccaggctggtcccaaacttctagcctcaagcaaccctcctgcctcagcctctcaaagtgctaggattgcagtcctgagctactgccccctaccctctttgcgtcttaggagtcatttagattttttttgatccttttgtttagtgcctctggagctgcttacaccaaggcaatacgccttgatatactggatggttgagaggcagcctctttttttttttttttttttttttttttttggaggatagggagtatggctgttgtgaaaagggaggtaaagagaaatggtagatctgaagaggcctcatcagagcacatattttaggacaacacatatggaaattggacatctttaagttggtttccatagagctatgcatgtatccttacccccatgggaaaatgttggtgtgttctcaagggtatgcatgtgtcattttgaagaccaaggccctagaattgtcaaacttaaggatcataaaaatcatgagggttgcttgttaaaaatgtccaaacgtgcagagactgatctttgagatctggaccaggaatttgcatttgaacaagtgttcctggaatctctatgcaagttttatacagaacatacttttggaatccttgccctagacaggggtgtccaatcttttggcttccctggtccacaatggaagaagaattgtcttggaccacacataaaatacactaacactaacaatagctgatgagctaaaaaaaaaaaaaaaaaaaatcgtggaccgggcgtagtggctcacgcctggtctcgaactcctgacctcatgatccacacacctcggcctcccaaagtcctgcgattacaggcgtgagctaccgcacccagccaagttgtaatttttaataaaacttaagaagtaaacattttacttatgtttataggtatttgatcctaaatttgacacatcattgcccatgaaagaatcctcttaggctgctcagcttcactcttcctgcttgcccaccggggtttttcactgcttctgttagcactaagtacttagacgatcctaagatatgtgcttgagccgaatttcatctttacttgtaggaaactttaaactatttcttttcttttcttttttttttttttttacttgagatggagttttgctcttgtcgcccaggctggagtgcagtggagtgatctcggctcactgcaacctctgcctcccgggttcaaatgattctcctgcctcagcctcccaagtagctgggattacaggtgtgcaccaccatgtctggctaattttgtatttttagtagagatggtttcaccatgttggtcaggctggtctcgaactcctgacctcaggtcatccacccacctcagcctcgcaaagtgctgagattacaggcatgagccacagcgcccagcttaaactattttcttggtctgtttttgattttcttttttccttgccactgcggtacagattttttttactcactgccactaaactaaagcaaggcatagtttatatgtgaagtgttcagagtttactgctataaggaaacttccaaatactgacatttaccttttagctgtagttattgggaccatgtgctctggttttctggagactgccaaattgctcccatttttctgcatcccacctggtttctttctgcatgtcccctttcactttcaaacctcttcatttggatgttaaattatatggtcacctagttataggtaagccttgttcgagttgatatcttgattgtgaggaaggatctgtgtcattggagcttgtttctgctgcaacgtgctgtagactatgaataatgaaatcacaccacattaccatcagatttcttgttttagttgtcaaattaatatttatgattgttatcttgggcgaaaagttcagagcagagatgacaaatcattagaacaacgatgaatttcagtattacggctaaaaagttcttctgtctgaatattaactcactctccttccagtgtacttcacagtaattggtatgcttttttatttaatgcttaaatcaaactttataaaaatcttagaccagatctttaatatggtatgccatttccccagtctaccaatggaatagtatgggtttctaatcctaggcttgtacaatggattggagttgagccatgccagcctccacactgccactaacttctgtaatgtaagattgagtcactgccaagcatttgaaatatgcagttgtgttttaattataatttatgtatagttagatgtatgtagtgcattgtgtggtattatttggtttgtaagaatttatttttaagggtcaaggtcatttgtaacattttgtgtgtgtcaattcaatgcaatgttggctgccttttgaagtctttgatatattggtgaatattcttctgatctataatacaaagctatgtaatgtt

SEQ ID NO: 152093 - DNA, 4900 bp, Homo sapiens
  Payload ID: 9933
  Gene Symbol: MECOM
  Gene Name: MDS1 and EVI1 complex locus
  Uniprot ID: Q03112
  ENST ID: ENST00000264674
  CDS Start-End: 140-3490
ccttgccaagtaacagctttgctgtccaacatcgtgtgctgcttcgcgagaaagtcacattcggaccctttggctagattgcttattcatagggcttcttgactaaagcccttggagcactgggtttttcttgaagtatatgatcttagacgaattttacaatgtgaagttctgcatagatgccagtcaaccagatgttggaagctggctcaagtacattagattcgctggctgttatgatcagcacaaccttgttgcatgccagataaatgatcagatattctatagagtagttgcagacattgcgccgggagaggagcttctgctgttcatgaagagcgaagactatccccatgaaactatggcgccggatatccacgaagaacggcaatatcgctgcgaagactgtgaccagctctttgaatctaaggctgaactagcagatcaccaaaagtttccatgcagtactcctcactcagcattttcaatggttgaagaggactttcagcaaaaactcgaaagcgagaatgatctccaagagatacacacgatccaggagtgtaaggaatgtgaccaagtttttcctgatttgcaaagcctggagaaacacatgctgtcacatactgaagagagggaatacaagtgtgatcagtgtcccaaggcatttaactggaagtccaatttaattcgccaccagatgtcacatgacagtggaaagcactatgaatgtgaaaactgtgccaagcaggttttcacggaccctagcaaccttcagcggcacattcgctctcagcatgtcggtgcccgggcccatgcatgcccggagtgtggcaaaacgtttgccacttcgtcgggcctcaaacaacacaagcacatccacagcagtgtgaagccctttatctgtgaggtctgccataaatcctatactcagttttcaaacctttgccgtcataagcgcatgcatgctgattgcagaacccaaatcaagtgcaaagactgtggacaaatgttcagcactacgtcttccttaaataaacacaggaggttttgtgagggcaagaaccattttgcggcaggtggattttttggccaaggcatttcacttcctggaaccccagctatggataaaacgtccatggttaatatgagtcatgccaacccgggccttgctgactattttggcgccaataggcatcctgctggtcttacctttccaacagctcctggattttcttttagcttccctggtctgtttccttccggcttgtaccacaggcctcctttgatacctgctagttctcctgttaaaggactatcaagtactgaacagacaaacaaaagtcaaagtcccctcatgacacatcctcagatactgccagctacacaggatattttgaaggcactatctaaacacccatctgtaggggacaataagccagtggagctccagcccgagaggtcctctgaagagaggccctttgagaaaatcagtgaccagtcagagagtagtgaccttgatgatgtcagtacaccaagtggcagtgacctggaaacaacctcgggctctgatctggaaagtgacattgaaagtgataaagagaaatttaaagaaaatggtaaaatgttcaaagacaaagtaagccctcttcagaatctggcttcaataaataataagaaagaatacagcaatcattccattttctcaccatctttagaggagcagactgcggtgtcaggagctgtgaatgattctataaaggctattgcttctattgctgaaaaatactttggttcaacaggactggtggggctgcaagacaaaaaagttggagctttaccttacccttccatgtttcccctcccattttttccagcattctctcaatcaatgtacccatttcctgatagagacttgagatcgttacctttgaaaatggaaccccaatcaccaggtgaagtaaagaaactgcagaagggcagctctgagtccccctttgatctcaccactaagcgaaaggatgagaagcccttgactccagtcccctccaagcctccagtgacacctgccacaagccaagaccagcccctggatctaagtatgggcagtaggagtagagccagtgggacaaagctgactgagcctcgaaaaaaccacgtgtttgggggaaaaaaaggaagcaacgtcgaatcaagacctgcttcagatggttccttgcagcatgcaagacccactcctttctttatggaccctatttacagagtagagaaaagaaaactaactgacccacttgaagctttaaaagagaaatacttgaggccttctccaggattcttgtttcacccacaattccaactgcctgatcagagaacttggatgtcagctattgaaaacatggcagaaaagctagagagcttcagtgccctgaaacctgaggccagtgagctcttacagtcagtgccctctatgttcaacttcagggcgcctcccaatgccctgccagagaaccttctgcggaagggaaaggagcgctatacctgcagatactgtggcaagatttttccaaggtctgcaaacctaacacggcacttgagaacccacacaggagagcagccttacagatgcaaatactgtgacagatcatttagcatatcttctaacttgcaaaggcatgttcgcaacatccacaataaagagaagccatttaagtgtcacttatgtgataggtgttttggtcaacaaaccaatttagacagacacctaaagaaacatgagaatgggaacatgtccggtacagcaacatcgtcgcctcattctgaactggaaagtacaggtgcgattctggatgacaaagaagatgcttacttcacagaaattcgaaatttcattgggaacagcaaccatggcagccaatctcccaggaatgtggaggagagaatgaatggcagtcattttaaagatgaaaaggctttggtgaccagtcaaaattcagacttgctggatgatgaagaagttgaagatgaggtgttgttagatgaggaggatgaagacaatgatattactggaaaaacaggaaaggaaccagtgacaagtaatttacatgaaggaaaccctgaggatgactatgaagaaaccagtgccctggagatgagttgcaagacatccccagtgaggtataaagaggaagaatataaaagtggactttctgctctagatcatataaggcacttcacagatagcctcaaaatgaggaaaatggaagataatcaatattctgaagctgagctgtcttcttttagtacttcccatgtgccagaggaacttaagcagccgttacacagaaagtccaaatcgcaggcatatgctatgatgctgtcactgtctgacaaggagtccctccattctacatcccacagttcttccaacgtgtggcacagtatggccagggctgcggcggaatccagtgctatccagtccataagccacgtatgacgttatcaaggttgaccagagtgggaccaagtccaacagtagcatggctctttcatataggactatttacaagactgctgagcagaatgccttataaacctgcagggtcactcatctaaagtctagtgaccttaaactgaatgatttaaaaaagaaaagaaagaaaaaagaaactatttattctcgatattttgttttgcacagcaaaggcagctgctgacttctggaagatcaatcaatgcgacttaaagtgattcagtgaaaacaaaaaacttggtgggctgaaggcatcttccagtttaccccaccttagggtatgggtgggtgagaagggcagttgagatggcagcattgatatgaatgaacactccatagaaactgaattctcttttgtacaagatcacctgacatgattgggaacagttgcttttaattacagatttaatttttttcttcgttaaagttttatgtaatttaaccctttgaagacagaagtagttggatgaaatgcacagtcaattattatagaaactgataacagggagtacttgttcccccttttgccttcttaagtacattgtttaaaactagggaaaaagggtatgtgtatattgtaaactatggatgttaacactcaaagaggttaagtcagtgaagtaacctattcatcaccagtaccgctgtaccactaataaattgtttgccaaatccttgtaataacatcttaattttagacaatcatgtcactgtttttaatgtttatttttttgtgtgtgttgcgtgtatcatgtatttatttgttggcaaactattgtttgttgattaaaatagcactgttccagtcagccactactttatgacgtctgaggcacacccctttccgaatttcaaggaccaaggtgacccgacctgtgtatgagagtgccaaatggtgtttggcttttcttaacattcctttttgtttgtttgttttgttttccttcttaatgaactaaatacgaatagatgcaacttagtttttgtaatactgaaatcgattcaattgtataaacgattataatttctttcatggaagcatgattcttctgattaaaaactgtactccatattttatgctggttgtctgcaagcttgtgcgatgttatgttcatgttaatcctatttgtaaaatgaagtgttcccaaccttatgttaaaagagagaagtaaataacagactgtattcagttattttgccctttattgaggaaccagatttgttttctttttgtttgtaatctcattttgaaataatcagcaagttgaggtactttcttcaaatgctttgtacaatataaactgttatgcctttcagtgcattactatgggaggagcaactaaaaaataaagacttacaaaaaggagtattttt

SEQ ID NO: 152094 - DNA, 3508 bp, Homo sapiens
  Payload ID: 9933
  Gene Symbol: MECOM
  Gene Name: MDS1 and EVI1 complex locus
  ENST ID: ENST00000433243
  CDS Start-End: 315-3473
tttgctgtccaacatcgtgtgctgcttcgcgagaaagtcacattcggaccctttggctagattgcttattcatagggcttcttgactaaagcccttggagcactgggtttttcttgaagtatatgatcttagacgaattttacaatgtgaagttctgcatagatgccagtcaaccagatgttggaagctggctcaagtacattagattcgctggctgttatgatcagcacaaccttgttgcatgccagataaatgatcagatattctatagagtagttgcagacattgcgccgggagaggagcttctgctgttcatgaagagcgaagactatccccatgaaactatggcgccggatatccacgaagaacggcaatatcgctgcgaagactgtgaccagctctttgaatctaaggctgaactagcagatcaccaaaagtttccatgcagtactcctcactcagcattttcaatggttgaagaggactttcagcaaaaactcgaaagcgagaatgatctccaagagatacacacgatccaggagtgtaaggaatgtgaccaagtttttcctgatttgcaaagcctggagaaacacatgctgtcacatactgaagagagggaatacaagtgtgatcagtgtcccaaggcatttaactggaagtccaatttaattcgccaccagatgtcacatgacagtggaaagcactatgaatgtgaaaactgtgccaagcaggttttcacggaccctagcaaccttcagcggcacattcgctctcagcatgtcggtgcccgggcccatgcatgcccggagtgtggcaaaacgtttgccacttcgtcgggcctcaaacaacacaagcacatccacagcagtgtgaagccctttatctgtgaggtctgccataaatcctatactcagttttcaaacctttgccgtcataagcgcatgcatgctgattgcagaacccaaatcaagtgcaaagactgtggacaaatgttcagcactacgtcttccttaaataaacacaggaggttttgtgagggcaagaaccattttgcggcaggtggattttttggccaaggcatttcacttcctggaaccccagctatggataaaacgtccatggttaatatgagtcatgccaacccgggccttgctgactattttggcgccaataggcatcctgctggtcttacctttccaacagctcctggattttcttttagcttccctggtctgtttccttccggcttgtaccacaggcctcctttgatacctgctagttctcctgttaaaggactatcaagtactgaacagacaaacaaaagtcaaagtcccctcatgacacatcctcagatactgccagctacacaggatattttgaaggcactatctaaacacccatctgtaggggacaataagccagtggagctccagcccgagaggtcctctgaagagaggccctttgagaaaatcagtgaccagtcagagagtagtgaccttgatgatgtcagtacaccaagtggcagtgacctggaaacaacctcgggctctgatctggaaagtgacattgaaagtgataaagagaaatttaaagaaaatggtaaaatgttcaaagacaaagtaagccctcttcagaatctggcttcaataaataataagaaagaatacagcaatcattccattttctcaccatctttagaggagcagactgcggtgtcaggagctgtgaatgattctataaaggctattgcttctattgctgaaaaatactttggttcaacaggactggtggggctgcaagacaaaaaagttggagctttaccttacccttccatgtttcccctcccattttttccagcattctctcaatcaatgtacccatttcctgatagagacttgagatcgttacctttgaaaatggaaccccaatcaccaggtgaagtaaagaaactgcagaagggcagctctgagtccccctttgatctcaccactaagcgaaaggatgagaagcccttgactccagtcccctccaagcctccagtgacacctgccacaagccaagaccagcccctggatctaagtatgggcagtaggagtagagccagtgggacaaagctgactgagcctcgaaaaaaccacgtgtttgggggaaaaaaaggaagcaacgtcgaatcaagacctgcttcagatggttccttgcagcatgcaagacccactcctttctttatggaccctatttacagagtagagaaaagaaaactaactgacccacttgaagctttaaaagagaaatacttgaggccttctccaggattcttgtttcacccacaattccaactgcctgatcagagaacttggatgtcagctattgaaaacatggcagaaaagctagagagcttcagtgccctgaaacctgaggccagtgagctcttacagtcagtgccctctatgttcaacttcagggcgcctcccaatgccctgccagagaaccttctgcggaagggaaaggagcgctatacctgcagatactgtggcaagatttttccaaggtctgcaaacctaacacggcacttgagaacccacacaggagagcagccttacagatgcaaatactgtgacagatcatttagcatatcttctaacttgcaaaggcatgttcgcaacatccacaataaagagaagccatttaagtgtcacttatgtgataggtgttttggtcaacaaaccaatttagacagacacctaaagaaacatgagaatgggaacatgtccggtacagcaacatcgtcgcctcattctgaactggaaagtacaggtgcgattctggatgacaaagaagatgcttacttcacagaaattcgaaatttcattgggaacagcaaccatggcagccaatctcccaggaatgtggaggagagaatgaatggcagtcattttaaagatgaaaaggctttggtgaccagtcaaaattcagacttgctggatgatgaagaagttgaagatgaggtgttgttagatgaggaggatgaagacaatgatattactggaaaaacaggaaaggaaccagtgacaagtaatttacatgaaggaaaccctgaggatgactatgaagaaaccagtgccctggagatgagttgcaagacatccccagtgaggtataaagaggaagaatataaaagtggactttctgctctagatcatataaggcacttcacagatagcctcaaaatgaggaaaatggaagataatcaatattctgaagctgagctgtcttcttttagtacttcccatgtgccagaggaacttaagcagccgttacacagaaagtccaaatcgcaggcatatgctatgatgctgtcactgtctgacaaggagtccctccattctacatcccacagttcttccaacgtgtggcacagtatggccagggctgcggcggaatccagtgctatccagtccataagccacgtatgacgttatcaaggttgaccagagtgggaccaagtcca

SEQ ID NO: 152095 - DNA, 638 bp, Homo sapiens
  Payload ID: 9933
  Gene Symbol: MECOM
  Gene Name: MDS1 and EVI1 complex locus
  ENST ID: ENST00000484519
  CDS Start-End: 263-638
ttatctacgttgctaagccgggcgatttccttgttcctcctgcgaaacggtgcggtctggacacgtctccgggatcttagacgaattttacaatgtgaagttctgcatagatgccagtcaaccagatgttggaagctggctcaagtacattagattcgctggctgttatgatcagcacaaccttgttgcatgccagataaatgatcagatattctatagagtagttgcagacattgcgccgggagaggagcttctgctgttcatgaagagcgaagactatccccatgaaactatggcgccggatatccacgaagaacggcaatatcgctgcgaagactgtgaccagctctttgaatctaaggctgaactagcagatcaccaaaagtttccatgcagtactcctcactcagcattttcaatggttgaagaggactttcagcaaaaactcgaaagcgagaatgatctccaagagatacacacgatccaggagtgtaaggaatgtgaccaagtttttcctgatttgcaaagcctggagaaacacatgctgtcacatactgaagagagggaatacaagtgtgatcagtgtcccaaggcatttaactggaagtccaatttaattcgccaccagatgtcacatg

SEQ ID NO: 152096 - DNA, 965 bp, Homo sapiens
  Payload ID: 9933
  Gene Symbol: MECOM
  Gene Name: MDS1 and EVI1 complex locus
  ENST ID: ENST00000492586
  CDS Start-End: 1-965
tgtgaccagctctttgaatctaaggctgaactagcagatcaccaaaagtttccatgcagtactcctcactcagcattttcaatggttgaagaggactttcagcaaaaactcgaaagcgagaatgatctccaagagatacacacgatccaggagtgtaaggaatgtgaccaagtttttcctgatttgcaaagcctggagaaacacatgctgtcacatactgaagagagggaatacaagtgtgatcagtgtcccaaggcatttaactggaagtccaatttaattcgccaccagatgtcacatgacagtggaaagcactatgaatgtgaaaactgtgccaaggttttcacggaccctagcaaccttcagcggcacattcgctctcagcatgtcggtgcccgggcccatgcatgcccggagtgtggcaaaacgtttgccacttcgtcgggcctcaaacaacacaagcacatccacagcagtgtgaagccctttatctcattctctcaatcaatgtacccatttcctgatagagacttgagatcgttacctttgaaaatggaaccccaatcaccaggtgaagtaaagaaactgcagaagggcagctctgagtccccctttgatctcaccactaagcgaaaggatgagaagcccttgactccagtcccctccaagcctccagtgacacctgccacaagccaagaccagcccctggatctaagtatgggcagtaggagtagagccagtgggacaaagctgactgagcctcgaaaaaaccacgtgtttgggggaaaaaaaggaagcaacgtcgaatcaagacctgcttcagatggttccttgcagcatgcaagacccactcctttctttatggaccctatttacagagtagagaaaagaaaactaactgacccacttgaagctttaaaagagaaatacttgaggccttctccaggattcttgtttcacccaca

SEQ ID NO: 152097 - DNA, 3939 bp, Homo sapiens
  Payload ID: 9933
  Gene Symbol: MECOM
  Gene Name: MDS1 and EVI1 complex locus
  ENST ID: ENST00000494292
  CDS Start-End: 99-3791
agagagagggagggagcgagagggagagcaaaagaaggaaaggatccaagaaaaaaaagccccaaccacacaccagcggctgcaggactgggcacagcatgagatccaaaggcagggcaaggaaactggccacaaataatgagtgtgtatatggcaactaccctgaaatacctttggaagaaatgccagatgcagatggagtagccagcactccctccctcaatattcaagagccatgctctcctgccacatccagtgaagcattcactccaaaggagggttctccttacaaagcccccatctacatccctgatgatatccccattcctgctgagtttgaacttcgagagtcaaatatgcctggggcaggactaggaatatggaccaaaaggaagatcgaagtaggtgaaaagtttgggccttatgtgggagagcagaggtcaaacctgaaagaccccagttatggatgggagatcttagacgaattttacaatgtgaagttctgcatagatgccagtcaaccagatgttggaagctggctcaagtacattagattcgctggctgttatgatcagcacaaccttgttgcatgccagataaatgatcagatattctatagagtagttgcagacattgcgccgggagaggagcttctgctgttcatgaagagcgaagactatccccatgaaactatggcgccggatatccacgaagaacggcaatatcgctgcgaagactgtgaccagctctttgaatctaaggctgaactagcagatcaccaaaagtttccatgcagtactcctcactcagcattttcaatggttgaagaggactttcagcaaaaactcgaaagcgagaatgatctccaagagatacacacgatccaggagtgtaaggaatgtgaccaagtttttcctgatttgcaaagcctggagaaacacatgctgtcacatactgaagagagggaatacaagtgtgatcagtgtcccaaggcatttaactggaagtccaatttaattcgccaccagatgtcacatgacagtggaaagcactatgaatgtgaaaactgtgccaaggttttcacggaccctagcaaccttcagcggcacattcgctctcagcatgtcggtgcccgggcccatgcatgcccggagtgtggcaaaacgtttgccacttcgtcgggcctcaaacaacacaagcacatccacagcagtgtgaagccctttatctgtgaggtctgccataaatcctatactcagttttcaaacctttgccgtcataagcgcatgcatgctgattgcagaacccaaatcaagtgcaaagactgtggacaaatgttcagcactacgtcttccttaaataaacacaggaggttttgtgagggcaagaaccattttgcggcaggtggattttttggccaaggcatttcacttcctggaaccccagctatggataaaacgtccatggttaatatgagtcatgccaacccgggccttgctgactattttggcgccaataggcatcctgctggtcttacctttccaacagctcctggattttcttttagcttccctggtctgtttccttccggcttgtaccacaggcctcctttgatacctgctagttctcctgttaaaggactatcaagtactgaacagacaaacaaaagtcaaagtcccctcatgacacatcctcagatactgccagctacacaggatattttgaaggcactatctaaacacccatctgtaggggacaataagccagtggagctccagcccgagaggtcctctgaagagaggccctttgagaaaatcagtgaccagtcagagagtagtgaccttgatgatgtcagtacaccaagtggcagtgacctggaaacaacctcgggctctgatctggaaagtgacattgaaagtgataaagagaaatttaaagaaaatggtaaaatgttcaaagacaaagtaagccctcttcagaatctggcttcaataaataataagaaagaatacagcaatcattccattttctcaccatctttagaggagcagactgcggtgtcaggagctgtgaatgattctataaaggctattgcttctattgctgaaaaatactttggttcaacaggactggtggggctgcaagacaaaaaagttggagctttaccttacccttccatgtttcccctcccattttttccagcattctctcaatcaatgtacccatttcctgatagagacttgagatcgttacctttgaaaatggaaccccaatcaccaggtgaagtaaagaaactgcagaagggcagctctgagtccccctttgatctcaccactaagcgaaaggatgagaagcccttgactccagtcccctccaagcctccagtgacacctgccacaagccaagaccagcccctggatctaagtatgggcagtaggagtagagccagtgggacaaagctgactgagcctcgaaaaaaccacgtgtttgggggaaaaaaaggaagcaacgtcgaatcaagacctgcttcagatggttccttgcagcatgcaagacccactcctttctttatggaccctatttacagagtagagaaaagaaaactaactgacccacttgaagctttaaaagagaaatacttgaggccttctccaggattcttgtttcacccacaaatgtcagctattgaaaacatggcagaaaagctagagagcttcagtgccctgaaacctgaggccagtgagctcttacagtcagtgccctctatgttcaacttcagggcgcctcccaatgccctgccagagaaccttctgcggaagggaaaggagcgctatacctgcagatactgtggcaagatttttccaaggtctgcaaacctaacacggcacttgagaacccacacaggagagcagccttacagatgcaaatactgtgacagatcatttagcatatcttctaacttgcaaaggcatgttcgcaacatccacaataaagagaagccatttaagtgtcacttatgtgataggtgttttggtcaacaaaccaatttagacagacacctaaagaaacatgagaatgggaacatgtccggtacagcaacatcgtcgcctcattctgaactggaaagtacaggtgcgattctggatgacaaagaagatgcttacttcacagaaattcgaaatttcattgggaacagcaaccatggcagccaatctcccaggaatgtggaggagagaatgaatggcagtcattttaaagatgaaaaggctttggtgaccagtcaaaattcagacttgctggatgatgaagaagttgaagatgaggtgttgttagatgaggaggatgaagacaatgatattactggaaaaacaggaaaggaaccagtgacaagtaatttacatgaaggaaaccctgaggatgactatgaagaaaccagtgccctggagatgagttgcaagacatccccagtgaggtataaagaggaagaatataaaagtggactttctgctctagatcatataaggcacttcacagatagcctcaaaatgaggaaaatggaagataatcaatattctgaagctgagctgtcttcttttagtacttcccatgtgccagaggaacttaagcagccgttacacagaaagtccaaatcgcaggcatatgctatgatgctgtcactgtctgacaaggagtccctccattctacatcccacagttcttccaacgtgtggcacagtatggccagggctgcggcggaatccagtgctatccagtccataagccacgtatgacgttatcaaggttgaccagagtgggaccaagtccaacagtagcatggctctttcatataggactatttacaagactgctgagcagaatgccttataaacctgcagggtcactcatctaaagtctagtgaccttaaactgaatgattta

SEQ ID NO: 152098 - DNA, 1792 bp, Homo sapiens
  Payload ID: 9933
  Gene Symbol: MECOM
  Gene Name: MDS1 and EVI1 complex locus
  ENST ID: ENST00000460890
  CDS Start-End: 1482-1792
tttgctgtccaacatcgtgtgctgcttcgcgagaaagtcacattcggaccctttggctagattgtggggatttttttttttttccttttgctgttggttttttgaaagggcctttctctaaagtctacctaaacggtttttttttaagctatctttggaggttgacagcttttaaaaacacaggagtgtgttatatgaaatgactgaagatgtgtcgttactttattttattcgagatttccgacacgattaagacatttgggagacaaatgcagttctgctagcaaatcaaaagtgaataattcacccagggggcaaacgtttctggagaaagctaagcttttgtcttggggcaagaatattgagaggaagaatgttaatatgatggtgaaatctttgaataatcgtataacagattagtaaaaagacattctttggaaatgaacctttttaaaaattaattttgctgttgacagtggcaatgctaataatgttaacacggaataaaattacacctacaatttttatgtgcagtgtatgtaatacttaactccctgcccctgtgaaagggtatgcttgaaagctaaggggatggatgcttcttgactttgaaattaacaagttttccacgtctctctgcaaatatgaaatggaattagtattgcatttcactggctttattctatgtcctttattaaatatttctttggtgtgtcaggagaactgccttttctttttctttttttcttttttttcttttttttgccagtcaaggaaacaaacaacaaaagatcaaccagaaaccaaacagactgaacaaaccaacaaaacccagcaacaaactccaactttttactatttaaaaatgtgcattgctattatttatgtaccttctcaacatctgggatggggggaaatctcaagttgccatttgagttactcagcactgagagttgaagaaacatcttaaagtttgtaattttattgataacaaatttttagaatttgtcctcttaatagaaaggatgtttaagtgtacacttctgtcgttgttagtgtgaagaggcatccttgaaaaagaagagtttgatttctctctgtgtgtgtgtgtgtgtgtgtgtgtgtgtgtgtgtgtgtgtgtgtgtttaataatatccctatcttatgttcgatttttcttttttaaattttgggacgacttattgcccttcaatttcctcatggccaaaggcttattcatagggcttcttgactaaagcccttggagcactgggtttttcttgaagtatatgatcttagacgaattttacaatgtgaagttctgcatagatgccagtcaaccagatgttggaagctggctcaagtacattagattcgctggctgttatgatcagcacaaccttgttgcatgccagataaatgatcagatattctatagagtagttgcagacattgcgccgggagaggagcttctgctgttcatgaagagcgaagactatccccatgaaactatggcgccggatatccacgaagaacggcaatatcgctgcgaagactgtgaccagctctttgaatctaaggctgaactagcagatcaccaaaagtttccatgcagtactcctcactcagcattttcaatggttgaagaggactttcagcaaaaactcgaaagcgagaatgatctccaagagatacacacgatccaggagtgtaaggaatgtgaccaagtttttcctgatttgcaaagcctggagaaacacatgctgtcacatactgaagagagggaatacaa

SEQ ID NO: 152099 - DNA, 379 bp, Homo sapiens
  Payload ID: 9933
  Gene Symbol: MECOM
  Gene Name: MDS1 and EVI1 complex locus
  ENST ID: ENST00000481315
  CDS Start-End: 294-379
agagcattcaaaaaagtctccatgcctcagtgtattaatctagaaaaggagagcagcaacataatggcaggctgaccacctaggaatagcatgagaacacgaagatcttagacgaattttacaatgtgaagttctgcatagatgccagtcaaccagatgttggaagctggctcaagtacattagattcgctggctgttatgatcagcacaaccttgttgcatgccagataaatgatcagatattctatagagtagttgcagacattgcgccgggagaggagcttctgctgttcatgaagagcgaagactatccccatgaaactatggcgccggatatccacgaagaacggcaatatcgctgcgaagactgtgaccagct

SEQ ID NO: 152100 - DNA, 468 bp, Homo sapiens
  Payload ID: 9933
  Gene Symbol: MECOM
  Gene Name: MDS1 and EVI1 complex locus
  ENST ID: ENST00000466623
  CDS Start-End: 404-468
gtggtttgctagggtgctttgaggattcagagaagggaaagttcttcgttaaacattacacaggatatatgtgacgcagctagccttgcattaagaaaatttgatttgtgaagtaggatttggaaaagatttgtgaactggcttgagagtcacagctttccatttgtcaccagagggctggttttcaatatataaaacaggaaatcacacttcttttgataaaaaagaaaaagaaaaagatgtttgttaaggtgtttgtacaggtatcttagtgtatatcttgccctttgttaatatatatacatctctctctttcctgattccatccacctttattttgtctttaaagatattctatagagtagttgcagacattgcgccgggagaggagcttctgctgttcatgaagagcgaagactatccccatgaaactatggcgccggatatccacgaagaacggcaatatcg

SEQ ID NO: 152101 - DNA, 580 bp, Homo sapiens
  Payload ID: 9933
  Gene Symbol: MECOM
  Gene Name: MDS1 and EVI1 complex locus
  ENST ID: ENST00000475754
  CDS Start-End: 378-580
cttgttcctcctgcgaaacggtgcggtctggacacgtctccggggtgggtcgtccggccttcgatcttagacgaattttacaatgtgaagttctgcatagatgccagtcaaccagatgttggaagctggctcaagtacattagattcgctggctgttatgatcagcacaaccttgttgcatgccagataaatgatcaggaaagaagctaagcagaaaatactcctcattaagttatttttcaaatttagcacaattttgtgctccggtcttgttatagaaaaataaacaattggactttagagccacctactggaataaagagatattctatagagtagttgcagacattgcgccgggagaggagcttctgctgttcatgaagagcgaagactatccccatgaaactatggcgccggatatccacgaagaacggcaatatcgctgcgaagactgtgaccagctctttgaatctaaggctgaactagcagatcaccaaaagtttccatgcagtactcctcactcagcattttcaatggttgaagaggactttcagcaaaaactcgaaagcgagaatgatct

SEQ ID NO: 152102 - DNA, 393 bp, Homo sapiens
  Payload ID: 9933
  Gene Symbol: MECOM
  Gene Name: MDS1 and EVI1 complex locus
  ENST ID: ENST00000486748
  CDS Start-End: 19-393
tgcaggactgggcacagcatgagatccaaaggcagggcaaggaaactggccacaaaaggtccttgtttccccttcgccttccaccacaattgtaagtttcctgaggcctccccagccacacagaactataatgagtgtgtatatggcaactaccctgaaatacctttggaagaaatgccagatgcagatggagtagccagcactccctccctcaatattcaagagccatgctctcctgccacatccagtgaagcattcactccaaaggagggttctccttacaaagcccccatctacatccctgatgatatccccattcctgctgagtttgaacttcgagagtcaaatatgcctggggcaggactaggaatatggaccaaaaggaagatcgaa

SEQ ID NO: 152103 - DNA, 1533 bp, Homo sapiens
  Payload ID: 9933
  Gene Symbol: MECOM
  Gene Name: MDS1 and EVI1 complex locus
  ENST ID: ENST00000487503
  CDS Start-End: 1223-1533
tttgctgtccaacatcgtgtgctgcttcgcgagaaagtcacattcggaccctttggctagattgtggggatttttttttttttccttttgctgttggttttttgaaagggcctttctctaaagtctacctaaacggtttttttttaagctatctttggaggttgacagcttttaaaaacacaggagtgtgttatatgaaatgactgaagatgtgtcgttactttattttattcgagatttccgacacgattaagacatttgggagacaaatgcagttctgctagcaaatcaaaagtgaataattcacccagggggcaaacgtttctggagaaagctaagcttttgtcttggggcaagaatattgagaggaagaatgttaatatgatggtgaaatctttgaataatcgtataacagattagtaaaaagacattctttggaaatgaacctttttaaaaattaattttgctgttgacagtggcaatgctaataatgttaacacggaataaaattacacctacaatttttatgtgcagtgtatgtaatacttaactccctgcccctgtgaaagggtatgcttgaaagctaaggggatggatgcttcttgactttgaaattaacaagttttccacgtctctctgcaaatatgaaatggaattagtattgcatttcactggctttattctatgtcctttattaaatatttctttggtgtgtcaggagaactgccttttctttttctttttttcttttttttcttttttttgccagtcaaggaaacaaacaacaaaagatcaaccagaaaccaaacagactgaacaaaccaacaaaacccagcaacaaactccaactttttactatttaaaaatgtgcattgctattatttatgtaccttctcaacatctgggatggggggaaatctcaagttgccatttgagttactcagcactgagagttgaagaaacatcttaaagcttattcatagggcttcttgactaaagcccttggagcactgggtttttcttgaagtatatgatcttagacgaattttacaatgtgaagttctgcatagatgccagtcaaccagatgttggaagctggctcaagtacattagattcgctggctgttatgatcagcacaaccttgttgcatgccagataaatgatcagatattctatagagtagttgcagacattgcgccgggagaggagcttctgctgttcatgaagagcgaagactatccccatgaaactatggcgccggatatccacgaagaacggcaatatcgctgcgaagactgtgaccagctctttgaatctaaggctgaactagcagatcaccaaaagtttccatgcagtactcctcactcagcattttcaatggttgaagaggactttcagcaaaaactcgaaagcgagaatgatctccaagagatacacacgatccaggagtgtaaggaatgtgaccaagtttttcctgatttgcaaagcctggagaaacacatgctgtcacatactgaagagagggaatacaa

SEQ ID NO: 152104 - DNA, 5732 bp, Homo sapiens
  Payload ID: 9933
  Gene Symbol: MECOM
  Gene Name: MDS1 and EVI1 complex locus
  Uniprot ID: Q03112
  ENST ID: ENST00000464456
  CDS Start-End: 1202-4330
cacacacacacacacacaccacacttgtgctttcaagacatcgaaacggaggctatttccctggggaaagaaatcctgcctggcgagatctccccattggttgtttacccggagaaatctacatgtttaagggggatggtgcatccataatcagtctgtccctataggacttgggtcttggcgacctttttgtgacctctcccgccagaggaggctgctgtcactttaaaaatttaaaagaggagcccgtctggcttccgatcagatcactctgggcggcgggagatagctccctttctccctcgccccgggttctttctggatggccgagcagatcctctttaaagagacagttcatgaaatagaaacccggcggctgagcttggagttgcgaaaggggacgatcccgtgagggtccaggacccgcgaaggcgctgcggaggatctgaaagggggatagagctcccctcgcctccccaggccccccaccttttcaaactctcctcctcctgcttgttttcccccattggaactgggaaggagaagtagaagttttagtgggtttcagataactttcattacacatcgggctgataagagcaagagaaagtgagaaaagagggaggtgatgtgaaccagaaggaatagctccgagctcatttaggaagggggaaaaagccaaaacacaccaaacccgggtcacccagacgaaagaagacttcatttcttgtattaaaaatacactgttggcggacaataaatccgaaacgcgtggtcctggagagcagatcctagagacggacaaagttgtcagagacccatttggaaatcgagacgcgaggcttttaaaaaattattattattatttttaaacatctctaaatgttgctcgggatcgtttgaaaggattttcgtgcaggagcgttgggggctgctgattattttattttgtttattttgattcttctgtgaatgcctattattgctgagttgaggccatagaaatctaaagatcttagacgaattttacaatgtgaagttctgcatagatgccagtcaaccagatgttggaagctggctcaagtacattagattcgctggctgttatgatcagcacaaccttgttgcatgccagataaatgatcagatattctatagagtagttgcagacattgcgccgggagaggagcttctgctgttcatgaagagcgaagactatccccatgaaactatggcgccggatatccacgaagaacggcaatatcgctgcgaagactgtgaccagctctttgaatctaaggctgaactagcagatcaccaaaagtttccatgcagtactcctcactcagcattttcaatggttgaagaggactttcagcaaaaactcgaaagcgagaatgatctccaagagatacacacgatccaggagtgtaaggaatgtgaccaagtttttcctgatttgcaaagcctggagaaacacatgctgtcacatactgaagagagggaatacaagtgtgatcagtgtcccaaggcatttaactggaagtccaatttaattcgccaccagatgtcacatgacagtggaaagcactatgaatgtgaaaactgtgccaaggttttcacggaccctagcaaccttcagcggcacattcgctctcagcatgtcggtgcccgggcccatgcatgcccggagtgtggcaaaacgtttgccacttcgtcgggcctcaaacaacacaagcacatccacagcagtgtgaagccctttatctgtgaggtctgccataaatcctatactcagttttcaaacctttgccgtcataagcgcatgcatgctgattgcagaacccaaatcaagtgcaaagactgtggacaaatgttcagcactacgtcttccttaaataaacacaggaggttttgtgagggcaagaaccattttgcggcaggtggattttttggccaaggcatttcacttcctggaaccccagctatggataaaacgtccatggttaatatgagtcatgccaacccgggccttgctgactattttggcgccaataggcatcctgctggtcttacctttccaacagctcctggattttcttttagcttccctggtctgtttccttccggcttgtaccacaggcctcctttgatacctgctagttctcctgttaaaggactatcaagtactgaacagacaaacaaaagtcaaagtcccctcatgacacatcctcagatactgccagctacacaggatattttgaaggcactatctaaacacccatctgtaggggacaataagccagtggagctccagcccgagaggtcctctgaagagaggccctttgagaaaatcagtgaccagtcagagagtagtgaccttgatgatgtcagtacaccaagtggcagtgacctggaaacaacctcgggctctgatctggaaagtgacattgaaagtgataaagagaaatttaaagaaaatggtaaaatgttcaaagacaaagtaagccctcttcagaatctggcttcaataaataataagaaagaatacagcaatcattccattttctcaccatctttagaggagcagactgcggtgtcaggagctgtgaatgattctataaaggctattgcttctattgctgaaaaatactttggttcaacaggactggtggggctgcaagacaaaaaagttggagctttaccttacccttccatgtttcccctcccattttttccagcattctctcaatcaatgtacccatttcctgatagagacttgagatcgttacctttgaaaatggaaccccaatcaccaggtgaagtaaagaaactgcagaagggcagctctgagtccccctttgatctcaccactaagcgaaaggatgagaagcccttgactccagtcccctccaagcctccagtgacacctgccacaagccaagaccagcccctggatctaagtatgggcagtaggagtagagccagtgggacaaagctgactgagcctcgaaaaaaccacgtgtttgggggaaaaaaaggaagcaacgtcgaatcaagacctgcttcagatggttccttgcagcatgcaagacccactcctttctttatggaccctatttacagagtagagaaaagaaaactaactgacccacttgaagctttaaaagagaaatacttgaggccttctccaggattcttgtttcacccacaaatgtcagctattgaaaacatggcagaaaagctagagagcttcagtgccctgaaacctgaggccagtgagctcttacagtcagtgccctctatgttcaacttcagggcgcctcccaatgccctgccagagaaccttctgcggaagggaaaggagcgctatacctgcagatactgtggcaagatttttccaaggtctgcaaacctaacacggcacttgagaacccacacaggagagcagccttacagatgcaaatactgtgacagatcatttagcatatcttctaacttgcaaaggcatgttcgcaacatccacaataaagagaagccatttaagtgtcacttatgtgataggtgttttggtcaacaaaccaatttagacagacacctaaagaaacatgagaatgggaacatgtccggtacagcaacatcgtcgcctcattctgaactggaaagtacaggtgcgattctggatgacaaagaagatgcttacttcacagaaattcgaaatttcattgggaacagcaaccatggcagccaatctcccaggaatgtggaggagagaatgaatggcagtcattttaaagatgaaaaggctttggtgaccagtcaaaattcagacttgctggatgatgaagaagttgaagatgaggtgttgttagatgaggaggatgaagacaatgatattactggaaaaacaggaaaggaaccagtgacaagtaatttacatgaaggaaaccctgaggatgactatgaagaaaccagtgccctggagatgagttgcaagacatccccagtgaggtataaagaggaagaatataaaagtggactttctgctctagatcatataaggcacttcacagatagcctcaaaatgaggaaaatggaagataatcaatattctgaagctgagctgtcttcttttagtacttcccatgtgccagaggaacttaagcagccgttacacagaaagtccaaatcgcaggcatatgctatgatgctgtcactgtctgacaaggagtccctccattctacatcccacagttcttccaacgtgtggcacagtatggccagggctgcggcggaatccagtgctatccagtccataagccacgtatgacgttatcaaggttgaccagagtgggaccaagtccaacagtagcatggctctttcatataggactatttacaagactgctgagcagaatgccttataaacctgcagggtcactcatctaaagtctagtgaccttaaactgaatgatttaaaaaagaaaagaaagaaaaaagaaactatttattctcgatattttgttttgcacagcaaaggcagctgctgacttctggaagatcaatcaatgcgacttaaagtgattcagtgaaaacaaaaaacttggtgggctgaaggcatcttccagtttaccccaccttagggtatgggtgggtgagaagggcagttgagatggcagcattgatatgaatgaacactccatagaaactgaattctcttttgtacaagatcacctgacatgattgggaacagttgcttttaattacagatttaatttttttcttcgttaaagttttatgtaatttaaccctttgaagacagaagtagttggatgaaatgcacagtcaattattatagaaactgataacagggagtacttgttcccccttttgccttcttaagtacattgtttaaaactagggaaaaagggtatgtgtatattgtaaactatggatgttaacactcaaagaggttaagtcagtgaagtaacctattcatcaccagtaccgctgtaccactaataaattgtttgccaaatccttgtaataacatcttaattttagacaatcatgtcactgtttttaatgtttatttttttgtgtgtgttgcgtgtatcatgtatttatttgttggcaaactattgtttgttgattaaaatagcactgttccagtcagccactactttatgacgtctgaggcacacccctttccgaatttcaaggaccaaggtgacccgacctgtgtatgagagtgccaaatggtgtttggcttttcttaacattcctttttgtttgtttgttttgttttccttcttaatgaactaaatacgaatagatgcaacttagtttttgtaatactgaaatcgattcaattgtataaacgattataatttctttcatggaagcatgattcttctgattaaaaactgtactccatattttatgctggttgtctgcaagcttgtgcgatgttatgttcatgttaatcctatttgtaaaatgaagtgttcccaaccttatgttaaaagagagaagtaaataacagactgtattcagttattttgccctttattgaggaaccagatttgttttctttttgtttgtaatctcattttgaaataatcagcaagttgaggtactttcttcaaatgctttgtacaatataaactgttatgcctttcagtgcattactatgggaggagcaactaaaaaataaagacttacaaaaagga

SEQ ID NO: 152105 - DNA, 3691 bp, Homo sapiens
  Payload ID: 9933
  Gene Symbol: MECOM
  Gene Name: MDS1 and EVI1 complex locus
  Uniprot ID: Q03112
  ENST ID: ENST00000468789
  CDS Start-End: 389-3544
aaagtttgtcacttcggacagtttcctgccggggcaccgtttctacgggcgccccccgcccccagccttctttcctcctcgcccgcagtctcgcggagccctgctgcttatctacgttgctaagccgggcgatttccttgttcctcctgcgaaacggtgcggtctggacacgtctccggggtgggtcgtccggccttcgatcttagacgaattttacaatgtgaagttctgcatagatgccagtcaaccagatgttggaagctggctcaagtacattagattcgctggctgttatgatcagcacaaccttgttgcatgccagataaatgatcagatattctatagagtagttgcagacattgcgccgggagaggagcttctgctgttcatgaagagcgaagactatccccatgaaactatggcgccggatatccacgaagaacggcaatatcgctgcgaagactgtgaccagctctttgaatctaaggctgaactagcagatcaccaaaagtttccatgcagtactcctcactcagcattttcaatggttgaagaggactttcagcaaaaactcgaaagcgagaatgatctccaagagatacacacgatccaggagtgtaaggaatgtgaccaagtttttcctgatttgcaaagcctggagaaacacatgctgtcacatactgaagagagggaatacaagtgtgatcagtgtcccaaggcatttaactggaagtccaatttaattcgccaccagatgtcacatgacagtggaaagcactatgaatgtgaaaactgtgccaaggttttcacggaccctagcaaccttcagcggcacattcgctctcagcatgtcggtgcccgggcccatgcatgcccggagtgtggcaaaacgtttgccacttcgtcgggcctcaaacaacacaagcacatccacagcagtgtgaagccctttatctgtgaggtctgccataaatcctatactcagttttcaaacctttgccgtcataagcgcatgcatgctgattgcagaacccaaatcaagtgcaaagactgtggacaaatgttcagcactacgtcttccttaaataaacacaggaggttttgtgagggcaagaaccattttgcggcaggtggattttttggccaaggcatttcacttcctggaaccccagctatggataaaacgtccatggttaatatgagtcatgccaacccgggccttgctgactattttggcgccaataggcatcctgctggtcttacctttccaacagctcctggattttcttttagcttccctggtctgtttccttccggcttgtaccacaggcctcctttgatacctgctagttctcctgttaaaggactatcaagtactgaacagacaaacaaaagtcaaagtcccctcatgacacatcctcagatactgccagctacacaggatattttgaaggcactatctaaacacccatctgtaggggacaataagccagtggagctccagcccgagaggtcctctgaagagaggccctttgagaaaatcagtgaccagtcagagagtagtgaccttgatgatgtcagtacaccaagtggcagtgacctggaaacaacctcgggctctgatctggaaagtgacattgaaagtgataaagagaaatttaaagaaaatggtaaaatgttcaaagacaaagtaagccctcttcagaatctggcttcaataaataataagaaagaatacagcaatcattccattttctcaccatctttagaggagcagactgcggtgtcaggagctgtgaatgattctataaaggctattgcttctattgctgaaaaatactttggttcaacaggactggtggggctgcaagacaaaaaagttggagctttaccttacccttccatgtttcccctcccattttttccagcattctctcaatcaatgtacccatttcctgatagagacttgagatcgttacctttgaaaatggaaccccaatcaccaggtgaagtaaagaaactgcagaagggcagctctgagtccccctttgatctcaccactaagcgaaaggatgagaagcccttgactccagtcccctccaagcctccagtgacacctgccacaagccaagaccagcccctggatctaagtatgggcagtaggagtagagccagtgggacaaagctgactgagcctcgaaaaaaccacgtgtttgggggaaaaaaaggaagcaacgtcgaatcaagacctgcttcagatggttccttgcagcatgcaagacccactcctttctttatggaccctatttacagagtagagaaaagaaaactaactgacccacttgaagctttaaaagagaaatacttgaggccttctccaggattcttgtttcacccacaattccaactgcctgatcagagaacttggatgtcagctattgaaaacatggcagaaaagctagagagcttcagtgccctgaaacctgaggccagtgagctcttacagtcagtgccctctatgttcaacttcagggcgcctcccaatgccctgccagagaaccttctgcggaagggaaaggagcgctatacctgcagatactgtggcaagatttttccaaggtctgcaaacctaacacggcacttgagaacccacacaggagagcagccttacagatgcaaatactgtgacagatcatttagcatatcttctaacttgcaaaggcatgttcgcaacatccacaataaagagaagccatttaagtgtcacttatgtgataggtgttttggtcaacaaaccaatttagacagacacctaaagaaacatgagaatgggaacatgtccggtacagcaacatcgtcgcctcattctgaactggaaagtacaggtgcgattctggatgacaaagaagatgcttacttcacagaaattcgaaatttcattgggaacagcaaccatggcagccaatctcccaggaatgtggaggagagaatgaatggcagtcattttaaagatgaaaaggctttggtgaccagtcaaaattcagacttgctggatgatgaagaagttgaagatgaggtgttgttagatgaggaggatgaagacaatgatattactggaaaaacaggaaaggaaccagtgacaagtaatttacatgaaggaaaccctgaggatgactatgaagaaaccagtgccctggagatgagttgcaagacatccccagtgaggtataaagaggaagaatataaaagtggactttctgctctagatcatataaggcacttcacagatagcctcaaaatgaggaaaatggaagataatcaatattctgaagctgagctgtcttcttttagtacttcccatgtgccagaggaacttaagcagccgttacacagaaagtccaaatcgcaggcatatgctatgatgctgtcactgtctgacaaggagtccctccattctacatcccacagttcttccaacgtgtggcacagtatggccagggctgcggcggaatccagtgctatccagtccataagccacgtatgacgttatcaaggttgaccagagtgggaccaagtccaacagtagcatggctctttcatataggactatttacaagactgctgagcagaatgccttataaacctgcagggtcactcatctaaagtctagtgaccttaaactgaatgattt

SEQ ID NO: 152106 - DNA, 3593 bp, Homo sapiens
  Payload ID: 9933
  Gene Symbol: MECOM
  Gene Name: MDS1 and EVI1 complex locus
  ENST ID: ENST00000472280
  CDS Start-End: 270-3428
ccttgccaagtaacagctttgctgtccaacatcgtgtgctgcttcgcgagaaagtcacattcggaccctttggctagattatcttagacgaattttacaatgtgaagttctgcatagatgccagtcaaccagatgttggaagctggctcaagtacattagattcgctggctgttatgatcagcacaaccttgttgcatgccagataaatgatcagatattctatagagtagttgcagacattgcgccgggagaggagcttctgctgttcatgaagagcgaagactatccccatgaaactatggcgccggatatccacgaagaacggcaatatcgctgcgaagactgtgaccagctctttgaatctaaggctgaactagcagatcaccaaaagtttccatgcagtactcctcactcagcattttcaatggttgaagaggactttcagcaaaaactcgaaagcgagaatgatctccaagagatacacacgatccaggagtgtaaggaatgtgaccaagtttttcctgatttgcaaagcctggagaaacacatgctgtcacatactgaagagagggaatacaagtgtgatcagtgtcccaaggcatttaactggaagtccaatttaattcgccaccagatgtcacatgacagtggaaagcactatgaatgtgaaaactgtgccaagcaggttttcacggaccctagcaaccttcagcggcacattcgctctcagcatgtcggtgcccgggcccatgcatgcccggagtgtggcaaaacgtttgccacttcgtcgggcctcaaacaacacaagcacatccacagcagtgtgaagccctttatctgtgaggtctgccataaatcctatactcagttttcaaacctttgccgtcataagcgcatgcatgctgattgcagaacccaaatcaagtgcaaagactgtggacaaatgttcagcactacgtcttccttaaataaacacaggaggttttgtgagggcaagaaccattttgcggcaggtggattttttggccaaggcatttcacttcctggaaccccagctatggataaaacgtccatggttaatatgagtcatgccaacccgggccttgctgactattttggcgccaataggcatcctgctggtcttacctttccaacagctcctggattttcttttagcttccctggtctgtttccttccggcttgtaccacaggcctcctttgatacctgctagttctcctgttaaaggactatcaagtactgaacagacaaacaaaagtcaaagtcccctcatgacacatcctcagatactgccagctacacaggatattttgaaggcactatctaaacacccatctgtaggggacaataagccagtggagctccagcccgagaggtcctctgaagagaggccctttgagaaaatcagtgaccagtcagagagtagtgaccttgatgatgtcagtacaccaagtggcagtgacctggaaacaacctcgggctctgatctggaaagtgacattgaaagtgataaagagaaatttaaagaaaatggtaaaatgttcaaagacaaagtaagccctcttcagaatctggcttcaataaataataagaaagaatacagcaatcattccattttctcaccatctttagaggagcagactgcggtgtcaggagctgtgaatgattctataaaggctattgcttctattgctgaaaaatactttggttcaacaggactggtggggctgcaagacaaaaaagttggagctttaccttacccttccatgtttcccctcccattttttccagcattctctcaatcaatgtacccatttcctgatagagacttgagatcgttacctttgaaaatggaaccccaatcaccaggtgaagtaaagaaactgcagaagggcagctctgagtccccctttgatctcaccactaagcgaaaggatgagaagcccttgactccagtcccctccaagcctccagtgacacctgccacaagccaagaccagcccctggatctaagtatgggcagtaggagtagagccagtgggacaaagctgactgagcctcgaaaaaaccacgtgtttgggggaaaaaaaggaagcaacgtcgaatcaagacctgcttcagatggttccttgcagcatgcaagacccactcctttctttatggaccctatttacagagtagagaaaagaaaactaactgacccacttgaagctttaaaagagaaatacttgaggccttctccaggattcttgtttcacccacaattccaactgcctgatcagagaacttggatgtcagctattgaaaacatggcagaaaagctagagagcttcagtgccctgaaacctgaggccagtgagctcttacagtcagtgccctctatgttcaacttcagggcgcctcccaatgccctgccagagaaccttctgcggaagggaaaggagcgctatacctgcagatactgtggcaagatttttccaaggtctgcaaacctaacacggcacttgagaacccacacaggagagcagccttacagatgcaaatactgtgacagatcatttagcatatcttctaacttgcaaaggcatgttcgcaacatccacaataaagagaagccatttaagtgtcacttatgtgataggtgttttggtcaacaaaccaatttagacagacacctaaagaaacatgagaatgggaacatgtccggtacagcaacatcgtcgcctcattctgaactggaaagtacaggtgcgattctggatgacaaagaagatgcttacttcacagaaattcgaaatttcattgggaacagcaaccatggcagccaatctcccaggaatgtggaggagagaatgaatggcagtcattttaaagatgaaaaggctttggtgaccagtcaaaattcagacttgctggatgatgaagaagttgaagatgaggtgttgttagatgaggaggatgaagacaatgatattactggaaaaacaggaaaggaaccagtgacaagtaatttacatgaaggaaaccctgaggatgactatgaagaaaccagtgccctggagatgagttgcaagacatccccagtgaggtataaagaggaagaatataaaagtggactttctgctctagatcatataaggcacttcacagatagcctcaaaatgaggaaaatggaagataatcaatattctgaagctgagctgtcttcttttagtacttcccatgtgccagaggaacttaagcagccgttacacagaaagtccaaatcgcaggcatatgctatgatgctgtcactgtctgacaaggagtccctccattctacatcccacagttcttccaacgtgtggcacagtatggccagggctgcggcggaatccagtgctatccagtccataagccacgtatgacgttatcaaggttgaccagagtgggaccaagtccaacagtagcatggctctttcatataggactatttacaagactgctgagcagaatgccttataaacctgcagggtcactcatctaaagtctagtgaccttaaactgaatgatttaaaaaagaaaagaaagaa

SEQ ID NO: 152107 - DNA, 1097 bp, Homo sapiens
  Payload ID: 9933
  Gene Symbol: MECOM
  Gene Name: MDS1 and EVI1 complex locus
  ENST ID: ENST00000494597
  CDS Start-End: 787-1097
tttgctgtccaacatcgtgtgctgcttcgcgagaaagtcacattcggaccctttggctagattgtggggatttttttttttttccttttgctgttggttttttgaaagggcctttctctaaagtctacctaaacggtttttttttaagctatctttggaggttgacagcttttaaaaacacaggagtgtgttatatgaaatgactgaagatgtgtcgttactttattttattcgagatttccgacacgattaagacatttgggagacaaatgcagttctgctagcaaatcaaaagtgaataattcacccagggggcaaacgtttctggagaaagctaagcttttgtcttggggcaagaatattgagaggaagaatgttaatatgatggtgaaatctttgaataatcgtataacagattagtaaaaagacattctttggaaatgaacctttttaaaaattaattttgctgttgacagtggcaatgctaataatgttaacacggaataaaattacacctacaatttttatgtgcagtgcttattcatagggcttcttgactaaagcccttggagcactgggtttttcttgaagtatatgatcttagacgaattttacaatgtgaagttctgcatagatgccagtcaaccagatgttggaagctggctcaagtacattagattcgctggctgttatgatcagcacaaccttgttgcatgccagataaatgatcagatattctatagagtagttgcagacattgcgccgggagaggagcttctgctgttcatgaagagcgaagactatccccatgaaactatggcgccggatatccacgaagaacggcaatatcgctgcgaagactgtgaccagctctttgaatctaaggctgaactagcagatcaccaaaagtttccatgcagtactcctcactcagcattttcaatggttgaagaggactttcagcaaaaactcgaaagcgagaatgatctccaagagatacacacgatccaggagtgtaaggaatgtgaccaagtttttcctgatttgcaaagcctggagaaacacatgctgtcacatactgaagagagggaatacaa

SEQ ID NO: 152108 - DNA, 3374 bp, Homo sapiens
  Payload ID: 9933
  Gene Symbol: MECOM
  Gene Name: MDS1 and EVI1 complex locus
  ENST ID: ENST00000460814
  CDS Start-End: 114-3125
aacatgttgttggaaaggaagctaataagttaaacctttgagagatgccaaaaaaagagatattctatagagtagttgcagacattgcgccgggagaggagcttctgctgttcatgaagagcgaagactatccccatgaaactatggcgccggatatccacgaagaacggcaatatcgctgcgaagactgtgaccagctctttgaatctaaggctgaactagcagatcaccaaaagtttccatgcagtactcctcactcagcattttcaatggttgaagaggactttcagcaaaaactcgaaagcgagaatgatctccaagagatacacacgatccaggagtgtaaggaatgtgaccaagtttttcctgatttgcaaagcctggagaaacacatgctgtcacatactgaagagagggaatacaagtgtgatcagtgtcccaaggcatttaactggaagtccaatttaattcgccaccagatgtcacatgacagtggaaagcactatgaatgtgaaaactgtgccaaggttttcacggaccctagcaaccttcagcggcacattcgctctcagcatgtcggtgcccgggcccatgcatgcccggagtgtggcaaaacgtttgccacttcgtcgggcctcaaacaacacaagcacatccacagcagtgtgaagccctttatctgtgaggtctgccataaatcctatactcagttttcaaacctttgccgtcataagcgcatgcatgctgattgcagaacccaaatcaagtgcaaagactgtggacaaatgttcagcactacgtcttccttaaataaacacaggaggttttgtgagggcaagaaccattttgcggcaggtggattttttggccaaggcatttcacttcctggaaccccagctatggataaaacgtccatggttaatatgagtcatgccaacccgggccttgctgactattttggcgccaataggcatcctgctggtcttacctttccaacagctcctggattttcttttagcttccctggtctgtttccttccggcttgtaccacaggcctcctttgatacctgctagttctcctgttaaaggactatcaagtactgaacagacaaacaaaagtcaaagtcccctcatgacacatcctcagatactgccagctacacaggatattttgaaggcactatctaaacacccatctgtaggggacaataagccagtggagctccagcccgagaggtcctctgaagagaggccctttgagaaaatcagtgaccagtcagagagtagtgaccttgatgatgtcagtacaccaagtggcagtgacctggaaacaacctcgggctctgatctggaaagtgacattgaaagtgataaagagaaatttaaagaaaatggtaaaatgttcaaagacaaagtaagccctcttcagaatctggcttcaataaataataagaaagaatacagcaatcattccattttctcaccatctttagaggagcagactgcggtgtcaggagctgtgaatgattctataaaggctattgcttctattgctgaaaaatactttggttcaacaggactggtggggctgcaagacaaaaaagttggagctttaccttacccttccatgtttcccctcccattttttccagcattctctcaatcaatgtacccatttcctgatagagacttgagatcgttacctttgaaaatggaaccccaatcaccaggtgaagtaaagaaactgcagaagggcagctctgagtccccctttgatctcaccactaagcgaaaggatgagaagcccttgactccagtcccctccaagcctccagtgacacctgccacaagccaagaccagcccctggatctaagtatgggcagtaggagtagagccagtgggacaaagctgactgagcctcgaaaaaaccacgtgtttgggggaaaaaaaggaagcaacgtcgaatcaagacctgcttcagatggttccttgcagcatgcaagacccactcctttctttatggaccctatttacagagtagagaaaagaaaactaactgacccacttgaagctttaaaagagaaatacttgaggccttctccaggattcttgtttcacccacaaatgtcagctattgaaaacatggcagaaaagctagagagcttcagtgccctgaaacctgaggccagtgagctcttacagtcagtgccctctatgttcaacttcagggcgcctcccaatgccctgccagagaaccttctgcggaagggaaaggagcgctatacctgcagatactgtggcaagatttttccaaggtctgcaaacctaacacggcacttgagaacccacacaggagagcagccttacagatgcaaatactgtgacagatcatttagcatatcttctaacttgcaaaggcatgttcgcaacatccacaataaagagaagccatttaagtgtcacttatgtgataggtgttttggtcaacaaaccaatttagacagacacctaaagaaacatgagaatgggaacatgtccggtacagcaacatcgtcgcctcattctgaactggaaagtacaggtgcgattctggatgacaaagaagatgcttacttcacagaaattcgaaatttcattgggaacagcaaccatggcagccaatctcccaggaatgtggaggagagaatgaatggcagtcattttaaagatgaaaaggctttggtgaccagtcaaaattcagacttgctggatgatgaagaagttgaagatgaggtgttgttagatgaggaggatgaagacaatgatattactggaaaaacaggaaaggaaccagtgacaagtaatttacatgaaggaaaccctgaggatgactatgaagaaaccagtgccctggagatgagttgcaagacatccccagtgaggtataaagaggaagaatataaaagtggactttctgctctagatcatataaggcacttcacagatagcctcaaaatgaggaaaatggaagataatcaatattctgaagctgagctgtcttcttttagtacttcccatgtgccagaggaacttaagcagccgttacacagaaagtccaaatcgcaggaggaaagtaaagcttaaaaggttaagcaacttgctcaagatcacacagctaggcatatgctatgatgctgtcactgtctgacaaggagtccctccattctacatcccacagttcttccaacgtgtggcacagtatggccagggctgcggcggaatccagtgctatccagtccataagccacgtatgacgttatcaaggttgaccagagtgggaccaagtccaacagtagcatggctctttcatataggactatttacaagactgct

SEQ ID NO: 152109 - DNA, 4835 bp, Homo sapiens
  Payload ID: 9933
  Gene Symbol: MECOM
  Gene Name: MDS1 and EVI1 complex locus
  Uniprot ID: Q03112
  ENST ID: ENST00000628990
  CDS Start-End: 270-3425
ccttgccaagtaacagctttgctgtccaacatcgtgtgctgcttcgcgagaaagtcacattcggaccctttggctagattatcttagacgaattttacaatgtgaagttctgcatagatgccagtcaaccagatgttggaagctggctcaagtacattagattcgctggctgttatgatcagcacaaccttgttgcatgccagataaatgatcagatattctatagagtagttgcagacattgcgccgggagaggagcttctgctgttcatgaagagcgaagactatccccatgaaactatggcgccggatatccacgaagaacggcaatatcgctgcgaagactgtgaccagctctttgaatctaaggctgaactagcagatcaccaaaagtttccatgcagtactcctcactcagcattttcaatggttgaagaggactttcagcaaaaactcgaaagcgagaatgatctccaagagatacacacgatccaggagtgtaaggaatgtgaccaagtttttcctgatttgcaaagcctggagaaacacatgctgtcacatactgaagagagggaatacaagtgtgatcagtgtcccaaggcatttaactggaagtccaatttaattcgccaccagatgtcacatgacagtggaaagcactatgaatgtgaaaactgtgccaaggttttcacggaccctagcaaccttcagcggcacattcgctctcagcatgtcggtgcccgggcccatgcatgcccggagtgtggcaaaacgtttgccacttcgtcgggcctcaaacaacacaagcacatccacagcagtgtgaagccctttatctgtgaggtctgccataaatcctatactcagttttcaaacctttgccgtcataagcgcatgcatgctgattgcagaacccaaatcaagtgcaaagactgtggacaaatgttcagcactacgtcttccttaaataaacacaggaggttttgtgagggcaagaaccattttgcggcaggtggattttttggccaaggcatttcacttcctggaaccccagctatggataaaacgtccatggttaatatgagtcatgccaacccgggccttgctgactattttggcgccaataggcatcctgctggtcttacctttccaacagctcctggattttcttttagcttccctggtctgtttccttccggcttgtaccacaggcctcctttgatacctgctagttctcctgttaaaggactatcaagtactgaacagacaaacaaaagtcaaagtcccctcatgacacatcctcagatactgccagctacacaggatattttgaaggcactatctaaacacccatctgtaggggacaataagccagtggagctccagcccgagaggtcctctgaagagaggccctttgagaaaatcagtgaccagtcagagagtagtgaccttgatgatgtcagtacaccaagtggcagtgacctggaaacaacctcgggctctgatctggaaagtgacattgaaagtgataaagagaaatttaaagaaaatggtaaaatgttcaaagacaaagtaagccctcttcagaatctggcttcaataaataataagaaagaatacagcaatcattccattttctcaccatctttagaggagcagactgcggtgtcaggagctgtgaatgattctataaaggctattgcttctattgctgaaaaatactttggttcaacaggactggtggggctgcaagacaaaaaagttggagctttaccttacccttccatgtttcccctcccattttttccagcattctctcaatcaatgtacccatttcctgatagagacttgagatcgttacctttgaaaatggaaccccaatcaccaggtgaagtaaagaaactgcagaagggcagctctgagtccccctttgatctcaccactaagcgaaaggatgagaagcccttgactccagtcccctccaagcctccagtgacacctgccacaagccaagaccagcccctggatctaagtatgggcagtaggagtagagccagtgggacaaagctgactgagcctcgaaaaaaccacgtgtttgggggaaaaaaaggaagcaacgtcgaatcaagacctgcttcagatggttccttgcagcatgcaagacccactcctttctttatggaccctatttacagagtagagaaaagaaaactaactgacccacttgaagctttaaaagagaaatacttgaggccttctccaggattcttgtttcacccacaattccaactgcctgatcagagaacttggatgtcagctattgaaaacatggcagaaaagctagagagcttcagtgccctgaaacctgaggccagtgagctcttacagtcagtgccctctatgttcaacttcagggcgcctcccaatgccctgccagagaaccttctgcggaagggaaaggagcgctatacctgcagatactgtggcaagatttttccaaggtctgcaaacctaacacggcacttgagaacccacacaggagagcagccttacagatgcaaatactgtgacagatcatttagcatatcttctaacttgcaaaggcatgttcgcaacatccacaataaagagaagccatttaagtgtcacttatgtgataggtgttttggtcaacaaaccaatttagacagacacctaaagaaacatgagaatgggaacatgtccggtacagcaacatcgtcgcctcattctgaactggaaagtacaggtgcgattctggatgacaaagaagatgcttacttcacagaaattcgaaatttcattgggaacagcaaccatggcagccaatctcccaggaatgtggaggagagaatgaatggcagtcattttaaagatgaaaaggctttggtgaccagtcaaaattcagacttgctggatgatgaagaagttgaagatgaggtgttgttagatgaggaggatgaagacaatgatattactggaaaaacaggaaaggaaccagtgacaagtaatttacatgaaggaaaccctgaggatgactatgaagaaaccagtgccctggagatgagttgcaagacatccccagtgaggtataaagaggaagaatataaaagtggactttctgctctagatcatataaggcacttcacagatagcctcaaaatgaggaaaatggaagataatcaatattctgaagctgagctgtcttcttttagtacttcccatgtgccagaggaacttaagcagccgttacacagaaagtccaaatcgcaggcatatgctatgatgctgtcactgtctgacaaggagtccctccattctacatcccacagttcttccaacgtgtggcacagtatggccagggctgcggcggaatccagtgctatccagtccataagccacgtatgacgttatcaaggttgaccagagtgggaccaagtccaacagtagcatggctctttcatataggactatttacaagactgctgagcagaatgccttataaacctgcagggtcactcatctaaagtctagtgaccttaaactgaatgatttaaaaaagaaaagaaagaaaaaagaaactatttattctcgatattttgttttgcacagcaaaggcagctgctgacttctggaagatcaatcaatgcgacttaaagtgattcagtgaaaacaaaaaacttggtgggctgaaggcatcttccagtttaccccaccttagggtatgggtgggtgagaagggcagttgagatggcagcattgatatgaatgaacactccatagaaactgaattctcttttgtacaagatcacctgacatgattgggaacagttgcttttaattacagatttaatttttttcttcgttaaagttttatgtaatttaaccctttgaagacagaagtagttggatgaaatgcacagtcaattattatagaaactgataacagggagtacttgttcccccttttgccttcttaagtacattgtttaaaactagggaaaaagggtatgtgtatattgtaaactatggatgttaacactcaaagaggttaagtcagtgaagtaacctattcatcaccagtaccgctgtaccactaataaattgtttgccaaatccttgtaataacatcttaattttagacaatcatgtcactgtttttaatgtttatttttttgtgtgtgttgcgtgtatcatgtatttatttgttggcaaactattgtttgttgattaaaatagcactgttccagtcagccactactttatgacgtctgaggcacacccctttccgaatttcaaggaccaaggtgacccgacctgtgtatgagagtgccaaatggtgtttggcttttcttaacattcctttttgtttgtttgttttgttttccttcttaatgaactaaatacgaatagatgcaacttagtttttgtaatactgaaatcgattcaattgtataaacgattataatttctttcatggaagcatgattcttctgattaaaaactgtactccatattttatgctggttgtctgcaagcttgtgcgatgttatgttcatgttaatcctatttgtaaaatgaagtgttcccaaccttatgttaaaagagagaagtaaataacagactgtattcagttattttgccctttattgaggaaccagatttgttttctttttgtttgtaatctcattttgaaataatcagcaagttgaggtactttcttcaaatgctttgtacaatataaactgttatgcctttcagtgcattactatgggaggagcaactaaaaaataaagacttacaaaaaggagtattttt

SEQ ID NO: 152110 - DNA, 8677 bp, Homo sapiens
  Payload ID: 9934
  Gene Symbol: MTOR
  Gene Name: mechanistic target of rapamycin (serine/threonine kinase)
  Uniprot ID: P42345
  ENST ID: ENST00000361445
  CDS Start-End: 78-7727
ggggcctgaagcggcggtaccggtgctggcggcggcagctgaggccttggccgaagccgcgcgaacctcagggcaagatgcttggaaccggacctgccgccgccaccaccgctgccaccacatctagcaatgtgagcgtcctgcagcagtttgccagtggcctaaagagccggaatgaggaaaccagggccaaagccgccaaggagctccagcactatgtcaccatggaactccgagagatgagtcaagaggagtctactcgcttctatgaccaactgaaccatcacatttttgaattggtttccagctcagatgccaatgagaggaaaggtggcatcttggccatagctagcctcataggagtggaaggtgggaatgccacccgaattggcagatttgccaactatcttcggaacctcctcccctccaatgacccagttgtcatggaaatggcatccaaggccattggccgtcttgccatggcaggggacacttttaccgctgagtacgtggaatttgaggtgaagcgagccctggaatggctgggtgctgaccgcaatgagggccggagacatgcagctgtcctggttctccgtgagctggccatcagcgtccctaccttcttcttccagcaagtgcaacccttctttgacaacatttttgtggccgtgtgggaccccaaacaggccatccgtgagggagctgtagccgcccttcgtgcctgtctgattctcacaacccagcgtgagccgaaggagatgcagaagcctcagtggtacaggcacacatttgaagaagcagagaagggatttgatgagaccttggccaaagagaagggcatgaatcgggatgatcggatccatggagccttgttgatccttaacgagctggtccgaatcagcagcatggagggagagcgtctgagagaagaaatggaagaaatcacacagcagcagctggtacacgacaagtactgcaaagatctcatgggcttcggaacaaaacctcgtcacattacccccttcaccagtttccaggctgtacagccccagcagtcaaatgccttggtggggctgctggggtacagctctcaccaaggcctcatgggatttgggacctcccccagtccagctaagtccaccctggtggagagccggtgttgcagagacttgatggaggagaaatttgatcaggtgtgccagtgggtgctgaaatgcaggaatagcaagaactcgctgatccaaatgacaatccttaatttgttgccccgcttggctgcattccgaccttctgccttcacagatacccagtatctccaagataccatgaaccatgtcctaagctgtgtcaagaaggagaaggaacgtacagcggccttccaagccctggggctactttctgtggctgtgaggtctgagtttaaggtctatttgcctcgcgtgctggacatcatccgagcggccctgcccccaaaggacttcgcccataagaggcagaaggcaatgcaggtggatgccacagtcttcacttgcatcagcatgctggctcgagcaatggggccaggcatccagcaggatatcaaggagctgctggagcccatgctggcagtgggactaagccctgccctcactgcagtgctctacgacctgagccgtcagattccacagctaaagaaggacattcaagatgggctactgaaaatgctgtccctggtccttatgcacaaaccccttcgccacccaggcatgcccaagggcctggcccatcagctggcctctcctggcctcacgaccctccctgaggccagcgatgtgggcagcatcactcttgccctccgaacgcttggcagctttgaatttgaaggccactctctgacccaatttgttcgccactgtgcggatcatttcctgaacagtgagcacaaggagatccgcatggaggctgcccgcacctgctcccgcctgctcacaccctccatccacctcatcagtggccatgctcatgtggttagccagaccgcagtgcaagtggtggcagatgtgcttagcaaactgctcgtagttgggataacagatcctgaccctgacattcgctactgtgtcttggcgtccctggacgagcgctttgatgcacacctggcccaggcggagaacttgcaggccttgtttgtggctctgaatgaccaggtgtttgagatccgggagctggccatctgcactgtgggccgactcagtagcatgaaccctgcctttgtcatgcctttcctgcgcaagatgctcatccagattttgacagagttggagcacagtgggattggaagaatcaaagagcagagtgcccgcatgctggggcacctggtctccaatgccccccgactcatccgcccctacatggagcctattctgaaggcattaattttgaaactgaaagatccagaccctgatccaaacccaggtgtgatcaataatgtcctggcaacaataggagaattggcacaggttagtggcctggaaatgaggaaatgggttgatgaactttttattatcatcatggacatgctccaggattcctctttgttggccaaaaggcaggtggctctgtggaccctgggacagttggtggccagcactggctatgtagtagagccctacaggaagtaccctactttgcttgaggtgctactgaattttctgaagactgagcagaaccagggtacacgcagagaggccatccgtgtgttagggcttttaggggctttggatccttacaagcacaaagtgaacattggcatgatagaccagtcccgggatgcctctgctgtcagcctgtcagaatccaagtcaagtcaggattcctctgactatagcactagtgaaatgctggtcaacatgggaaacttgcctctggatgagttctacccagctgtgtccatggtggccctgatgcggatcttccgagaccagtcactctctcatcatcacaccatggttgtccaggccatcaccttcatcttcaagtccctgggactcaaatgtgtgcagttcctgccccaggtcatgcccacgttccttaacgtcattcgagtctgtgatggggccatccgggaatttttgttccagcagctgggaatgttggtgtcctttgtgaagagccacatcagaccttatatggatgaaatagtcaccctcatgagagaattctgggtcatgaacacctcaattcagagcacgatcattcttctcattgagcaaattgtggtagctcttgggggtgaatttaagctctacctgccccagctgatcccacacatgctgcgtgtcttcatgcatgacaacagcccaggccgcattgtctctatcaagttactggctgcaatccagctgtttggcgccaacctggatgactacctgcatttactgctgcctcctattgttaagttgtttgatgcccctgaagctccactgccatctcgaaaggcagcgctagagactgtggaccgcctgacggagtccctggatttcactgactatgcctcccggatcattcaccctattgttcgaacactggaccagagcccagaactgcgctccacagccatggacacgctgtcttcacttgtttttcagctggggaagaagtaccaaattttcattccaatggtgaataaagttctggtgcgacaccgaatcaatcatcagcgctatgatgtgctcatctgcagaattgtcaagggatacacacttgctgatgaagaggaggatcctttgatttaccagcatcggatgcttaggagtggccaaggggatgcattggctagtggaccagtggaaacaggacccatgaagaaactgcacgtcagcaccatcaacctccaaaaggcctggggcgctgccaggagggtctccaaagatgactggctggaatggctgagacggctgagcctggagctgctgaaggactcatcatcgccctccctgcgctcctgctgggccctggcacaggcctacaacccgatggccagggatctcttcaatgctgcatttgtgtcctgctggtctgaactgaatgaagatcaacaggatgagctcatcagaagcatcgagttggccctcacctcacaagacatcgctgaagtcacacagaccctcttaaacttggctgaattcatggaacacagtgacaagggccccctgccactgagagatgacaatggcattgttctgctgggtgagagagctgccaagtgccgagcatatgccaaagcactacactacaaagaactggagttccagaaaggccccacccctgccattctagaatctctcatcagcattaataataagctacagcagccggaggcagcggccggagtgttagaatatgccatgaaacactttggagagctggagatccaggctacctggtatgagaaactgcacgagtgggaggatgcccttgtggcctatgacaagaaaatggacaccaacaaggacgacccagagctgatgctgggccgcatgcgctgcctcgaggccttgggggaatggggtcaactccaccagcagtgctgtgaaaagtggaccctggttaatgatgagacccaagccaagatggcccggatggctgctgcagctgcatggggtttaggtcagtgggacagcatggaagaatacacctgtatgatccctcgggacacccatgatggggcattttatagagctgtgctggcactgcatcaggacctcttctccttggcacaacagtgcattgacaaggccagggacctgctggatgctgaattaactgcgatggcaggagagagttacagtcgggcatatggggccatggtttcttgccacatgctgtccgagctggaggaggttatccagtacaaacttgtccccgagcgacgagagatcatccgccagatctggtgggagagactgcagggctgccagcgtatcgtagaggactggcagaaaatccttatggtgcggtcccttgtggtcagccctcatgaagacatgagaacctggctcaagtatgcaagcctgtgcggcaagagtggcaggctggctcttgctcataaaactttagtgttgctcctgggagttgatccgtctcggcaacttgaccatcctctgccaacagttcaccctcaggtgacctatgcctacatgaaaaacatgtggaagagtgcccgcaagatcgatgccttccagcacatgcagcattttgtccagaccatgcagcaacaggcccagcatgccatcgctactgaggaccagcagcataagcaggaactgcacaagctcatggcccgatgcttcctgaaacttggagagtggcagctgaatctacagggcatcaatgagagcacaatccccaaagtgctgcagtactacagcgccgccacagagcacgaccgcagctggtacaaggcctggcatgcgtgggcagtgatgaacttcgaagctgtgctacactacaaacatcagaaccaagcccgcgatgagaagaagaaactgcgtcatgccagcggggccaacatcaccaacgccaccactgccgccaccacggccgccactgccaccaccactgccagcaccgagggcagcaacagtgagagcgaggccgagagcaccgagaacagccccaccccatcgccgctgcagaagaaggtcactgaggatctgtccaaaaccctcctgatgtacacggtgcctgccgtccagggcttcttccgttccatctccttgtcacgaggcaacaacctccaggatacactcagagttctcaccttatggtttgattatggtcactggccagatgtcaatgaggccttagtggagggggtgaaagccatccagattgatacctggctacaggttatacctcagctcattgcaagaattgatacgcccagacccttggtgggacgtctcattcaccagcttctcacagacattggtcggtaccacccccaggccctcatctacccactgacagtggcttctaagtctaccacgacagcccggcacaatgcagccaacaagattctgaagaacatgtgtgagcacagcaacaccctggtccagcaggccatgatggtgagcgaggagctgatccgagtggccatcctctggcatgagatgtggcatgaaggcctggaagaggcatctcgtttgtactttggggaaaggaacgtgaaaggcatgtttgaggtgctggagcccttgcatgctatgatggaacggggcccccagactctgaaggaaacatcctttaatcaggcctatggtcgagatttaatggaggcccaagagtggtgcaggaagtacatgaaatcagggaatgtcaaggacctcacccaagcctgggacctctattatcatgtgttccgacgaatctcaaagcagctgcctcagctcacatccttagagctgcaatatgtttccccaaaacttctgatgtgccgggaccttgaattggctgtgccaggaacatatgaccccaaccagccaatcattcgcattcagtccatagcaccgtctttgcaagtcatcacatccaagcagaggccccggaaattgacacttatgggcagcaacggacatgagtttgttttccttctaaaaggccatgaagatctgcgccaggatgagcgtgtgatgcagctcttcggcctggttaacacccttctggccaatgacccaacatctcttcggaaaaacctcagcatccagagatacgctgtcatccctttatcgaccaactcgggcctcattggctgggttccccactgtgacacactgcacgccctcatccgggactacagggagaagaagaagatccttctcaacatcgagcatcgcatcatgttgcggatggctccggactatgaccacttgactctgatgcagaaggtggaggtgtttgagcatgccgtcaataatacagctggggacgacctggccaagctgctgtggctgaaaagccccagctccgaggtgtggtttgaccgaagaaccaattatacccgttctttagcggtcatgtcaatggttgggtatattttaggcctgggagatagacacccatccaacctgatgctggaccgtctgagtgggaagatcctgcacattgactttggggactgctttgaggttgctatgacccgagagaagtttccagagaagattccatttagactaacaagaatgttgaccaatgctatggaggttacaggcctggatggcaactacagaatcacatgccacacagtgatggaggtgctgcgagagcacaaggacagtgtcatggccgtgctggaagcctttgtctatgaccccttgctgaactggaggctgatggacacaaataccaaaggcaacaagcgatcccgaacgaggacggattcctactctgctggccagtcagtcgaaattttggacggtgtggaacttggagagccagcccataagaaaacggggaccacagtgccagaatctattcattctttcattggagacggtttggtgaaaccagaggccctaaataagaaagctatccagattattaacagggttcgagataagctcactggtcgggacttctctcatgatgacactttggatgttccaacgcaagttgagctgctcatcaaacaagcgacatcccatgaaaacctctgccagtgctatattggctggtgccctttctggtaactggaggcccagatgtgcccatcacgttttttctgaggcttttgtactttagtaaatgcttccactaaactgaaaccatggtgagaaagtttgactttgttaaatattttgaaatgtaaatgaaaagaactactgtatattaaaagttggtttgaaccaactttctagctgctgttgaagaatatattgtcagaaacacaaggcttgatttggttcccaggacagtgaaacatagtaataccacgtaaatcaagccattcattttggggaacagaagatccataactttagaaatacgggttttgacttaactcacaagagaactcatcataagtacttgctgatggaagaatgacctagttgctcctctcaacatgggtacagcaaactcagcacagccaagaagcctcaggtcgtggagaacatggattaggatcctagactgtaaagacacagaagatgctgacctcacccctgccacctatcccaagacctcactggtctgtggacagcagcagaaatgtttgcaagataggccaaaatgagtacaaaaggtctgtcttccatcagacccagtgatgctgcgactcacacgcttcaattcaagacctgaccgctagtagggaggtttattcagatcgctggcagcctcggctgagcagatgcacagaggggatcactgtgcagtgggaccaccctcactggccttctgcagcagggttctgggatgttttcagtggtcaaaatactctgtttagagcaagggctcagaaaacagaaatactgtcatggaggtgctgaacacagggaaggtctggtacatattggaaattatgagcagaacaaatactcaactaaatgcacaaagtataaagtgtagccatgtctagacaccatgttgtatcagaataatttttgtgccaataaatgacatcagaattttaaacata

SEQ ID NO: 152111 - DNA, 4017 bp, Homo sapiens
  Payload ID: 9934
  Gene Symbol: MTOR
  Gene Name: mechanistic target of rapamycin (serine/threonine kinase)
  ENST ID: ENST00000376838
  CDS Start-End: 803-3067
ctttctctgtcaggctcctatgctcttcatgtcttcctttgtccactatctggtgacctgtcaaaactttgctcccttgaaatattgtgatgactgctgcttgcccccacttctgcttgccatttctgctctcccctaaatgtacactttatacccagtgcagctctgctttctgggtgaaagtgccagccctgtgcctgctccaggcgtgctttgctggcctcgctctcactcctcgcctgcatgtatcccctgcacggtcacattcatgggcttgtttcccgtgaaccaatctgcacatctctggccttattcttcccccttgccaagtagtccccaccgctgccttcttgtttccctccttgcccttctgcagctctcttccagacctaccccaaatccctcttcttgacaaagctttccaaatgcctgtccttgctactcccattgtgccttgcagagtacctaggtcttcaggtttgtgcgtgagctcccctaggaggccgggagatcccttgaggcaagagctctctcctgctcctcttgctgtgcccttctcgcagtgcactcatagtacgttatatagttagtgctccacaaagtgagtggatcatgttgaatttagtaaaacagccatttctgagtgtctccttgaagtgtttgctttatggacacacagaacaggcaggagcagctgttcctcagcatcgaccttgcgctcctctgagccctgctgttggtcacagctccagtgtctgtccttgcctttctccccaaccaggcctggcatgcgtgggcagtgatgaacttcgaagctgtgctacactacaaacatcagaaccaagcccgcgatgagaagaagaaactgcgtcatgccagcggggccaacatcaccaacgccaccactgccgccaccacggccgccactgccaccaccactgccagcaccgagggcagcaacagtgagagcgaggccgagagcaccgagaacagccccaccccatcgccgctgcagaagaaggtcactgaggatctgtccaaaaccctcctgatgtacacggtgcctgccgtccagggcttcttccgttccatctccttgtcacgaggcaacaacctccaggatacactcagagttctcaccttatggtttgattatggtcactggccagatgtcaatgaggccttagtggagggggtgaaagccatccagattgatacctggctacaggttatacctcagctcattgcaagaattgatacgcccagacccttggtgggacgtctcattcaccagcttctcacagacattggtcggtaccacccccaggccctcatctacccactgacagtggcttctaagtctaccacgacagcccggcacaatgcagccaacaagattctgaagaacatgtgtgagcacagcaacaccctggtccagcaggccatgatggtgagcgaggagctgatccgagtggccatcctctggcatgagatgtggcatgaaggcctggaagaggcatctcgtttgtactttggggaaaggaacgtgaaaggcatgtttgaggtgctggagcccttgcatgctatgatggaacggggcccccagactctgaaggaaacatcctttaatcaggcctatggtcgagatttaatggaggcccaagagtggtgcaggaagtacatgaaatcagggaatgtcaaggacctcacccaagcctgggacctctattatcatgtgttccgacgaatctcaaagcagctgcctcagctcacatccttagagctgcaatatgtttccccaaaacttctgatgtgccgggaccttgaattggctgtgccaggaacatatgaccccaaccagccaatcattcgcattcagtccatagcaccgtctttgcaagtcatcacatccaagcagaggccccggaaattgacacttatgggcagcaacggacatgagtttgttttccttctaaaaggccatgaagatctgcgccaggatgagcgtgtgatgcagctcttcggcctggttaacacccttctggccaatgacccaacatctcttcggaaaaacctcagcatccagagatacgctgtcatccctttatcgaccaactcgggcctcattggctgggttccccactgtgacacactgcacgccctcatccgggactacagggagaagaagaagatccttctcaacatcgagcatcgcatcatgttgcggatggctccggactatgaccacttgactctgatgcagaaggtggaggtgtttgagcatgccgtcaataatacagctggggacgacctggccaagctgctgtggctgaaaagccccagctccgaggtgtggtttgaccgaagaaccaattatacccgttctttagcggtcatgtcaatggttgggtatattttaggcctgggagatagacacccatccaacctgatgctggaccgtctgagtgggaagatcctgcacattgactttggggactgctttgaggttgctatgacccgagagaagtttccagagaagattccatttagactaacaagaatgttgaccaatgctatggaggttacaggcctggatggcaactacagaatcacatgccacacagtgatggaggtgctgcgagagcacaaggacagtgtcatggccgtgctggaagcctttgtctatgaccccttgctgaactggaggctgatggacacaaataccaaaggcaacaagcgatcccgaacgaggacggattcctactctgctggccagtcagtcgaaattttggacggtgtggaacttggagagccagcccataagaaaacggggaccacagtgccagaatctattcattctttcattggagacggtttggtgaaaccagaggccctaaataagaaagctatccagattattaacagggttcgagataagctcactggtcgggacttctctcatgatgacactttggatgttccaacgcaagttgagctgctcatcaaacaagcgacatcccatgaaaacctctgccagtgctatattggctggtgccctttctggtaactggaggcccagatgtgcccatcacgttttttctgaggcttttgtactttagtaaatgcttccactaaactgaaaccatggtgagaaagtttgactttgttaaatattttgaaatgtaaatgaaaagaactactgtatattaaaagttggtttgaaccaactttctagctgctgttgaagaatatattgtcagaaacacaaggcttgatttggttcccaggacagtgaaacatagtaataccacgtaaatcaagccattcattttggggaacagaagatccataactttagaaatacgggttttgacttaactcacaagagaactcatcataagtacttgctgatggaagaatgacctagttgctcctctcaacatgggtacagcaaactcagcacagccaagaagcctcaggtcgtggagaacatggattaggatcctagactgtaaagacacagaagatgctgacctcacccctgccacctatcccaagacctcactggtctgtggacagcagcagaaatgtttgcaagataggccaaaatgagtacaaaaggtctgtcttccatcagacccagtgatgctgcgactcacacgcttcaattcaagacctgaccgctagtagggaggtttattcagatcgctggcagcctcggctgagcagatgcacagaggggatcactgtgcagtgggaccaccctcactggccttctgcagcagggttctgggatgttttcagtggtcaaaatactctgtttagagcaagggctcagaaaacagaaatactgtcatggaggtgctgaacacagggaaggtctggtacatattggaaattatgagcagaacaaatactcaactaaatgcacaaagtataaagtgtagccatgtctagacaccatgttgtatcagaataatttttgtgccaataaatgacatcagaattttaaacata

SEQ ID NO: 152112 - DNA, 694 bp, Homo sapiens
  Payload ID: 9934
  Gene Symbol: MTOR
  Gene Name: mechanistic target of rapamycin (serine/threonine kinase)
  ENST ID: ENST00000455339
  CDS Start-End: 212-694
cctggaacagtacttaaacaagggagcgtgctgtgtgttccagtaaaactggacttgcagaagtggaggtggaggggctggattggctgagggctatcgtttgccaactcctagcttacagtatcacgtacttattgattttttcatccgttatctctgttgatccctccctgatctgtcttctgtttctcaaagacacccatccaacctgatgctggaccgtctgagtgggaagatcctgcacattgactttggggactgctttgaggttgctatgacccgagagaagtttccagagaagattccatttagactaacaagaatgttgaccaatgctatggaggttacaggcctggatggcaactacagaatcacatgccacacagtgatggaggtgctgcgagagcacaaggacagtgtcatggccgtgctggaagcctttgtctatgaccccttgctgaactggaggctgatggacacaaataccaaaggcaacaagcgatcccgaacgaggacggattcctactctgctggccagtcagtcgaaattttggacggtgtggaacttggagagccagcccataagaaaacggggaccacagtgccagaatctattcattctttcattggagacggtttggtgaaaccagaggccctaaataagaaagctatccagattattaacagggttcga

SEQ ID NO: 152113 - DNA, 2091 bp, Homo sapiens
  Payload ID: 9935
  Gene Symbol: MKS1
  Gene Name: Meckel syndrome, type 1
  ENST ID: ENST00000313863
  CDS Start-End: 3-1373
tcatggcggagaccgtctggagcactgacaccggggaggcagtgtatcgctcccgggaccccgtgcgcaacttgcgcctccgagtccacctgcaaagaatcacatcaagcaactttcttcattatcagcctgctgccgagctcgggaaggacctcatagacttggccacttttaggcctcagccaactgccagtggacaccgcccagaggaagacgaagaggaggagattgtgattgggtggcaggagaagctctttagccagtttgaagtagatctgtaccaaaatgaaacagcctgtcagagtcctttggattatcagtaccgtcaggagatcctgaagctggagaattcgggtggcaagaaaaaccgacgaatctttacctacactgactctgatagatacaccaatttggaggagcactgtcagagaatgaccactgcagccagcgaggtgccttcattcttggtcgagcgaatggcaaatgtcaggcgtcgccggcaggacaggcgagggatggagggcggcatcctcaagtcacgcatcgtcacctgggagccctcagaagagtttgtcaggaacaaccacgtcattaacacccctcttcagacaatgcacatcatggcagacctggggccctataaaaagcttggctataagaagtatgaacatgtcctgtgtactctgaaggtggatagcaatggtgtgatcacagtaaagcctgacttcacgggcctcaaaggaccctacaggattgagacggagggggagaagcaggagctgtggaaatatacgatcgacaatgtttccccccacgcacagccggaggaggaggagcgggaacggcgagtgttcaaggatctttatggccggcacaaggagtatctcagcagcctcgtaggcaccgactttgagatgactgtcccaggtgccctccggctctttgtaaatggagaggtcgtttcagcccaaggctatgagtatgacaatctctacgtccacttctttgtagaattgccaactgctcactggtcaagcccagcattccagcagctctcaggagtaacacagacctgcaccaccaagtccctggcaatggacaaggtggctcacttctcctacccattcacgtttgaagccttcttcctccatgaggatgaatcttctgatgcactcccggagtggcctgtgctctactgtgaggtcctctcgctggacttctggcagaggtaccgtgtggaaggctatggggctgtggtgctgcctgccactccagggccttcatggaatcgagctcccttcagaaaaggatgcggagtgtgttggaccgtctggaagggttcagccagcagagttccattcacaatgtgctagaggccttccgtcgagcccggcgccgcatgcaggaggcccgggaaagcctcccgcaggacctagtgagcccctctggaaccctggtctcctagctcacagcagccctggcccacagtgcaagaggacaagatgggggatatctgaggccagtgctctcctgcctcttcgtctttctgattagagaccacgttggtctgctgagaaccagaaaagctgggaaattcccggctggcccctctgcctagccttctgcagggtcttctccctaccctgtggaaataaagccagagaccctgtggccccccctttatatttgcagccactgtcaatgggcatcacagcaaggcaggctttttgatctgaagctgtttggggtgaccccatagtgagtctggccttgactcacttttctggcttgtctcacagtagcaggggatctgctgttctccaccctttaaaaatggagcctttcatcttccaagaccaaagaaggaaggaaggtggacggtgagagggtcttaaatccccagcctgtgagtctcagcctctttccagggaagcctcattctactgcttggggcttgctgaggttgagatatgagttatttctgagtaagtgaaggctgaaggcagtgctgagtcctttctgctagctgggtggtatcttttactgtgtttttttgtttgtttgtttttttgttttttgttacataaaccc

SEQ ID NO: 152114 - DNA, 2397 bp, Homo sapiens
  Payload ID: 9935
  Gene Symbol: MKS1
  Gene Name: Meckel syndrome, type 1
  Uniprot ID: Q9NXB0
  ENST ID: ENST00000393119
  CDS Start-End: 76-1755
ccgatccagcgtctccgttgccaggaaaacagagcggcgcgctttccggcgcagtcgcggcgcgtcgcagctgtcatggcggagaccgtctggagcactgacaccggggaggcagtgtatcgctcccgggaccccgtgcgcaacttgcgcctccgagtccacctgcaaagaatcacatcaagcaactttcttcattatcagcctgctgccgagctcgggaaggacctcatagacttggccacttttaggcctcagccaactgccagtggacaccgcccagaggaagacgaagaggaggagattgtgattgggtggcaggagaagctctttagccagtttgaagtagatctgtaccaaaatgaaacagcctgtcagagtcctttggattatcagtaccgtcaggagatcctgaagctggagaattcgggtggcaagaaaaaccgacgaatctttacctacactgactctgatagatacaccaatttggaggagcactgtcagagaatgaccactgcagccagcgaggtgccttcattcttggtcgagcgaatggcaaatgtcaggcgtcgccggcaggacaggcgagggatggagggcggcatcctcaagtcacgcatcgtcacctgggagccctcagaagagtttgtcaggaacaaccacgtcattaacacccctcttcagacaatgcacatcatggcagacctggggccctataaaaagcttggctataagaagtatgaacatgtcctgtgtactctgaaggtggatagcaatggtgtgatcacagtaaagcctgacttcacgggcctcaaaggaccctacaggattgagacggagggggagaagcaggagctgtggaaatatacgatcgacaatgtttccccccacgcacagccggaggaggaggagcgggaacggcgagtgttcaaggatctttatggccggcacaaggagtatctcagcagcctcgtaggcaccgactttgagatgactgtcccaggtgccctccggctctttgtaaatggagaggtcgtttcagcccaaggctatgagtatgacaatctctacgtccacttctttgtagaattgccaactgctcactggtcaagcccagcattccagcagctctcaggagtaacacagacctgcaccaccaagtccctggcaatggacaaggtggctcacttctcctacccattcacgtttgaagccttcttcctccatgaggatgaatcttctgatgcactcccggagtggcctgtgctctactgtgaggtcctctcgctggacttctggcagaggtaccgtgtggaaggctatggggctgtggtgctgcctgccactccaggctcacacaccctgacagtctccacgtggagacctgtggagcttggcacggtggctgagctgaggaggtttttcattggcggttctctggaactggaggacctctcctatgtacggataccaggatccttcaagggggaacgcctgagccgctttggactccgcacagagaccacaggcactgtcaccttccgcttgcactgtctgcagcagtccagggccttcatggaatcgagctcccttcagaaaaggatgcggagtgtgttggaccgtctggaagggttcagccagcagagttccattcacaatgtgctagaggccttccgtcgagcccggcgccgcatgcaggaggcccgggaaagcctcccgcaggacctagtgagcccctctggaaccctggtctcctagctcacagcagccctggcccacagtgcaagaggacaagatgggggatatctgaggccagtgctctcctgcctcttcgtctttctgattagagaccacgttggtctgctgagaaccagaaaagctgggaaattcccggctggcccctctgcctagccttctgcagggtcttctccctaccctgtggaaataaagccagagaccctgtggccccccctttatatttgcagccactgtcaatgggcatcacagcaaggcaggctttttgatctgaagctgtttggggtgaccccatagtgagtctggccttgactcacttttctggcttgtctcacagtagcaggggatctgctgttctccaccctttaaaaatggagcctttcatcttccaagaccaaagaaggaaggaaggtggacggtgagagggtcttaaatccccagcctgtgagtctcagcctctttccagggaagcctcattctactgcttggggcttgctgaggttgagatatgagttatttctgagtaagtgaaggctgaaggcagtgctgagtcctttctgctagctgggtggtatcttttactgtgtttttttgtttgtttgtttttttgttttttgttacataaaccccttttattttgactga

SEQ ID NO: 152115 - DNA, 1926 bp, Homo sapiens
  Payload ID: 9935
  Gene Symbol: MKS1
  Gene Name: Meckel syndrome, type 1
  ENST ID: ENST00000393120
  CDS Start-End: 7-501
gctgtcatggcggagaccgtctggagcactgacaccggggaggcagtgtatcgctcccgggaccccgtgcgcaacttgcgcctccgagtccacctgcaaagaatcacatcaagcaactttcttcattatcagcctgctgccgagctcgggaaggacctcatagacttggccacttttaggcctcagccaactgccagtggacaccgcccagaggaagacgaagaggaggagattgtgattgggtggcaggagaagctctttagccagtttgaagtagatctgtaccaaaatgaaacagcctgtcagagtcctttggattatcagtaccgtcaggagatcctgaagctggagaattcgggtggcaagaaaaaccgacgaatctttacctacactgactctgatagatacaccaatttggaggagggagggcggcatcctcaagtcacgcatcgtcacctgggagccctcagaagagtttgtcaggaacaaccacgtcattaacacccctcttcagacaatgcacatcatggcagacctggggccctataaaaagcttggctataagaagtatgaacatgtcctgtgtactctgaaggtggatagcaatggtgtgatcacagtaaagcctgacttcacgggcctcaaaggaccctacaggattgagacggagggggagaagcaggagctgtggaaatatacgatcgacaatgtttccccccacgcacagccggaggaggaggagcgggaacggcgagtgttcaaggatctttatggccggcacaaggagtatctcagcagcctcgtaggcaccgactttgagatgactgtcccaggtgccctccggctctttgtaaatggagaggtcgtttcagcccaaggctatgagtatgacaatctctacgtccacttctttgtagaattgccaactgctcactggtcaagcccagcattccagcagctctcaggagtaacacagacctgcaccaccaagtccctggcaatggacaaggtggctcacttctcctacccattcacgtttgaagccttcttcctccatgaggatgaatcttctgatgcactcccggagtggcctgtgctctactgtgaggtcctctcgctggacttctggcagaggtaccgtgtggaaggctatggggctgtggtgctgcctgccactccaggctcacacaccctgacagtctccacgtggagacctgtggagcttggcacggtggctgagctgaggaggtttttcattggcggttctctggaactggaggacctctcctatgtacggataccaggatccttcaagggggaacgcctgagccgctttggactccgcacagagaccacaggcactgtcaccttccgcttgcactgtctgcagcagtccagggccttcatggaatcgagctcccttcagaaaaggatgcggagtgtgttggaccgtctggaagggttcagccagcagagttccattcacaatgtgctagaggccttccgtcgagcccggcgccgcatgcaggaggcccgggaaagcctcccgcaggacctagtgagcccctctggaaccctggtctcctagctcacagcagccctggcccacagtgcaagaggacaagatgggggatatctgaggccagtgctctcctgcctcttcgtctttctgattagagaccacgttggtctgctgagaaccagaaaagctgggaaattcccggctggcccctctgcctagccttctgcagggtcttctccctaccctgtggaaataaagccagagaccctgtggccccccctttatatttgcagccactgtcaatgggcatcacagcaaggcaggctttttgatctgaagctgtttggggtgaccccatagtgagtctggccttgactcacttttctggcttgtctcacagtagc

SEQ ID NO: 152116 - DNA, 2083 bp, Homo sapiens
  Payload ID: 9935
  Gene Symbol: MKS1
  Gene Name: Meckel syndrome, type 1
  Uniprot ID: Q9NXB0
  ENST ID: ENST00000537529
  CDS Start-End: 95-1744
agtgtggcatggtggaaaaggtagagggcgaagactcaggccacctggtccccgtcatcatttctgcatctatctgtctatatgaagtgggctgatggctgtgccagtttcctcatttgcacagcgcacgaggtcccgctttcgagtccacctgcaaagaatcacatcaagcaactttcttcattatcagcctgctgccgagctcgggaaggacctcatagacttggccacttttaggcctcagccaactgccagtggacaccgcccagaggaagacgaagaggaggagattgtgattgggtggcaggagaagctctttagccagtttgaagtagatctgtaccaaaatgaaacagcctgtcagagtcctttggattatcagtaccgtcaggagatcctgaagctggagaattcgggtggcaagaaaaaccgacgaatctttacctacactgactctgatagatacaccaatttggaggagcactgtcagagaatgaccactgcagccagcgaggtgccttcattcttggtcgagcgaatggcaaatgtcaggcgtcgccggcaggacaggcgagggatggagggcggcatcctcaagtcacgcatcgtcacctgggagccctcagaagagtttgtcaggaacaaccacgtcattaacacccctcttcagacaatgcacatcatggcagacctggggccctataaaaagcttggctataagaagtatgaacatgtcctgtgtactctgaaggtggatagcaatggtgtgatcacagtaaagcctgacttcacgggcctcaaaggaccctacaggattgagacggagggggagaagcaggagctgtggaaatatacgatcgacaatgtttccccccacgcacagccggaggaggaggagcgggaacggcgagtgttcaaggatctttatggccggcacaaggagtatctcagcagcctcgtaggcaccgactttgagatgactgtcccaggtgccctccggctctttgtaaatggagaggtcgtttcagcccaaggctatgagtatgacaatctctacgtccacttctttgtagaattgccaactgctcactggtcaagcccagcattccagcagctctcaggagtaacacagacctgcaccaccaagtccctggcaatggacaaggtggctcacttctcctacccattcacgtttgaagccttcttcctccatgaggatgaatcttctgatgcactcccggagtggcctgtgctctactgtgaggtcctctcgctggacttctggcagaggtaccgtgtggaaggctatggggctgtggtgctgcctgccactccaggctcacacaccctgacagtctccacgtggagacctgtggagcttggcacggtggctgagctgaggaggtttttcattggcggttctctggaactggaggacctctcctatgtacggataccaggatccttcaagggggaacgcctgagccgctttggactccgcacagagaccacaggcactgtcaccttccgcttgcactgtctgcagcagtccagggccttcatggaatcgagctcccttcagaaaaggatgcggagtgtgttggaccgtctggaagggttcagccagcagagttccattcacaatgtgctagaggccttccgtcgagcccggcgccgcatgcaggaggcccgggaaagcctcccgcaggacctagtgagcccctctggaaccctggtctcctagctcacagcagccctggcccacagtgcaagaggacaagatgggggatatctgaggccagtgctctcctgcctcttcgtctttctgattagagaccacgttggtctgctgagaaccagaaaagctgggaaattcccggctggcccctctgcctagccttctgcagggtcttctccctaccctgtggaaataaagccagagaccctgtggccccccctttatatttgcagccactgtcaatgggcatcacagcaaggcaggctttttgatctgaagctgtttggggtgaccccatagtgagtctggccttgactcacttttctggcttgtctcacagtagca

SEQ ID NO: 152117 - DNA, 812 bp, Homo sapiens
  Payload ID: 9935
  Gene Symbol: MKS1
  Gene Name: Meckel syndrome, type 1
  ENST ID: ENST00000581761
  CDS Start-End: 16-381
cgcgtcgcagctgtcatggcggagaccgtctggagcactgacaccggggaggcagtgtatcgctcccgggaccccgtgcgcaacttgcgcctccgagtccacctgcaaagaatcacatcaagcaactttcttcattatcagcctgctgccgagctcgggaaggacctcatagacttggccacttttaggcctcagccaactgccacactgtcagagaatgaccactgcagccagcgaggtgccttcattcttggtcgagcgaatggcaaatgtcaggcgtcgccggcaggacaggcgagggatggagggcggcatcctcaagtcacgcatcgtcacctgggagccctcagaagagtttgtcaggaacaaccacgtcattaacacccctcttcagacaatgcacatcatggcagacctggggccctataaaaagcttggctataagaagtatgaacatgtcctgtgtactctgaaggtggatagcaatggtgtgatcacagtaaagcctgacttcacgggcctcaaaggaccctacaggattgagacggagggggagaagcaggagctgtggaaatatacgatcgacaatgtttccccccacgcacagccggaggaggaggagcgggaacggcgagtgttcaaggatctttatggccggcacaaggagtatctcagcagcctcgtaggcaccgactttgagatgactgtcccaggtgccctccggctctttgtaaatggagaggtcgtttcagcccaaggctatgagtatgacaatctctacgtccacttctttgtagaattgccaactgctc

SEQ ID NO: 152118 - DNA, 495 bp, Homo sapiens
  Payload ID: 9935
  Gene Symbol: MKS1
  Gene Name: Meckel syndrome, type 1
  ENST ID: ENST00000577315
  CDS Start-End: 1-352
tggagaggtcgtttcagcccaaggctatgagtatgacaatctctacgtccacttctttgtagaattgccaactgctcactggtcaagcccagcattccagcagctctcaggagtaacacagacctgcaccaccaagtccctggcaatggacaaggtggctcacttctcctacccattcacgtttgaagccttcttcctccatgaggatgaatcttctgatgcactcccggagtggcctgtgctctactgtgaggtcctctcgctggacttctggcagaggtaccgtgtggaaggctatggggctgtggtgctgcctgccactccagcgacaatgacgtggccttggcactgacttcctgacagtctctccatgtgcttcatgctcctctgattggactcagggtgagaagctgtatggcaaaattggctcatagcatatgtgtattgaatgaatcagcattcagtttggaataaaagcatctgtcttttactgtg

SEQ ID NO: 152119 - DNA, 568 bp, Homo sapiens
  Payload ID: 9935
  Gene Symbol: MKS1
  Gene Name: Meckel syndrome, type 1
  ENST ID: ENST00000578789
  CDS Start-End: 24-170
agtcgcggcgcgtcgcagctgtcatggcggagaccgtctggagcactgacaccggggaggcagtgtatcgctcccgggaccccgtgcgcaacttgcgcctccggtggacaccgcccagaggaagacgaagaggaggagattgtgattgggtggcaggagaagctctttagccagtttgaagtagatctgtaccaaaatgaaacagcctgtcagagtcctttggattatcagtaccgtcaggagatcctgaagctggagaattcgggtggcaagaaaaaccgacgaatctttacctacactgactctgatagatacaccaatttggaggagcactgtcagagaatgaccactgcagccagcgaggtgccttcattcttggtcgagcgaatggcaaatgtcaggcgtcgccggcaggacaggcgagggatggagggcggcatcctcaagtcacgcatcgtcacctgggagccctcagaagagtttgtcaggaacaaccacgtcattaacacccctcttcagacaatgcacatcatggcagacctggggccctataaaaagcttggctata

SEQ ID NO: 152120 - DNA, 843 bp, Homo sapiens
  Payload ID: 9935
  Gene Symbol: MKS1
  Gene Name: Meckel syndrome, type 1
  ENST ID: ENST00000580127
  CDS Start-End: 76-516
ccgatccagcgtctccgttgccaggaaaacagagcggcgcgctttccggcgcagtcgcggcgcgtcgcagctgtcatggcggagaccgtctggagcactgacaccggggaggcagtgtatcgctcccgggaccccgtgcgcaacttgcgcctccgagtccacctgcaaagaatcacatcaagcaactttcttcattatcagcctgctgccgagctcgggaaggacctcatagacttggccacttttaggcctcagccaactgccagtggacaccgcccagaggaagacgaagaggaggagattgtgattgggtggcaggagaagctctttagccagtttgaagtagatctgtaccaaaatgaaacagcctgtcagagtcctttggattatcagtaccgtcaggagatcctgaagctggagaattcgggtggcaagaaaaaccgacgaatctttacctacactgactctgatagatacaccaatttggaggaggtacttggctccatgtggccctgaccagatggcgtacacagggctgcttgcttttcccagcactgtcagagaatgaccactgcagccagcgaggtgccttcattcttggtcgagcgaatggcaaatgtcaggcgtcgccggcaggacaggcgagggatggagggcggcatcctcaagtcacgcatcgtcacctgggagccctcagaagagtttgtcaggaacaaccacgtcattaacacccctcttcagacaatgcacatcatggcagacctggggccctataaaaagcttggctataagaagtatgaacatgtcctgtgtactctgaaggtggatagcaatggtgtgatc

SEQ ID NO: 152121 - DNA, 1158 bp, Homo sapiens
  Payload ID: 9935
  Gene Symbol: MKS1
  Gene Name: Meckel syndrome, type 1
  ENST ID: ENST00000577824
  CDS Start-End: 1-686
gcatcctcaagtcacgcatcgtcacctgggagccctcagaagagtttgtcaggaacaaccacgtcattaacacccctcttcagacaatgcacatcatggcagacctggggccctataaaaagcttggctataagaagtatgaacatgtcctgtgtactctgaaggtggatagcaatggtgtgatcacagtaaagcctgacttcacgggcctcaaaggaccctacaggattgagacggagggggagaagcaggagctgtggaaatatacgatcgacaatgtttccccccacgcacagccggaggaggaggagcgggaacggcgagtgttcaaggatctttatggccggcacaaggagtatctcagcagcctcgtaggcaccgactttgagatgactgtcccaggtgccctccggctctttgtaaatggagaggtcgtttcagcccaaggctatgagtatgacaatctctacgtccacttctttgtagaattgccaactgctcactggtcaagcccagcattccagcagctctcaggagtaacacagacctgcaccaccaagtccctggcaatgataaccttgtcattggccacaaggagaacagattccaagggaggccttgcccaccctatgacactcctttttataggacaaggtggctcacttctcctacccattcacgtttgaagccttcttcctccatgaggatgaatcttctgatgcactcccggagtggcctgtgctctactgtgaggtcctctcgctggacttctggcagaggtaccgtgtggaaggctatggggctgtggtgctgcctgccactccaggtaaccgctcgtctctgcccttctgtggcccacatgccctaggccctaagaacaagactaacactcgaatgcttctggtgaggggtggagataattgggaattggaaatgtttggcttgaaagagttcctgttcctctgaggactttctgcccccctccattagcgacaatgacgtggccttggcactgacttcctgacagtctctccatgtgcttcatgctcctctgattggactcagggtgagaagctgtatggcaaaattggctcatagcatatgtgtattgaatgaatcagcattcagtttggaataaaagcatctgtcttttactgt

SEQ ID NO: 152122 - DNA, 824 bp, Homo sapiens
  Payload ID: 9935
  Gene Symbol: MKS1
  Gene Name: Meckel syndrome, type 1
  ENST ID: ENST00000585134
  CDS Start-End: 1-636
ctgtggaaatatacgatcgacaatgtttccccccacgcacagccggaggaggaggagcgggaacggcgagtgttcaaggatctttatggccggcacaaggagtatctcagcagcctcgtaggcaccgactttgagatgactgtcccaggtgccctccggctctttgtaaatggagaggtcgtttcagcccaaggctatgagtatgacaatctctacgtccacttctttgtagaattgccaactgctcactggtcaagcccagcattccagcagctctcaggagtaacacagacctgcaccaccaagtccctggcaatggacaaggtggctcacttctcctacccattcacgtttgaagccttcttcctccatgaggatgaatcttctgatgcactcccggagtggcctgtgctctactgtgaggtcctctcgctggacttctggcagaggtaccgtgtggaaggctatggggctgtggtgctgcctgccactccaggtaaccgctcgtctctgcccttctgtggcccacatgccctaggccctaagaacaagactaacactcgaatgcttctggtgaggggtggagataattgggaattggaaatgtttggcttgaaagagttcctgttcctctgaggactttctgcccccctccattagcgacaatgacgtggccttggcactgacttcctgacagtctctccatgtgcttcatgctcctctgattggactcagggtgagaagctgtatggcaaaattggctcatagcatatgtgtattgaatgaatcagcattcagtttggaataaaagcatctgtctttta

SEQ ID NO: 152123 - DNA, 5844 bp, Homo sapiens
  Payload ID: 9936
  Gene Symbol: MED1
  Gene Name: mediator complex subunit 1
  Uniprot ID: Q15648
  ENST ID: ENST00000300651
  CDS Start-End: 225-4970
acggtttatctcgcgaattttgggaagttccgttggggaagatggcggcggcctcgagcacccttctcttcttgccgccggggacttcagattgatccttcccgggaagagtagggactgctggtgccctgcgtcccgggatcccgagccaacttgtttcctccgttagtggtggggaagggcttatccttttgtggcggatctagcttctcctcgccttcaggatgaaagctcagggggaaaccgaggagtcagaaaagctgagtaagatgagttctctcctggaacggctccatgcaaaatttaaccaaaatagaccctggagtgaaaccattaagcttgtgcgtcaagtcatggagaagagggttgtgatgagttctggagggcatcaacatttggtcagctgtttggagacattgcagaaggctctcaaagtaacatctttaccagcaatgactgatcgtttggagtccatagcaagacagaatggactgggctctcatctcagtgccagtggcactgaatgttacatcacgtcagatatgttctatgtggaagtgcagttagatcctgcaggacagctttgtgatgtaaaagtggctcaccatggggagaatcctgtgagctgtccggagcttgtacagcagctaagggaaaaaaattttgatgaattttctaagcaccttaagggccttgttaatctgtataaccttccaggggacaacaaactgaagactaaaatgtacttggctctccaatccttagaacaagatctttctaaaatggcaattatgtactggaaagcaactaatgctggtcccttggataagattcttcatggaagtgttggctatctcacaccaaggagtgggggtcatttaatgaacctgaagtactatgtctctccttctgacctactggatgacaagactgcatctcccatcattttgcatgagaataatgtttctcgatctttgggcatgaatgcatcagtgacaattgaaggaacatctgctgtgtacaaactcccaattgcaccattaattatggggtcacatccagttgacaataaatggaccccttccttctcctcaatcaccagtgccaacagtgttgatcttcctgcctgtttcttcttgaaatttccccagccaatcccagtatctagagcatttgttcagaaactgcagaactgcacaggaattccattgtttgaaactcaaccaacttatgcacccctgtatgaactgatcactcagtttgagctatcaaaggaccctgaccccatacctttgaatcacaacatgagattttatgctgctcttcctggtcagcagcactgctatttcctcaacaaggatgctcctcttccagatggccgaagtctacagggaacccttgttagcaaaatcacctttcagcaccctggccgagttcctcttatcctaaatctgatcagacaccaagtggcctataacaccctcattggaagctgtgtcaaaagaactattctgaaagaagattctcctgggcttctccaatttgaagtgtgtcctctctcagagtctcgtttcagcgtatcttttcagcaccctgtgaatgactccctggtgtgtgtggtaatggatgtgcaggactcaacacatgtgagctgtaaactctacaaagggctgtcggatgcactgatctgcacagatgacttcattgccaaagttgttcaaagatgtatgtccatccctgtgacgatgagggctattcggaggaaagctgaaaccattcaagccgacaccccagcactgtccctcattgcagagacagttgaagacatggtgaaaaagaacctgcccccggctagcagcccagggtatggcatgaccacaggcaacaacccaatgagtggtaccactacaccaaccaacacctttccggggggtcccattaccaccttgtttaatatgagcatgagcatcaaagatcggcatgagtcggtgggccatggggaggacttcagcaaggtgtctcagaacccaattcttaccagtttgttgcaaatcacagggaacggggggtctaccattggctcgagtccgacccctcctcatcacacgccgccacctgtctcttcgatggccggcaacaccaagaaccacccgatgctcatgaaccttcttaaagataatcctgcccaggatttctcaaccctttatggaagcagccctttagaaaggcagaactcctcttccggctcaccccgcatggaaatatgctcggggagcaacaagaccaagaaaaagaagtcatcaagattaccacctgagaaaccaaagcaccagactgaagatgactttcagagggagctattttcaatggatgttgactcacagaaccctatctttgatgtcaacatgacagctgacacgctggatacgccacacatcactccagctccaagccagtgtagcactcccccaacaacttacccacaaccagtacctcacccccaacccagtattcaaaggatggtccgactatccagttcagacagcattggcccagatgtaactgacatcctttcagacattgcagaagaagcttctaaacttcccagcactagtgatgattgcccagccattggcacccctcttcgagattcttcaagctctgggcattctcagagtaccctgtttgactctgatgtctttcaaactaacaataatgaaaatccatacactgatccagctgatcttattgcagatgctgctggaagccccagtagtgactctcctaccaatcatttttttcatgatggagtagatttcaatcctgatttattgaacagccagagccaaagtggttttggagaagaatattttgatgaaagcagccaaagtggggataatgatgatttcaaaggatttgcatctcaggcactaaatactttgggggtgccaatgcttggaggtgataatggggagaccaagtttaagggcaataaccaagccgacacagttgatttcagtattatttcagtagccggcaaagctttagctcctgcagatcttatggagcatcacagtggtagtcagggtcctttactgaccactggggacttagggaaagaaaagactcaaaagagggtaaaggaaggcaatggcaccagtaatagtactctctcggggcccggattagacagcaaaccagggaagcgcagtcggaccccttctaatgatgggaaaagcaaagataagcctccaaagcggaagaaggcagacactgagggaaagtctccatctcatagttcttctaacagaccttttaccccacctaccagtacaggtggatctaaatcgccaggcagtgcaggaagatctcagactcccccaggtgttgccacaccacccattcccaaaatcactattcagattcctaagggaacagtgatggtgggcaagccttcctctcacagtcagtataccagcagtggttctgtgtcttcctcaggcagcaaaagccaccatagccattcttcctcctcttcctcatctgcttccacctcagggaagatgaaaagcagtaaatcagaaggttcatcaagttccaagttaagtagcagtatgtattctagccaggggtcttctggatctagccagtccaaaaattcatcccagtctggggggaagccaggctcctctcccataaccaagcatggactgagcagtggctctagcagcaccaagatgaaacctcaaggaaagccatcatcacttatgaatccttctttaagtaaaccaaacatatccccttctcattcaaggccacctggaggctctgacaagcttgcctctccaatgaagcctgttcctggaactcctccatcctctaaagccaagtcccctatcagttcaggttctggtggttctcatatgtctggaactagttcaagctctggcatgaagtcatcttcagggttaggatcctcaggctcgttgtcccagaaaactcccccatcatctaattcctgtacggcatcttcctcctccttttcctcaagtggctcttccatgtcatcctctcagaaccagcatgggagttctaaaggaaaatctcccagcagaaacaagaagccgtccttgacagctgtcatagataaactgaagcatggggttgtcaccagtggccctgggggtgaagacccactggacggccagatgggggtgagcacaaattcttccagccatcctatgtcctccaaacataacatgtcaggaggagagtttcagggcaagcgtgagaaaagtgataaagacaaatcaaaggtttccacctccgggagttcagtggattcttctaagaagacctcagagtcaaaaaatgtggggagcacaggtgtggcaaaaattatcatcagtaagcatgatggaggctcccctagcattaaagccaaagtgactttgcagaaacctggggaaagtagtggagaagggcttaggcctcaaatggcttcttctaaaaactatggctctccactcatcagtggttccactccaaagcatgagcgtggctctcccagccatagtaagtcaccagcatataccccccagaatctggacagtgaaagtgagtcaggctcctccatagcagagaaatcttatcagaatagtcccagctcagacgatggtatccgaccacttccagaatacagcacagagaaacataagaagcacaaaaaggaaaagaagaaagtaaaagacaaagatagggaccgagaccgggacaaagaccgagacaagaaaaaatctcatagcatcaagccagagagttggtccaaatcacccatctcttcagaccagtccttgtctatgacaagtaacacaatcttatctgcagacagaccctcaaggctcagcccagactttatgattggggaggaagatgatgatcttatggatgtggccctgattgggaattaggaaccttatttcctaaaagaaacagggccagaggaaaaaaaactattgataagtttataggcaaaccaccataaggggtgagtcagacaggtctgatttggttaagaatcctaaatggcatggctttgacatcaagctgggtgaattagaaaggcatatccagaccctattaaagaaaccacagggtttgattctggttaccaggaagtcttctttgttcctgtgccagaaagaaagttaaaatacttgcttaagaaagggaggggggtgggaggggtgtagggagagggaagggagggaaacagttttgtgggaaatattcatatatattttcttctccctttttccatttttaggccatgttttaaactcattttagtgcatgtatatgaagggctgggcagaaaatgaaaaagcaatacattccttgatgcatttgcatgaaggttgttcaactttgtttgaggtagttgtccgtttgagtcatgggcaaatgaaggactttggtcattttggacacttaagtaatgtttggtgtctgtttcttaggagtgactgggggagggaagattattttagctatttatttgtaatattttaaccctttatctgtttgtttttatacagtgtttcgttctaaatctatgaggtttagggttcaaaatgatggaaggccgaagagcaaggcttatatggtggtagggagcttatagcttgtgctaatactgtagcatcaagcccaagcaaattagtcagagcccgcctttagagttaaatataatagaaaaaccaaaatgatatttttattttaggagggtttaaatagggttcagagatcataggaatattaggagttacctctctgtggaggtat

SEQ ID NO: 152124 - DNA, 2870 bp, Homo sapiens
  Payload ID: 9936
  Gene Symbol: MED1
  Gene Name: mediator complex subunit 1
  Uniprot ID: Q15648
  ENST ID: ENST00000394287
  CDS Start-End: 207-1877
tttgggaagttccgttggggaagatggcggcggcctcgagcacccttctcttcttgccgccggggacttcagattgatccttcccgggaagagtagggactgctggtgccctgcgtcccgggatcccgagccaacttgtttcctccgttagtggtggggaagggcttatccttttgtggcggatctagcttctcctcgccttcaggatgaaagctcagggggaaaccgaggagtcagaaaagctgagtaagatgagttctctcctggaacggctccatgcaaaatttaaccaaaatagaccctggagtgaaaccattaagcttgtgcgtcaagtcatggagaagagggttgtgatgagttctggagggcatcaacatttggtcagctgtttggagacattgcagaaggctctcaaagtaacatctttaccagcaatgactgatcgtttggagtccatagcaagacagaatggactgggctctcatctcagtgccagtggcactgaatgttacatcacgtcagatatgttctatgtggaagtgcagttagatcctgcaggacagctttgtgatgtaaaagtggctcaccatggggagaatcctgtgagctgtccggagcttgtacagcagctaagggaaaaaaattttgatgaattttctaagcaccttaagggccttgttaatctgtataaccttccaggggacaacaaactgaagactaaaatgtacttggctctccaatccttagaacaagatctttctaaaatggcaattatgtactggaaagcaactaatgctggtcccttggataagattcttcatggaagtgttggctatctcacaccaaggagtgggggtcatttaatgaacctgaagtactatgtctctccttctgacctactggatgacaagactgcatctcccatcattttgcatgagaataatgtttctcgatctttgggcatgaatgcatcagtgacaattgaaggaacatctgctgtgtacaaactcccaattgcaccattaattatggggtcacatccagttgacaataaatggaccccttccttctcctcaatcaccagtgccaacagtgttgatcttcctgcctgtttcttcttgaaatttccccagccaatcccagtatctagagcatttgttcagaaactgcagaactgcacaggaattccattgtttgaaactcaaccaacttatgcacccctgtatgaactgatcactcagtttgagctatcaaaggaccctgaccccatacctttgaatcacaacatgagattttatgctgctcttcctggtcagcagcactgctatttcctcaacaaggatgctcctcttccagatggccgaagtctacagggaacccttgttagcaaaatcacctttcagcaccctggccgagttcctcttatcctaaatctgatcagacaccaagtggcctataacaccctcattggaagctgtgtcaaaagaactattctgaaagaagattctcctgggcttctccaatttgaagtgtgtcctctctcagagtctcgtttcagcgtatcttttcagcaccctgtgaatgactccctggtgtgtgtggtaatggatgtgcaggactcaacacatgtgagctgtaaactctacaaagggctgtcggatgcactgatctgcacagatgacttcattgccaaagttgttcaaagatgtatgtccatccctgtgacgatgagggctattcggaggaaagctgaaaccattcaagccgacaccccagcactgtccctcattgcagagacagttgaagacatggtgaaaaagaacctgcccccggctagcagcccaggatcaaagaatcccgagttaggatctggatgaaggataagcccctgaattgtcgatgggctcacccccacactgacccagcatctgaacttgcttaacagggagccggggctaaactgcttcaccctgcctgagaaccagggagcactgcatttctccacagggtggaggagaagaggcagaataaaccaagcctgggacacctccctcctgtctaggtgtactcattcttctgtttcaaaagaaggcaaggacatgaagtcaacttctacctatcttctgctgctggtgtcttatgtattctcagtttgacctgattcctcttctgtcttttgacttaacattaggggttcttggtcataacctgctctgatgtacataaagatttcaggttcaatatcaatgtgtcttaaaacagaagtattttagcgggtggggggtggggtggtggggacaaacaacgcaggatataattgccaaaaccaggcttgaggttggtgactcttgaaagattttctttcttcaggcctagatcagaaaattaagtgcagcaatatcatgaattctcagaagccctttcagggagccagtgagtcatacagtatccacagttgagtcacttaaagatgtcagtatacgaaacattattcacaatccttgggcaatctcatttttttttccttctcccctcctcccctgccccccatacatttctatccttgagttagttttggaggggcaggaagtacttaacatctcagaagctagattgggaaacatgctcagctataagaactgagctttaaattttgagtttaaaaatgtacatcaggagcagctggggagggtctttttttaaaaaaatctttcaaatttggttttctgtgcatatggccgttttgtaaatactttggggtttttcatttttttgaaagtagatgaaatctgttgtgggatttttttcccgaaacattacaaaataacctgtttatttacatgcaaataaacttctttgataaaaagtaa

SEQ ID NO: 152125 - DNA, 580 bp, Homo sapiens
  Payload ID: 9936
  Gene Symbol: MED1
  Gene Name: mediator complex subunit 1
  ENST ID: ENST00000581334
  CDS Start-End: 211-450
gaattttgggaagttccgttggggaagatggcggcggcctcgagcacccttctcttcttgccgccggggacttcagattgatccttcccgggaagagtagggactgctggtgccctgcgtcccgggatcccgagccaacttgtttcctccgttagtggtggggaagggcttatccttttgtggcggatctagcttctcctcgccttcaggatgaaagctcagggggaaaccgaggagtcagaaaagctgagtaagatgagttctctcctggaacggctccatgcaaaatttaaccaaaatagaccctggagtgaaaccattaagcttgtgcgtcaagtcatgttttgcagattcagaaacctaattttattggtacatcaagattttatagagttttcatggctgggcgtggtggttcacatctgtaatcccagcactttgggaggctgaggcgggtcgatcacctgaggtcaggagttcgagaccaggctgaccaacaaggagaagagggttgtgatgagttctggagggcatcaacatttggtcagctgtttggagacattgcagaaggctctcaaag

SEQ ID NO: 152126 - DNA, 4584 bp, Homo sapiens
  Payload ID: 9936
  Gene Symbol: MED1
  Gene Name: mediator complex subunit 1
  ENST ID: ENST00000577831
  CDS Start-End: 211-504
gaattttgggaagttccgttggggaagatggcggcggcctcgagcacccttctcttcttgccgccggggacttcagattgatccttcccgggaagagtagggactgctggtgccctgcgtcccgggatcccgagccaacttgtttcctccgttagtggtggggaagggcttatccttttgtggcggatctagcttctcctcgccttcaggatgaaagctcagggggaaaccgaggagtcagaaaagctgagtaagatgagttctctcctggaacggctccatgcaaaatttaaccaaaatagaccctggagtgaaaccattaagcttgtgcgtcaagtcatggagaagagggttgtgatgagttctggagggcatcaacatttggtcagctgtttggagacattgcagaaggctctcaaagtaacatctttaccagcaatgactgatcgtttggagtccatagcaagacagaatggagctgtccggagcttgtacagcagctaagggaaaaaaattttgatgaattttctaagcaccttaagggccttgttaatctgtataaccttccaggggacaacaaactgaagactaaaatgtacttggctctccaatccttagaacaagatctttctaaaatggcaattatgtactggaaagcaactaatgctggtcccttggataagattcttcatggaagtgttggctatctcacaccaaggagtgggggtcatttaatgaacctgaagtactatgtctctccttctgacctactggatgacaagactgcatctcccatcattttgcatgagaataatgtttctcgatctttgggcatgaatgcatcagtgacaattgaaggaacatctgctgtgtacaaactcccaattgcaccattaattatggggtcacatccagttgacaataaatggaccccttccttctcctcaatcaccagtgccaacagtgttgatcttcctgcctgtttcttcttgaaatttccccagccaatcccagtatctagagcatttgttcagaaactgcagaactgcacaggaattccattgtttgaaactcaaccaacttatgcacccctgtatgaactgatcactcagtttgagctatcaaaggaccctgaccccatacctttgaatcacaacatgagattttatgctgctcttcctggtcagcagcactgctatttcctcaacaaggatgctcctcttccagatggccgaagtctacagggaacccttgttagcaaaatcacctttcagcaccctggccgagttcctcttatcctaaatctgatcagacaccaagtggcctataacaccctcattggaagctgtgtcaaaagaactattctgaaagaagattctcctgggcttctccaatttgaagtgtgtcctctctcagagtctcgtttcagcgtatcttttcagcaccctgtgaatgactccctggtgtgtgtggtaatggatgtgcaggactcaacacatgtgagctgtaaactctacaaagggctgtcggatgcactgatctgcacagatgacttcattgccaaagttgttcaaagatgtatgtccatccctgtgacgatgagggctattcggaggaaagctgaaaccattcaagccgacaccccagcactgtccctcattgcagagacagttgaagacatggtgaaaaagaacctgcccccggctagcagcccagggtatggcatgaccacaggcaacaacccaatgagtggtaccactacaccaaccaacacctttccggggggtcccattaccaccttgtttaatatgagcatgagcatcaaagatcggcatgagtcggtgggccatggggaggacttcagcaaggtgtctcagaacccaattcttaccagtttgttgcaaatcacagggaacggggggtctaccattggctcgagtccgacccctcctcatcacacgccgccacctgtctcttcgatggccggcaacaccaagaaccacccgatgctcatgaaccttcttaaagataatcctgcccaggatttctcaaccctttatggaagcagccctttagaaaggcagaactcctcttccggctcaccccgcatggaaatatgctcggggagcaacaagaccaagaaaaagaagtcatcaagattaccacctgagaaaccaaagcaccagactgaagatgactttcagagggagctattttcaatggatgttgactcacagaaccctatctttgatgtcaacatgacagctgacacgctggatacgccacacatcactccagctccaagccagtgtagcactcccccaacaacttacccacaaccagtacctcacccccaacccagtattcaaaggatggtccgactatccagttcagacagcattggcccagatgtaactgacatcctttcagacattgcagaagaagcttctaaacttcccagcactagtgatgattgcccagccattggcacccctcttcgagattcttcaagctctgggcattctcagagtaccctgtttgactctgatgtctttcaaactaacaataatgaaaatccatacactgatccagctgatcttattgcagatgctgctggaagccccagtagtgactctcctaccaatcatttttttcatgatggagtagatttcaatcctgatttattgaacagccagagccaaagtggttttggagaagaatattttgatgaaagcagccaaagtggggataatgatgatttcaaaggatttgcatctcaggcactaaatactttgggggtgccaatgcttggaggtgataatggggagaccaagtttaagggcaataaccaagccgacacagttgatttcagtattatttcagtagccggcaaagctttagctcctgcagatcttatggagcatcacagtggtagtcagggtcctttactgaccactggggacttagggaaagaaaagactcaaaagagggtaaaggaaggcaatggcaccagtaatagtactctctcggggcccggattagacagcaaaccagggaagcgcagtcggaccccttctaatgatgggaaaagcaaagataagcctccaaagcggaagaaggcagacactgagggaaagtctccatctcatagttcttctaacagaccttttaccccacctaccagtacaggtggatctaaatcgccaggcagtgcaggaagatctcagactcccccaggtgttgccacaccacccattcccaaaatcactattcagattcctaagggaacagtgatggtgggcaagccttcctctcacagtcagtataccagcagtggttctgtgtcttcctcaggcagcaaaagccaccatagccattcttcctcctcttcctcatctgcttccacctcagggaagatgaaaagcagtaaatcagaaggttcatcaagttccaagttaagtagcagtatgtattctagccaggggtcttctggatctagccagtccaaaaattcatcccagtctggggggaagccaggctcctctcccataaccaagcatggactgagcagtggctctagcagcaccaagatgaaacctcaaggaaagccatcatcacttatgaatccttctttaagtaaaccaaacatatccccttctcattcaaggccacctggaggctctgacaagcttgcctctccaatgaagcctgttcctggaactcctccatcctctaaagccaagtcccctatcagttcaggttctggtggttctcatatgtctggaactagttcaagctctggcatgaagtcatcttcagggttaggatcctcaggctcgttgtcccagaaaactcccccatcatctaattcctgtacggcatcttcctcctccttttcctcaagtggctcttccatgtcatcctctcagaaccagcatgggagttctaaaggaaaatctcccagcagaaacaagaagccgtccttgacagctgtcatagataaactgaagcatggggttgtcaccagtggccctgggggtgaagacccactggacggccagatgggggtgagcacaaattcttccagccatcctatgtcctccaaacataacatgtcaggaggagagtttcagggcaagcgtgagaaaagtgataaagacaaatcaaaggtttccacctccgggagttcagtggattcttctaagaagacctcagagtcaaaaaatgtggggagcacaggtgtggcaaaaattatcatcagtaagcatgatggaggctcccctagcattaaagccaaagtgactttgcagaaacctggggaaagtagtggagaagggcttaggcctcaaatggcttcttctaaaaactatggctctccactcatcagtggttccactccaaagcatgagcgtggctctcccagccatagtaagtcaccagcatataccccccagaatctggacagtgaaagtgagtcaggctcctccatagcagagaaatcttatcagaatagtcccagctcagacgatggtatccgaccacttccagaatacagcacagagaaacataagaagcacaaaaagg

SEQ ID NO: 152127 - DNA, 1141 bp, Homo sapiens
  Payload ID: 9937
  Gene Symbol: MED10
  Gene Name: mediator complex subunit 10
  Uniprot ID: Q9BTT4
  ENST ID: ENST00000255764
  CDS Start-End: 112-519
cagaggaaacggaagtcgtatctgtccggacggaagcaggaagcgggagcgtagggccacgcctgcggcgctgctggttgaggctgtgtgggtcggggacgggccgaggcgatggcggagaagtttgaccacctagaggagcacctggagaagttcgtggagaacattcggcagctcggcatcatcgtcagtgacttccagcccagcagccaggccgggctcaaccaaaagctgaattttattgttactggcttacaggatattgacaagtgcagacagcagcttcatgatattactgtaccgttagaagtttttgaatatatagatcaaggtcgaaatccccagctctacaccaaagagtgcctggagagggctctagctaaaaatgagcaagttaaaggcaagatcgacaccatgaagaaatttaaaagcctgttgattcaagaactttctaaagtatttccggaagacatggctaagtatcgaagcatccggggggaggatcacccgccttcttaaccagctcaccctccctgtgtgaagatcccctgggactgcgatgcggcgtgaggctgggactgcgagtgctgacgccaccttcctgctgaggtgggactgggccctggacacacccctcagcccctctgtcctcattgtttggcctcatgggaccgaggggctggaggagaggcggagctgtgccccagctgttccagcagcttgtctggcgtcaactggctttcagagtgctgacccctcatcactgtggggatcattctctctgagggcagatgaggcgcaggaaaatagtcttggaaatgttaaatatgatgggtaaattaaaagttttacaacattctacctaatatttttcttttaacatactctttctgttctattgtattatggtgtccgaaagctaaataacgactaggaaaaatttttttaaaaaaagaaaaatcagtttaatgtgggaagtacttaagtggtattatattttacattttcaagtatagtgcataaagaatgttttaaatgtaactgttttcatggatttcaattagacatgcctataataaactaagtatgtggcttattccatgtaattatttttgtaatataatacaatgtgtcttgtaaa

SEQ ID NO: 152128 - DNA, 833 bp, Homo sapiens
  Payload ID: 9938
  Gene Symbol: MED11
  Gene Name: mediator complex subunit 11
  Uniprot ID: Q9P086
  ENST ID: ENST00000293777
  CDS Start-End: 57-410
ggaacaagcgtcgcgtttctgaggagaaactcttggtgagaattcccagagtgataatggctacctacagcctggcgaacgagagactacgcgctctggaagacattgaacgggaaatcggcgccatccttcagaatgcaggtactgtgatcctagaattgtccaaggaaaaaactaacgagcggctcctagaccggcaggcggcggccttcaccgcttcagtgcaacacgtggaggcggagctgtcagctcagatccgctacctcacccaggtggccacagggcagccccatgagggctccagctactcttcgaggaaggactgtcagatggctctgaagcgagtggactatgcccgcctcaagctcagtgatgtggctcgaacctgtgagcagatgctggagaactaggccagggagatggacccagagctgagagggagaccatcacctgtgccatgggacagaacctgggaacatgtagggtggggagtatgagcaccaacataccctgctggtcaaagtaccctaggacaaaggggcaaatggtgggcatggaaaaactgaagcccgagcctgcccacagctatgctttggcctctccagcagggtgctcctgctctgcactccagaaacaccctgacaggctcagagaggagatggaaactgacatacccaacccacttcctcaaacacttcatgctgctgccccagccttcccgcagacttggcctaatgaaaatacatacttcttcattcggagagacaaaacaagaactagagttttaatgataataaaagcaataataataaaagcaataacaataaaaacaa

SEQ ID NO: 152129 - DNA, 802 bp, Homo sapiens
  Payload ID: 9938
  Gene Symbol: MED11
  Gene Name: mediator complex subunit 11
  ENST ID: ENST00000573708
  CDS Start-End: 60-341
tccggaacaagcgtcgcgtttctgaggagaaactcttggtgagaattcccagagtgataatggctacctacagcctggcgaacgagagactacgcgctctggaagacattgaacgggaaatcggcgccatccttcagaatgcaggtactgtgatcctagaattgtccaaggaaaaaactaacgagcggctcctagaccggcaggcggcggccttcaccgcttcagtgcaacacgtggaggcggagctgtcagctcagatccgctacctcacccaggtcggtgtgtctggggggttctgcgagcgaaccccagctctgggtcaaagcctcaggcttgggtgatccagggtggagcattaactgggcaggaccagacctccccagccggccatccagagcgggtttcttcctctaaaaggaaagaatgggccgggcgcagtggcttgacagagttcgagaccagcctggccaacacggtgaaacctcgtctctactaaaaatataaaaattaggccaggctcggtggctcactcctgtaatcccagcactttgggaggctgaggcgggtggatcatctgaggtcaggagttcgagaccagcctggccaacatggtgaaactccgtctctactaaaaatacaaaaattagctgggctggtagcgggcacctgtaatcccagctacttggaagggtgaggcaggagaatcgcttgaacccaggaggtggaggttgcagtgagccaagattgcagcactgcactccagcctgggtgacaaagcaagactgtctcaaaaaaaaaaaaa

SEQ ID NO: 152130 - DNA, 652 bp, Homo sapiens
  Payload ID: 9938
  Gene Symbol: MED11
  Gene Name: mediator complex subunit 11
  ENST ID: ENST00000575284
  CDS Start-End: 63-320
acttccggaacaagcgtcgcgtttctgaggagaaactcttggtgagaattcccagagtgataatggctacctacagcctggcgaacgagagactacgcgctctggaagacattgaacgggaaatcggcgccatccttcagaatgcaggtactgtgatcctagaattgtccaaggaaaaaactaacgagcggctcctagaccggcaggcggcggccttcaccgcttcagtgcaacacgtggaggcggagctgtcagctcagatccgctacctcacccagctaccagatggcctaacaaattcaaactcagggaagaaatgagacgagacctgatgcctggttggagttagggtaaaggagatggtgctccattgatagtctgtcttgtaggtggccacagggcagccccatgagggctccagctactcttcgaggaaggactgtcagatggctctgaagcgagtggactatgcccgcctcaagctcagtgatgtggctcgaacctgtgagcagatgctggagaactaggccagggagatggacccagagctgagagggagaccatcacctgtgccatgggacagaacctgggaacatgtagggtggggagtatgagcaccaacataccctgctggtcaaagtaccctaggaca

SEQ ID NO: 152131 - DNA, 6977 bp, Homo sapiens
  Payload ID: 9939
  Gene Symbol: MED12
  Gene Name: mediator complex subunit 12
  ENST ID: ENST00000333646
  CDS Start-End: 659-6742
attgtccgatggttcccggcgtacctcggcttccctcggtagtttccggcaatggtcgagagtttctaacgtgcccccttgttgtctctcggccgccgtcctctcaaccaccgccccccttttcggctccctctcccccttcccgttcccccagtcagcctggccctgctggtgcctccggcgctacgggctgggcaagatggcggccttcgggatcttgagctacgaacaccggcccctgaagcggccgcggctggggcctcccgatgtttaccctcaggaccccaaacagaaggaggatgaactgacggccttgaatgtaaaacaaggtttcaataaccagcctgctgtctctggggatgagcatggcagtgccaagaacgtcagcttcaatcctgccaagatcagttccaacttcagcagcattattgcagagaaattacgttgtaatacccttcctgacactggtcgcaggaagccccaagtgaaccagaaggataacttctggctggtgactgcacgatcccagagtgccattaacacttggttcactgacttggctggcaccaagccactcacgcaactagccaaaaaggtccccattttcagtaagaaggaagaggtgtttgggtacttagccaaatacacagtgcctgtgatgcgggctgcctggctcattaagatgacctgtgcctactatgcagcaatctctgagaccaaggttaagaagagacatgttgaccctttcatggaatggactcagatcatcaccaagtacttatgggagcagttacagaagatggctgaatactaccggccagggcctgcaggaagtgggggctgtggttccacgatagggcccttgccccatgatgtagaggtggcaatccggcagtgggattacaccgagaagctggccatgttcatgtttcaggatggaatgctggacagacatgagttcctgacctgggtgcttgagtgttttgagaagatccgccctggagaggatgaattgcttaaactgctgctgcctctgcttctccgatactctggggaatttgttcagtctgcatacctgtcccgccggcttgcctacttctgtacacggagactggccctgcagctggatggtgtgagcagtcactcatctcatgttatatctgctcagtcaacaagcacgctacccaccacccctgctcctcagcccccaactagcagcacaccctcgactccctttagtgacctgcttatgtgccctcagcaccggcccctggtttttggcctcagctgtatcctacagaccatcctcctgtgctgtcctagtgccttggtttggcactactcactgactgatagcagaattaagaccggctcaccacttgaccacttgcctattgccccgtccaacctgcccatgccagagggtaacagtgccttcactcagcaggtccgtgcaaagttgcgggagatcgagcagcagatcaaggagcggggacaggcagttgaagttcgctggtctttcgataaatgccaggaagctactgcaggcttcaccattggacgggtacttcatactttggaagtgctggacagccatagttttgaacgctctgacttcagcaactctcttgactccctttgtaaccgaatctttggattgggacctagcaaggatgggcatgagatctcctcagatgatgatgctgtggtgtcattgctatgtgaatgggctgtcagctgcaagcgttctggtcggcatcgtgctatggtggtagccaagctcctggagaagagacaggcggagattgaggctgagcgttgtggagaatcagaagccgcagatgagaagggttccatcgcctctggctccctttctgctcccagtgctcccattttccaggatgtcctcctgcagtttctggatacacaggctcccatgctgacggaccctcgaagtgagagtgagcgggtggaattctttaacttagtactgctgttctgtgaactgattcgacatgatgttttctcccacaacatgtatacttgcactctcatctcccgaggggaccttgcctttggagcccctggtccccggcctccctctccctttgatgatcctgccgatgacccagagcacaaggaggctgaaggcagcagcagcagcaagctggaagatccagggctctcagaatctatggacattgaccctagttccagtgttctctttgaggacatggagaagcctgatttctcattgttctcccctactatgccctgtgaggggaagggcagtccatcccctgagaagccagatgtcgagaaggaggtgaagcccccacccaaggagaagattgaagggacccttggggttctttacgaccagccacgacacgtgcagtacgccacccattttcccatcccccaggaggagtcatgcagccatgagtgcaaccagcggttggtcgtactgtttggggtgggaaagcagcgagatgatgcccgccatgccatcaagaaaatcaccaaggatatcttgaaggttctgaaccgcaaagggacagcagaaactgaccagcttgctcctattgtgcctctgaatcctggagacctgacattcttaggtggggaggatgggcagaagcggcgacgcaaccggcctgaagccttccccactgctgaagatatctttgctaagttccagcacctttcacattatgaccaacaccaggtcacggctcaggtctcccggaatgttctggagcagatcacgagctttgcccttggcatgtcataccacttgcctctggtgcagcatgtgcagttcatcttcgacctcatggaatattcactcagcatcagtggcctcatcgactttgccattcagctgctgaatgaactgagtgtagttgaggctgagctgcttctcaaatcctcggatctggtgggcagctacactactagcctgtgcctgtgcatcgtggctgtcctgcggcactatcatgcctgcctcatcctcaaccaggaccagatggcacaggtctttgaggggctgtgtggcgtcgtgaagcatgggatgaaccggtccgatggctcctctgcagagcgctgtatccttgcttatctctatgatctgtacacctcctgtagccatttaaagaacaaatttggggagctcttcagcgacttttgctcaaaggtgaagaacaccatctactgcaacgtggagccatcggaatcaaatatgcgctgggcacctgagttcatgatcgacactctagagaaccctgcagctcacaccttcacctacacggggctaggcaagagtcttagtgagaaccctgctaaccgctacagctttgtctgcaatgcccttatgcacgtctgtgtggggcaccatgatcccgatagggtgaatgacatcgcaatcctgtgtgcagagctgaccggctattgcaagtcactgagtgcagaatggctaggagtgcttaaggccttgtgctgctcctctaacaatggcacttgtggtttcaacgatctcctctgcaatgttgatgtcagtgacctatcttttcatgactcgctggctacttttgttgccatcctcatcgctcggcagtgtttgctcctggaagatctgattcgctgtgctgccatcccttcactccttaatgctgcttgtagtgaacaggactctgagccaggggcccggcttacctgccgcatcctccttcaccttttcaagacaccgcagctcaatccttgccagtctgatggaaacaagcctacagtaggaatccgctcctcctgcgaccgccacctgctggctgcctcccagaaccgcatcgtggatggagccgtgtttgctgttctcaaggctgtgtttgtacttggggatgcggaactgaaaggttcaggcttcactgtgacaggaggaacagaagaacttccagaggaggagggaggaggtggcagtggtggtcggaggcagggtggccgcaacatctctgtggagacagccagtctggatgtctatgccaagtacgtgctgcgcagcatctgccaacaggaatgggtaggagaacgttgccttaagtctctgtgtgaggacagcaatgacctgcaagacccagtgttgagtagtgcccaggcgcagcgcctcatgcagctcatttgctatccacatcgactgctggacaatgaggatggggaaaacccccagcggcagcgcataaagcgcattctccagaacttggaccagtggaccatgcgccagtcttccttggagctgcagctcatgatcaagcagacccctaacaatgagatgaactccctcttggagaacatcgccaaggccacaatcgaggttttccaacagtcagcagagacagggtcatcttctggaagtactgcaagcaacatgcccagcagcagcaagaccaagcctgtgctcagctctctagagcgctctggtgtatggctggtggcccccctcattgctaaactgcccacctcagtccagggacatgtgttaaaggctgctggggaagaattggagaagggtcagcacctgggttcctcttcacgcaaagaacgtgatcgacaaaagcagaagagcatgtccctattgagccagcagcccttcttatcgctggtgctaacatgtctgaaagggcaggatgaacaacgcgagggactccttacctccctctacagccaggtgcaccagattgtgaataattggcgagatgaccagtacttagatgattgcaaaccaaagcagcttatgcatgaggcactcaaactgcggctcaacctggtggggggcatgtttgacacggtgcagcgcagcacccagcagaccacggagtgggccatgctcctcctggagatcatcatcagcggcactgtcgacatgcagtccaacaatgagctcttcactactgtgttggacatgctgagcgtgctcatcaatgggacattggctgcagacatgtctagcatctcgcaaggtagcatggaggaaaacaagcgtgcatacatgaacctggcgaagaagttgcagaaggagttgggggagcgccagtcagacagtctggaaaaggttcgccagctgctgccactgcccaagcagacccgagatgtcatcacgtgtgagccacagggctcccttatcgataccaagggcaacaagattgctggcttcgattccatcttcaagaaggagggtctacaggtttccaccaaacagaagatctcgccctgggatctttttgaggggttgaagccgtcagcaccactctcttggggctggtttggaacagtccgagtggaccggcgagtggctcgaggagaggagcagcagcggttgctgctctaccacacacacctgaggccccggccccgcgcctattacctggagccactgccactgcccccagaagatgaggagccgcctgctcctaccctgctagagcctgagaaaaaggctccagagccccccaaaactgacaaaccgggggctgctccacccagtactgaggaacgcaagaagaagtccaccaagggcaagaaacgcagccagccagctaccaagacagaggactatggaatgggcccgggtcggagcggcccttatggtgtgacagtgcctccggacctcctgcaccacccaaaccctggttctataacacaccttaactacaggcaaggctccataggcctgtacacccagaaccagccactacctgcaggtggccctcgtgtggacccataccgtcctgtgcgcttaccaatgcagaagctgcccacccgaccaacttaccctggagtgctgcccacaaccatgactggcgtcatgggtttagaaccctcctcttataagacctctgtgtaccggcagcagcaacctgcggtgccccaaggacagcgccttcgccaacagctccaggcaaagatacagagtcagggcatgttgggacagtcatctgtccatcagatgactcccagctcttcctacggtttgcagacttcccagggctatactccttatgtttctcatgtgggattgcagcaacacacaggccctgcaggtaccatggtgccccccagctactccagccagccttaccagagcacccacccttctaccaatcctactcttgtagatcctacccgccacctgcaacagcggcccagtggctatgtgcaccagcaggcccccacctatggacatggactgacctccactcaaaggttttcacaccagacactgcagcagacacccatgataagtaccatgactccaatgagtgcccagggcgtccaggcaggcgtccgttcaacagccatcctacctgagcagcagcagcagcagcaacagcagcaacagcaacagcagcagcagcagcaacagcaacagcagcagcagcagcagcagtaccacatccggcagcagcagcagcagcagatcctgcggcagcagcagcaacagcaacagcagcagcagcagcagcagcaacagcaacagcagcagcagcaacagcaacaacagcaacaccagcagcaacagcagcaacaggcggctcctccccaaccccagccccagtcccagccccagttccagcgccaggggcttcagcagacccagcagcagcaacagacagcagctttggtccggcaacttcaacaacagctctctaatacccagccacagcccagtaccaacatatttggacgctactgagccacctggaggaactgcttgtgcactggatgtggccccaccctttcctcttaattcccaatcccattcctgggctagcaccagtagtggttggggccctcccctcaggctccatttttaataagtttttagtatttttgttaatgtgaggcattgagctgttgggttttgtatattatttatatagagaccccagagctgttgcacccaatacacagagcttctttgcaaaggg

SEQ ID NO: 152132 - DNA, 6795 bp, Homo sapiens
  Payload ID: 9939
  Gene Symbol: MED12
  Gene Name: mediator complex subunit 12
  Uniprot ID: Q93074
  ENST ID: ENST00000374080
  CDS Start-End: 33-6566
gctggtgcctccggcgctacgggctgggcaagatggcggccttcgggatcttgagctacgaacaccggcccctgaagcggccgcggctggggcctcccgatgtttaccctcaggaccccaaacagaaggaggatgaactgacggccttgaatgtaaaacaaggtttcaataaccagcctgctgtctctggggatgagcatggcagtgccaagaacgtcagcttcaatcctgccaagatcagttccaacttcagcagcattattgcagagaaattacgttgtaatacccttcctgacactggtcgcaggaagccccaagtgaaccagaaggataacttctggctggtgactgcacgatcccagagtgccattaacacttggttcactgacttggctggcaccaagccactcacgcaactagccaaaaaggtccccattttcagtaagaaggaagaggtgtttgggtacttagccaaatacacagtgcctgtgatgcgggctgcctggctcattaagatgacctgtgcctactatgcagcaatctctgagaccaaggttaagaagagacatgttgaccctttcatggaatggactcagatcatcaccaagtacttatgggagcagttacagaagatggctgaatactaccggccagggcctgcaggaagtgggggctgtggttccacgatagggcccttgccccatgatgtagaggtggcaatccggcagtgggattacaccgagaagctggccatgttcatgtttcaggatggaatgctggacagacatgagttcctgacctgggtgcttgagtgttttgagaagatccgccctggagaggatgaattgcttaaactgctgctgcctctgcttctccgatactctggggaatttgttcagtctgcatacctgtcccgccggcttgcctacttctgtacacggagactggccctgcagctggatggtgtgagcagtcactcatctcatgttatatctgctcagtcaacaagcacgctacccaccacccctgctcctcagcccccaactagcagcacaccctcgactccctttagtgacctgcttatgtgccctcagcaccggcccctggtttttggcctcagctgtatcctacagaccatcctcctgtgctgtcctagtgccttggtttggcactactcactgactgatagcagaattaagaccggctcaccacttgaccacttgcctattgccccgtccaacctgcccatgccagagggtaacagtgccttcactcagcaggtccgtgcaaagttgcgggagatcgagcagcagatcaaggagcggggacaggcagttgaagttcgctggtctttcgataaatgccaggaagctactgcaggcttcaccattggacgggtacttcatactttggaagtgctggacagccatagttttgaacgctctgacttcagcaactctcttgactccctttgtaaccgaatctttggattgggacctagcaaggatgggcatgagatctcctcagatgatgatgctgtggtgtcattgctatgtgaatgggctgtcagctgcaagcgttctggtcggcatcgtgctatggtggtagccaagctcctggagaagagacaggcggagattgaggctgagcgttgtggagaatcagaagccgcagatgagaagggttccatcgcctctggctccctttctgctcccagtgctcccattttccaggatgtcctcctgcagtttctggatacacaggctcccatgctgacggaccctcgaagtgagagtgagcgggtggaattctttaacttagtactgctgttctgtgaactgattcgacatgatgttttctcccacaacatgtatacttgcactctcatctcccgaggggaccttgcctttggagcccctggtccccggcctccctctccctttgatgatcctgccgatgacccagagcacaaggaggctgaaggcagcagcagcagcaagctggaagatccagggctctcagaatctatggacattgaccctagttccagtgttctctttgaggacatggagaagcctgatttctcattgttctcccctactatgccctgtgaggggaagggcagtccatcccctgagaagccagatgtcgagaaggaggtgaagcccccacccaaggagaagattgaagggacccttggggttctttacgaccagccacgacacgtgcagtacgccacccattttcccatcccccaggaggagtcatgcagccatgagtgcaaccagcggttggtcgtactgtttggggtgggaaagcagcgagatgatgcccgccatgccatcaagaaaatcaccaaggatatcttgaaggttctgaaccgcaaagggacagcagaaactgaccagcttgctcctattgtgcctctgaatcctggagacctgacattcttaggtggggaggatgggcagaagcggcgacgcaaccggcctgaagccttccccactgctgaagatatctttgctaagttccagcacctttcacattatgaccaacaccaggtcacggctcaggtctcccggaatgttctggagcagatcacgagctttgcccttggcatgtcataccacttgcctctggtgcagcatgtgcagttcatcttcgacctcatggaatattcactcagcatcagtggcctcatcgactttgccattcagctgctgaatgaactgagtgtagttgaggctgagctgcttctcaaatcctcggatctggtgggcagctacactactagcctgtgcctgtgcatcgtggctgtcctgcggcactatcatgcctgcctcatcctcaaccaggaccagatggcacaggtctttgaggggctgtgtggcgtcgtgaagcatgggatgaaccggtccgatggctcctctgcagagcgctgtatccttgcttatctctatgatctgtacacctcctgtagccatttaaagaacaaatttggggagctcttcagcgacttttgctcaaaggtgaagaacaccatctactgcaacgtggagccatcggaatcaaatatgcgctgggcacctgagttcatgatcgacactctagagaaccctgcagctcacaccttcacctacacggggctaggcaagagtcttagtgagaaccctgctaaccgctacagctttgtctgcaatgcccttatgcacgtctgtgtggggcaccatgatcccgatagggtgaatgacatcgcaatcctgtgtgcagagctgaccggctattgcaagtcactgagtgcagaatggctaggagtgcttaaggccttgtgctgctcctctaacaatggcacttgtggtttcaacgatctcctctgcaatgttgatgtcagtgacctatcttttcatgactcgctggctacttttgttgccatcctcatcgctcggcagtgtttgctcctggaagatctgattcgctgtgctgccatcccttcactccttaatgctgcttgtagtgaacaggactctgagccaggggcccggcttacctgccgcatcctccttcaccttttcaagacaccgcagctcaatccttgccagtctgatggaaacaagcctacagtaggaatccgctcctcctgcgaccgccacctgctggctgcctcccagaaccgcatcgtggatggagccgtgtttgctgttctcaaggctgtgtttgtacttggggatgcggaactgaaaggttcaggcttcactgtgacaggaggaacagaagaacttccagaggaggagggaggaggtggcagtggtggtcggaggcagggtggccgcaacatctctgtggagacagccagtctggatgtctatgccaagtacgtgctgcgcagcatctgccaacaggaatgggtaggagaacgttgccttaagtctctgtgtgaggacagcaatgacctgcaagacccagtgttgagtagtgcccaggcgcagcgcctcatgcagctcatttgctatccacatcgactgctggacaatgaggatggggaaaacccccagcggcagcgcataaagcgcattctccagaacttggaccagtggaccatgcgccagtcttccttggagctgcagctcatgatcaagcagacccctaacaatgagatgaactccctcttggagaacatcgccaaggccacaatcgaggttttccaacagtcagcagagacagggtcatcttctggaagtactgcaagcaacatgcccagcagcagcaagaccaagcctgtgctcagctctctagagcgctctggtgtatggctggtggcccccctcattgctaaactgcccacctcagtccagggacatgtgttaaaggctgctggggaagaattggagaagggtcagcacctgggttcctcttcacgcaaagaacgtgatcgacaaaagcagaagagcatgtccctattgagccagcagcccttcttatcgctggtgctaacatgtctgaaagggcaggatgaacaacgcgagggactccttacctccctctacagccaggtgcaccagattgtgaataattggcgagatgaccagtacttagatgattgcaaaccaaagcagcttatgcatgaggcactcaaactgcggctcaacctggtggggggcatgtttgacacggtgcagcgcagcacccagcagaccacggagtgggccatgctcctcctggagatcatcatcagcggcactgtcgacatgcagtccaacaatgagctcttcactactgtgttggacatgctgagcgtgctcatcaatgggacattggctgcagacatgtctagcatctcgcaaggtagcatggaggaaaacaagcgtgcatacatgaacctggcgaagaagttgcagaaggagttgggggagcgccagtcagacagtctggaaaaggttcgccagctgctgccactgcccaagcagacccgagatgtcatcacgtgtgagccacagggctcccttatcgataccaagggcaacaagattgctggcttcgattccatcttcaagaaggagggtctacaggtttccaccaaacagaagatctcgccctgggatctttttgaggggttgaagccgtcagcaccactctcttggggctggtttggaacagtccgagtggaccggcgagtggctcgaggagaggagcagcagcggttgctgctctaccacacacacctgaggccccggccccgcgcctattacctggagccactgccactgcccccagaagatgaggagccgcctgctcctaccctgctagagcctgagaaaaaggctccagagccccccaaaactgacaaaccgggggctgctccacccagtactgaggaacgcaagaagaagtccaccaagggcaagaaacgcagccagccagctaccaagacagaggactatggaatgggcccgggtcggagcggcccttatggtgtgacagtgcctccggacctcctgcaccacccaaaccctggttctataacacaccttaactacaggcaaggctccataggcctgtacacccagaaccagccactacctgcaggtggccctcgtgtggacccataccgtcctgtgcgcttaccaatgcagaagctgcccacccgaccaacttaccctggagtgctgcccacaaccatgactggcgtcatgggtttagaaccctcctcttataagacctctgtgtaccggcagcagcaacctgcggtgccccaaggacagcgccttcgccaacagctccagcagagtcagggcatgttgggacagtcatctgtccatcagatgactcccagctcttcctacggtttgcagacttcccagggctatactccttatgtttctcatgtgggattgcagcaacacacaggccctgcaggtaccatggtgccccccagctactccagccagccttaccagagcacccacccttctaccaatcctactcttgtagatcctacccgccacctgcaacagcggcccagtggctatgtgcaccagcaggcccccacctatggacatggactgacctccactcaaaggttttcacaccagacactgcagcagacacccatgataagtaccatgactccaatgagtgcccagggcgtccaggcaggcgtccgttcaacagccatcctacctgagcagcagcagcagcagcaacagcagcaacagcaacagcagcagcagcagcaacagcaacagcagcagcagcagcagcagtaccacatccggcagcagcagcagcagcagatcctgcggcagcagcagcaacagcaacagcagcagcagcagcagcagcaacagcaacagcagcagcagcaacagcaacaacagcaacaccagcagcaacagcagcaacaggcggctcctccccaaccccagccccagtcccagccccagttccagcgccaggggcttcagcagacccagcagcagcaacagacagcagctttggtccggcaacttcaacaacagctctctaatacccagccacagcccagtaccaacatatttggacgctactgagccacctggaggaactgcttgtgcactggatgtggccccaccctttcctcttaattcccaatcccattcctgggctagcaccagtagtggttggggccctcccctcaggctccatttttaataagtttttagtatttttgttaatgtgaggcattgagctgttgggttttgtatattatttatatagagaccccagagctgttgcacccaatacacagagcttctttgc

SEQ ID NO: 152133 - DNA, 6827 bp, Homo sapiens
  Payload ID: 9939
  Gene Symbol: MED12
  Gene Name: mediator complex subunit 12
  Uniprot ID: Q93074
  ENST ID: ENST00000374102
  CDS Start-End: 61-6591
ttcccgttcccccagtcagcctggccctgctggtgcctccggcgctacgggctgggcaagatggcggccttcgggatcttgagctacgaacaccggcccctgaagcggccgcggctggggcctcccgatgtttaccctcaggaccccaaacagaaggaggatgaactgacggccttgaatgtaaaacaaggtttcaataaccagcctgctgtctctggggatgagcatggcagtgccaagaacgtcagcttcaatcctgccaagatcagttccaacttcagcagcattattgcagagaaattacgttgtaatacccttcctgacactggtcgcaggaagccccaagtgaaccagaaggataacttctggctggtgactgcacgatcccagagtgccattaacacttggttcactgacttggctggcaccaagccactcacgcaactagccaaaaaggtccccattttcagtaagaaggaagaggtgtttgggtacttagccaaatacacagtgcctgtgatgcgggctgcctggctcattaagatgacctgtgcctactatgcagcaatctctgagaccaaggttaagaagagacatgttgaccctttcatggaatggactcagatcatcaccaagtacttatgggagcagttacagaagatggctgaatactaccggccagggcctgcaggaagtgggggctgtggttccacgatagggcccttgccccatgatgtagaggtggcaatccggcagtgggattacaccgagaagctggccatgttcatgtttcaggatggaatgctggacagacatgagttcctgacctgggtgcttgagtgttttgagaagatccgccctggagaggatgaattgcttaaactgctgctgcctctgcttctccgatactctggggaatttgttcagtctgcatacctgtcccgccggcttgcctacttctgtacacggagactggccctgcagctggatggtgtgagcagtcactcatctcatgttatatctgctcagtcaacaagcacgctacccaccacccctgctcctcagcccccaactagcagcacaccctcgactccctttagtgacctgcttatgtgccctcagcaccggcccctggtttttggcctcagctgtatcctacagaccatcctcctgtgctgtcctagtgccttggtttggcactactcactgactgatagcagaattaagaccggctcaccacttgaccacttgcctattgccccgtccaacctgcccatgccagagggtaacagtgccttcactcagcaggtccgtgcaaagttgcgggagatcgagcagcagatcaaggagcggggacaggcagttgaagttcgctggtctttcgataaatgccaggaagctactgcaggcttcaccattggacgggtacttcatactttggaagtgctggacagccatagttttgaacgctctgacttcagcaactctcttgactccctttgtaaccgaatctttggattgggacctagcaaggatgggcatgagatctcctcagatgatgatgctgtggtgtcattgctatgtgaatgggctgtcagctgcaagcgttctggtcggcatcgtgctatggtggtagccaagctcctggagaagagacaggcggagattgaggctgagcgttgtggagaatcagaagccgcagatgagaagggttccatcgcctctggctccctttctgctcccagtgctcccattttccaggatgtcctcctgcagtttctggatacacaggctcccatgctgacggaccctcgaagtgagagtgagcgggtggaattctttaacttagtactgctgttctgtgaactgattcgacatgatgttttctcccacaacatgtatacttgcactctcatctcccgaggggaccttgcctttggagcccctggtccccggcctccctctccctttgatgatcctgccgatgacccagagcacaaggaggctgaaggcagcagcagcagcaagctggaagatccagggctctcagaatctatggacattgaccctagttccagtgttctctttgaggacatggagaagcctgatttctcattgttctcccctactatgccctgtgaggggaagggcagtccatcccctgagaagccagatgtcgagaaggaggtgaagcccccacccaaggagaagattgaagggacccttggggttctttacgaccagccacgacacgtgcagtacgccacccattttcccatcccccaggaggagtcatgcagccatgagtgcaaccagcggttggtcgtactgtttggggtgggaaagcagcgagatgatgcccgccatgccatcaagaaaatcaccaaggatatcttgaaggttctgaaccgcaaagggacagcagaaactgaccagcttgctcctattgtgcctctgaatcctggagacctgacattcttaggtggggaggatgggcagaagcggcgacgcaaccggcctgaagccttccccactgctgaagatatctttgctaagttccagcacctttcacattatgaccaacaccaggtcacggctcaggtctcccggaatgttctggagcagatcacgagctttgcccttggcatgtcataccacttgcctctggtgcagcatgtgcagttcatcttcgacctcatggaatattcactcagcatcagtggcctcatcgactttgccattcagctgctgaatgaactgagtgtagttgaggctgagctgcttctcaaatcctcggatctggtgggcagctacactactagcctgtgcctgtgcatcgtggctgtcctgcggcactatcatgcctgcctcatcctcaaccaggaccagatggcacaggtctttgaggggctgtgtggcgtcgtgaagcatgggatgaaccggtccgatggctcctctgcagagcgctgtatccttgcttatctctatgatctgtacacctcctgtagccatttaaagaacaaatttggggagctcttcagcgacttttgctcaaaggtgaagaacaccatctactgcaacgtggagccatcggaatcaaatatgcgctgggcacctgagttcatgatcgacactctagagaaccctgcagctcacaccttcacctacacggggctaggcaagagtcttagtgagaaccctgctaaccgctacagctttgtctgcaatgcccttatgcacgtctgtgtggggcaccatgatcccgatagggtgaatgacatcgcaatcctgtgtgcagagctgaccggctattgcaagtcactgagtgcagaatggctaggagtgcttaaggccttgtgctgctcctctaacaatggcacttgtggtttcaacgatctcctctgcaatgttgatgtcagtgacctatcttttcatgactcgctggctacttttgttgccatcctcatcgctcggcagtgtttgctcctggaagatctgattcgctgtgctgccatcccttcactccttaatgctgcttgtagtgaacaggactctgagccaggggcccggcttacctgccgcatcctccttcaccttttcaagacaccgcagctcaatccttgccagtctgatggaaacaagcctacagtaggaatccgctcctcctgcgaccgccacctgctggctgcctcccagaaccgcatcgtggatggagccgtgtttgctgttctcaaggctgtgtttgtacttggggatgcggaactgaaaggttcaggcttcactgtgacaggaggaacagaagaacttccagaggaggagggaggaggtggcagtggtggtcggaggcagggtggccgcaacatctctgtggagacagccagtctggatgtctatgccaagtacgtgctgcgcagcatctgccaacaggaatgggtaggagaacgttgccttaagtctctgtgtgaggacagcaatgacctgcaagacccagtgttgagtagtgcccaggcgcagcgcctcatgcagctcatttgctatccacatcgactgctggacaatgaggatggggaaaacccccagcggcagcgcataaagcgcattctccagaacttggaccagtggaccatgcgccagtcttccttggagctgcagctcatgatcaagcagacccctaacaatgagatgaactccctcttggagaacatcgccaaggccacaatcgaggttttccaacagtcagcagagacagggtcatcttctggaagtactgcaagcaacatgcccagcagcagcaagaccaagcctgtgctcagctctctagagcgctctggtgtatggctggtggcccccctcattgctaaactgcccacctcagtccagggacatgtgttaaaggctgctggggaagaattggagaagggtcagcacctgggttcctcttcacgcaaagaacgtgatcgacaaaagcagaagagcatgtccctattgagccagcagcccttcttatcgctggtgctaacatgtctgaaagggcaggatgaacaacgcgagggactccttacctccctctacagccaggtgcaccagattgtgaataattggcgagatgaccagtacttagatgattgcaaaccaaagcagcttatgcatgaggcactcaaactgcggctcaacctggtggggggcatgtttgacacggtgcagcgcagcacccagcagaccacggagtgggccatgctcctcctggagatcatcatcagcggcactgtcgacatgcagtccaacaatgagctcttcactactgtgttggacatgctgagcgtgctcatcaatgggacattggctgcagacatgtctagcatctcgcaaggtagcatggaggaaaacaagcgtgcatacatgaacctggcgaagaagttgcagaaggagttgggggagcgccagtcagacagtctggaaaaggttcgccagctgctgccactgcccaagcagacccgagatgtcatcacgtgtgagccacagggctcccttatcgataccaagggcaacaagattgctggcttcgattccatcttcaagaaggagggtctacaggtttccaccaaacagaagatctcgccctgggatctttttgaggggttgaagccgtcagcaccactctcttggggctggtttggaacagtccgagtggaccggcgagtggctcgaggagaggagcagcagcggttgctgctctaccacacacacctgaggccccggccccgcgcctattacctggagccactgccactgcccccagaagatgaggagccgcctgctcctaccctgctagagcctgagaaaaaggctccagagccccccaaaactgacaaaccgggggctgctccacccagtactgaggaacgcaagaagaagtccaccaagggcaagaaacgcagccagccagctaccaagacagaggactatggaatgggcccgggtcggagcggcccttatggtgtgacagtgcctccggacctcctgcaccacccaaaccctggttctataacacaccttaactacaggcaaggctccataggcctgtacacccagaaccagccactacctgcaggtggccctcgtgtggacccataccgtcctgtgcgcttaccaatgcagaagctgcccacccgaccaacttaccctggagtgctgcccacaaccatgactggcgtcatgggtttagaaccctcctcttataagacctctgtgtaccggcagcagcaacctgcggtgccccaaggacagcgccttcgccaacagctccagagtcagggcatgttgggacagtcatctgtccatcagatgactcccagctcttcctacggtttgcagacttcccagggctatactccttatgtttctcatgtgggattgcagcaacacacaggccctgcaggtaccatggtgccccccagctactccagccagccttaccagagcacccacccttctaccaatcctactcttgtagatcctacccgccacctgcaacagcggcccagtggctatgtgcaccagcaggcccccacctatggacatggactgacctccactcaaaggttttcacaccagacactgcagcagacacccatgataagtaccatgactccaatgagtgcccagggcgtccaggcaggcgtccgttcaacagccatcctacctgagcagcagcagcagcagcaacagcagcaacagcaacagcagcagcagcagcaacagcaacagcagcagcagcagcagcagtaccacatccggcagcagcagcagcagcagatcctgcggcagcagcagcaacagcaacagcagcagcagcagcagcagcaacagcaacagcagcagcagcaacagcaacaacagcaacaccagcagcaacagcagcaacaggcggctcctccccaaccccagccccagtcccagccccagttccagcgccaggggcttcagcagacccagcagcagcaacagacagcagctttggtccggcaacttcaacaacagctctctaatacccagccacagcccagtaccaacatatttggacgctactgagccacctggaggaactgcttgtgcactggatgtggccccaccctttcctcttaattcccaatcccattcctgggctagcaccagtagtggttggggccctcccctcaggctccatttttaataagtttttagtatttttgttaatgtgaggcattgagctgttgggttttgtatattatttatatagagaccccagagctgttgcacccaatacacagagcttctttgcaaaggga

SEQ ID NO: 152134 - DNA, 389 bp, Homo sapiens
  Payload ID: 9939
  Gene Symbol: MED12
  Gene Name: mediator complex subunit 12
  ENST ID: ENST00000429213
  CDS Start-End: 1-389
ggaccccaaacagaaggaggaaaaaacaactaaacgccgctttcctgcctcaggatgaactgacggccttgaatgtaaaacaaggtttcaataaccagcctgctgtctctggggatgagcatggcagtgccaagaacgtcagcttcaatcctgccaagatcagttccaacttcagcagcattattgcagagaaattacgttgtaatacccttcctgacactggtcgcaggaagccccaagtgaaccagaaggataacttctggctggtgactgcacgatcccagagtgccattaacacttggttcactgacttggctggcaccaagccactcacgcaactagccaaaaaggtccccattttcagtaagaaggaagaggtgtttgggtac

SEQ ID NO: 152135 - DNA, 752 bp, Homo sapiens
  Payload ID: 9939
  Gene Symbol: MED12
  Gene Name: mediator complex subunit 12
  ENST ID: ENST00000444034
  CDS Start-End: 1-752
aggaacgcaagaagaagtccaccaagggcaagaaacgcagccagccagctaccaagacagaggactatggaatgggcccgggtcggagcggcccttatggtgtgacagtgcctccggacctcctgcaccacccaaaccctggttctataacacaccttaactacaggcaaggctccataggcctgtacacccagaaccagccactacctgcaggtggccctcgtgtggacccataccgtcctgtgcgcttaccaatgcagaagctgcccacccgaccaacttaccctggagtgctgcccacaaccatgactggcgtcatgggtttagaaccctcctcttataagacctctgtgtaccggcagcagcaacctgcggtgccccaaggacagcgccttcgccaacagctccagcagagtcagggcatgttgggacagtcatctgtccatcagatgactcccagctcttcctacggtttgcagacttcccagggctatactccttatgtttctcatgtgggattgcagcaacacacaggccctgcagatcctacccgccacctgcaacagcggcccagtggctatgtgcaccagcaggcccccacctatggacatggactgacctccactcaaaggttttcacaccagacactgcagcagacacccatgataagtaccatgactccaatgagtgcccagggcgtccaggcaggcgtccgttcaacagccatcctacctgagcagcagcagcagcag

SEQ ID NO: 152136 - DNA, 6401 bp, Homo sapiens
  Payload ID: 9940
  Gene Symbol: MED12L
  Gene Name: mediator complex subunit 12-like
  ENST ID: ENST00000273432
  CDS Start-End: 34-5463
tctcattcatttcgccggttaacatgagagatcatggccgccttcgggcttctcagctatgagcagagaccgctgaagcgcccccggctcgggccgcccgacgtctacccacaggaccccaagcagaaggaggatgaacttactgctgtgaatgtaaagcaaggcttcaataatcagccagccttcactggagatgaacatggctcagccagaaatattgtaattaacccatcaaagattggagcttattttagcagcatattagctgagaaactgaagcttaacactttccaggacacgggaaagaagaaaccacaagttaatgctaaagataattattggctggttactgctcgatcccagagtgcaattcatagttggttttctgacttagcaggaaataagccactttctattttggcaaaaaaggttcctatccttagtaaaaaagaggatgtttttgcatatttagctaaatattctgtgccaatggttcgagcaacgtggctgatcaagatgacttgtgcctattattctgctatatctgaagctaaaattaagaaacgtcaggctcctgatccgaatttggagtggacacagatatctaccagatatcttcgagagcagttggccaagatttctgacttttaccacatggcctccagcacgggcgatggccctgtccctgtgccaccagaggtggagcaagccatgaagcaatgggaatacaacgaaaagctagcatttcacatgttccaggaaggaatgttagaaaaacacgaatatttgacatggatcctggatgttttagaaaagatcagaccaatggatgatgatcttcttaaactcttgctaccactaatgctgcaggttcgggcaaggatttatgaagtagaacaacagataaaacaaagaggccgtgcagtggaagttcggtggtcatttgacaagtgccaagaatccacagcaggggtgactattagtcgggttttgcacacgttggaagttttggatcgtcactgttttgaccgaactgattccagcaattccatggagacactttatcataagattttctgggcaaaccaaaacaaagataaccaagaggttgcgcccaacgatgaagctgtggtgacgctgttatgtgaatgggccgtgagctgcaaacggtctggcaagcacagggccatggctgtggcaaaactcctggagaagaggcaagcagaaattgaggcagagagatgtggtgaatcagaagtcttagatgagaaggagtctatttcttcatcctctcttgctggatccagtttgcctgttttccagaatgtgctgttaaggtttttagatacacaggccccctctttgtcggacccaaacagtgaatgtgaaaaggtggaatttgtgaacctggtgctgctcttctgcgagttcatccgccatgatgtcttctcccatgacgcatacatgtgtaccctcatatctcgaggagatttgtcagtcactgcctcaactcggccgcggtcaccagtaggggaaaatgcagatgaacactattcaaaggaccatgatgtgaaaatggagattttttctcctatgcctggagaatcctgtgagaatgccaacacttcgttgggcagaagaatgtcagttaattgtgagaagttggtgaagagggaaaagccaagggaattaatttttccatctaattatgacctccttcgccacttacagtatgcaacacattttcctatacctctggatgaatcttcaagtcatgaatgtaaccagcgcacaatccttctctatggagtcggcaaagagcgtgatgaagcaaggcatcagctgaagaagattaccaaagatatcctgaaaattctaaataagaagagcaccacagagacaggggttggggacgaaggacaaaaagccaggaagaacaaacaggagacatttccaacactggagactgtgttcactaaactccagctcctttcatattttgatcaacatcaagtgacatctcagatttctaacaatgtgctagaacaaatcacaagctttgcgtcaggaacatcctatcatctccctttggctcaccacattcagctcatctttgatctcatggagccagcactgaacatcaacggactaattgacttcgcaatacagttactaaatgaactgagtgttgtggaagctgaactgctcctaaaatcctccagcctggcaggaagttatacaacaggactgtgtgtctgcatcgtggctgttctcaggcgctatcacagttgtctaatcttgaatcctgatcagacagcccaggtgtttgaagggttgtgtggtgtggtcaagcatgtcgtaaacccctcagaatgttcttcccctgaaagatgcattttagcctacctctatgatctctatgtgtcatgtagccacctcagaagtaaatttggagacctcttcagtagtgcctgttcaaaagtaaagcaaaccatatataataacgtgatgcctgcaaattcgaacttgcgatgggatccagacttcatgatggattttattgagaatccctcagcccgcagcatcaactactcaatgctgggcaagatcctcagtgacaatgcggccaatcgctacagctttgtctgcaatacactcatgaatgtatgtatgggccatcaggatgctggcaggattaacgacatagccaatttctcctctgagcttacggcttgctgcactgttcttagttcagaatggctgggggttctgaaggctctttgttgttcttcaaatcacgtgtgggggtttaatgatgtactttgcactgtagatgtgagtgacctttcattccatgattcattagctactttcattgctattctgatagcacgacagtgtttttccctggaggacgtcgtgcagcatgtcgcacttccctctcttctagcagcagcttgtggggatgcggacgccgagcctggggcgagaatgacatgccgactcttgcttcatctcttccgagctccccaggcctgcttcttacctcaagcaacgggcaaacctttccctggaataagatcatcttgtgatagacacctcttagccgctgctcacaacagcattgaagtgggagccgtgtttgctgtcttaaaagcaattatgatgcttggagatgccaaaattggcaataacagtgtcagctctttaaagaatgatgacttcaccatgagaggtttgcgatgtgatgggaatgctgatgatatctggactgcctcacaaaatccaaaatcctgtgggaaaagcatttccatagaaactgccaatttaagagaatacgctagatatgtactgaggactatctgtcaacaggaatgggtaggagagcattgcttaaaagaacctgaaagattatgtacagacaaagaacttatattggaccctgtgctttcaaatatgcaagcacagaaattactgcagcttatctgttatcctcatggcattaaagaatgtaccgagggggacaatctgcaaagacagcacattaagcgtattcttcagaatcttgagcagtggacactgaggcaatcctggttagaactccagctaatgatcaaacagtgcttgaaggaccctggctctggttctgtggccgaaatgaacaacttactggacaatattgcaaaggcaacaatagaggtattccagcagtctgcagacctaaataattcttctaattctggcatgagcctcttcaacccaaacagtattggaagtgctgatacaagtagcacgagacagaatggaataaagacattcctaagttcctccgaacgcaggggtgtatggttggtggcccccctcatcgccaggttgccaacttctgtgcaaggaagagtgctgaaagccgctggggaagagctggagaagggacagcacttgggttcttcttccaaaaaggaaagggacagacagaaacagaaaagtatgtctcttttgagtcaacaacccttcctctcactggtacttacctgccttaagggacaagatgaacaaagggaaggcctcctaacatctctccagaatcaagttaaccagattttaagtaactggagagaagaacgataccaagatgacataaaagcgcggcagatgatgcacgaagcattgcaactccgcctaaatttggtaggaggaatgtttgacacggtgcagaggagcacccagtggactacagactgggccctgctactccttcagatcattacttcaggaactgttgacatgcacactaacaatgaattattcacaacagttcttgacatgctgggtgttttaatcaatggaacgttagcctctgacctatcaaatgcatcccctgggggatctgaagagaacaagcgtgcatacatgaatttagtaaagaaactgaaaaaagagctaggagacaagcgatcagaaagtattgacaaagttcgacagttactacctttgccgaaacagacatgtgatgtcatcacttgtgaacctatgggttccttgattgacacaaaaggaaacaaaattgctggatttgactctatagataaaaaacagggtctccaggtctctacgaagcagaaggtgtccccgtgggacttgtttgagggtcagaagaacccagctcctttgtcctgggcctggtttgggacagtccgagtggaccgaagagtgatcaagtacgaggagcagcatcacctcctgctgtatcacacacaccccatgcccaagccccgcagttactacctccagccactgcccctgcctcctgaggaggaagaggaagagcccacatctccagtttctcaggaaccagaaaggaagtccgctgagctgtcagatcagggaaaaaccacaacagatgaagaaaagaaaacaaaaggaaggaagcgcaagacgaaatctagctcaagagttgatgaatatccacagagcaacatataccgagtgcctcctaattactcgcctatctcctcccaaatgatgcaccatccacagtccaccttgtggggttacaacctcgtgggccagccccagcagcccggctttttccttcagaaccaatctcttactccaggtggctccagattggaccctgcaggctcctttgtcccaaccaacaccaaacaagctctgtcaaacatgctacagcggcgctcaggcgccatgatgcagccgccttctcttcatgcaatcacatcgcagcagcagttgatacagatgaagcttctgcagcagcagcagcaacagcgacttctcaggcaagcccagactcggcctttccaacagtttcccaggcaaggcttgcagcagacccagcagcagcagcagacggccgccttggtgcggcagctccagaagcagctttccagcaaccagccacagcaaggagtgactccgtatgggcatccttcacacttctgaatctgcaagaggagaagacatgacgttttatgtttgcactgaaaaacagaaaatcaaatttaatgcattagtcatcttaaaaatgtccctttttttcatttctttgacattttactatattttatgctacatctcacaaaaaaaaaaaaaggtgtttaaacaaaaagccaaggagaagttgtggtttgattttgttgaattcacctttaaagtaggtttacaaatgtgaatcatgcaggcaggcctactcccggaagagtgtgctagcagaccttttgaaattggtgctttttttgaatctcacatttctagaaagaatggattatgatggatctaaggtatttatgtatttcattcattaatgatgacgttgtttttttttttttaattttattttccaaactgtgctggaccaaactactgatttgaaaggcatgtcagatcttgacagaaacatggcctgtttattctgcattcacctgtgatggtgaaacggacatttatttgcatcgctctaatttgaaatgtttgtaatctcataagcactttataaactttgttcttatttatgtaggactcttctttgcttttgttgtggtcaaaaggtgctgaaacagattgttgcttcgtacttaaacttcttaaaccaagaacctaaaccaaggtttctttgagagccgccctaagatgtgcggaaacctgttagaagtagctgtactcaaatttgttttgaggcaagatcattgatgagagtcattgtgaaggtacaacatgtaaatcctaaaggcctgaaagaactgcagtggaatcgtccaactatttattgccagttttggttctcctgaaccttatgccaccttaaggggaaaaaaaaatccagtagctggcttgagattccagtgctcacacttgacatggtttccagagaatctggcccc

SEQ ID NO: 152137 - DNA, 2862 bp, Homo sapiens
  Payload ID: 9940
  Gene Symbol: MED12L
  Gene Name: mediator complex subunit 12-like
  Uniprot ID: Q86YW9
  ENST ID: ENST00000309237
  CDS Start-End: 534-2804
gtccgctccacagcttcttcccgggaggggagggccaccctcgccttgggcgagcacttcagccaccagcctaggcgccaagaaaagtttttttttttttttttccagtgccccacccccacccccatcctgcgcccagctggggtgggtttgggtccattggtgaaaaaagtcacacgttcccatcagctgctcctccccctggagacaaggtaggggggagcagaggaggcaggcgccgcggaggaccctggccgacctctagtccctccgccgccgccaccggagcggtgcgtcccggggctcgagcgcagccgagtacccgccgaaggctgtccccatcagtgcgtgtctgctgccgggcagcggcagcatccaacctgctttattcctcctgcctgcagcgccacagcgagcgagcgagcgaggagggggagagagggagtctgtctgcaaagtgctgctccctggtgctcagaggcggctgctccagctccaactctcattcatttcgccggttaacatgagagatcatggccgccttcgggcttctcagctatgagcagagaccgctgaagcgcccccggctcgggccgcccgacgtctacccacaggaccccaagcagaaggaggatgaacttactgctgtgaatgtaaagcaaggcttcaataatcagccagccttcactggagatgaacatggctcagccagaaatattgtaattaacccatcaaagattggagcttattttagcagcatattagctgagaaactgaagcttaacactttccaggacacgggaaagaagaaaccacaagttaatgctaaagataattattggctggttactgctcgatcccagagtgcaattcatagttggttttctgacttagcaggaaataagccactttctattttggcaaaaaaggttcctatccttagtaaaaaagaggatgtttttgcatatttagctaaatattctgtgccaatggttcgagcaacgtggctgatcaagatgacttgtgcctattattctgctatatctgaagctaaaattaagaaacgtcaggctcctgatccgaatttggagtggacacagatatctaccagatatcttcgagagcagttggccaagatttctgacttttaccacatggcctccagcacgggcgatggccctgtccctgtgccaccagaggtggagcaagccatgaagcaatgggaatacaacgaaaagctagcatttcacatgttccaggaaggaatgttagaaaaacacgaatatttgacatggatcctggatgttttagaaaagatcagaccaatggatgatgatcttcttaaactcttgctaccactaatgctgcagtattcagatgagtttgttcagtcggcctacctgtctcgtcgtcttgcctacttttgtgcccggcgtctttccttgctgctgagcgatagccccaacctccttgctgcccactcaccccacatgatgataggaccaaacaactcgagtatcggggcccccagccctggcccccccggccctggcatgagccccgtgcagctggccttctcagattttctttcctgtgcacagcatggtcccctggtttatggacttagttgtatgttgcagactgtcactctctgttgcccaagtgccttggtgtggaattattccacaaatgaaaataagagcgcaaacccaggctcacccctggatctgctgcaggtggccccgtccagcctccccatgccgggtgggaacacggctttcaatcagcaggttcgggcaaggatttatgaagtagaacaacagataaaacaaagaggccgtgcagtggaagttcggtggtcatttgacaagtgccaagaatccacagcaggggtgactattagtcgggttttgcacacgttggaagttttggatcgtcactgttttgaccgaactgattccagcaattccatggagacactttatcataagattttctgggcaaaccaaaacaaagataaccaagaggttgcgcccaacgatgaagctgtggtgacgctgttatgtgaatgggccgtgagctgcaaacggtctggcaagcacagggccatggctgtggcaaaactcctggagaagaggcaagcagaaattgaggcagagagatgtggtgaatcagaagtcttagatgagaaggagtctatttcttcatcctctcttgctggatccagtttgcctgttttccagaatgtgctgttaaggtttttagatacacaggccccctctttgtcggacccaaacagtgaatgtgaaaaggtggaatttgtgaacctggtgctgctcttctgcgagttcatccgccatgatgtcttctcccatgacgcatacatgtgtaccctcatatctcgaggagatttgtcagtcactgcctcaactcggccgcggtcaccagtaggggaaaatgcagatgaacactattcaaaggaccatgatgtgaaaatggaggaacagagtattatggcgcatatgggcattgactcaggaaccactaacatttttgatgaagtagacaagagtgactttaaaactgactttggttcggaatttccaattttttctcctatgcctggagaatcctgtgagaatgccaacacttcgttgggcagaagaatgtcagttaattgtgagaagttggtgaagagggaaaagccaagggaattaatttttccatctaattatgacctccttcgccacttacagtatgcaacacattttcctatacctctggtaagtcattgcttcagttaatctataccctgattattttattataagatcaataactgttgaacgtcagattattcaa

SEQ ID NO: 152138 - DNA, 2757 bp, Homo sapiens
  Payload ID: 9940
  Gene Symbol: MED12L
  Gene Name: mediator complex subunit 12-like
  Uniprot ID: Q86YW9
  ENST ID: ENST00000422248
  CDS Start-End: 534-2699
gtccgctccacagcttcttcccgggaggggagggccaccctcgccttgggcgagcacttcagccaccagcctaggcgccaagaaaagtttttttttttttttttccagtgccccacccccacccccatcctgcgcccagctggggtgggtttgggtccattggtgaaaaaagtcacacgttcccatcagctgctcctccccctggagacaaggtaggggggagcagaggaggcaggcgccgcggaggaccctggccgacctctagtccctccgccgccgccaccggagcggtgcgtcccggggctcgagcgcagccgagtacccgccgaaggctgtccccatcagtgcgtgtctgctgccgggcagcggcagcatccaacctgctttattcctcctgcctgcagcgccacagcgagcgagcgagcgaggagggggagagagggagtctgtctgcaaagtgctgctccctggtgctcagaggcggctgctccagctccaactctcattcatttcgccggttaacatgagagatcatggccgccttcgggcttctcagctatgagcagagaccgctgaagcgcccccggctcgggccgcccgacgtctacccacaggaccccaagcagaaggaggatgaacttactgctgtgaatgtaaagcaaggcttcaataatcagccagccttcactggagatgaacatggctcagccagaaatattgtaattaacccatcaaagattggagcttattttagcagcatattagctgagaaactgaagcttaacactttccaggacacgggaaagaagaaaccacaagttaatgctaaagataattattggctggttactgctcgatcccagagtgcaattcatagttggttttctgacttagcaggaaataagccactttctattttggcaaaaaaggttcctatccttagtaaaaaagaggatgtttttgcatatttagctaaatattctgtgccaatggttcgagcaacgtggctgatcaagatgacttgtgcctattattctgctatatctgaagctaaaattaagaaacgtcaggctcctgatccgaatttggagtggacacagatatctaccagatatcttcgagagcagttggccaagatttctgacttttaccacatggcctccagcacgggcgatggccctgtccctgtgccaccagaggtggagcaagccatgaagcaatgggaatacaacgaaaagctagcatttcacatgttccaggaaggaatgttagaaaaacacgaatatttgacatggatcctggatgttttagaaaagatcagaccaatggatgatgatcttcttaaactcttgctaccactaatgctgcagtattcagatgagtttgttcagtcggcctacctgtctcgtcgtcttgcctacttttgtgcccggcgtctttccttgctgctgagcgatagccccaacctccttgctgcccactcaccccacatgatgataggaccaaacaactcgagtatcggggcccccagccctggcccccccggccctggcatgagccccgtgcagctggccttctcagattttctttcctgtgcacagcatggtcccctggtttatggacttagttgtatgttgcagactgtcactctctgttgcccaagtgccttggtgtggaattattccacaaatgaaaataagagcgcaaacccaggctcacccctggatctgctgcaggtggccccgtccagcctccccatgccgggtgggaacacggctttcaatcagcaggttcgggcaaggatttatgaagtagaacaacagataaaacaaagaggccgtgcagtggaagttcggtggtcatttgacaagtgccaagaatccacagcaggggtgactattagtcgggttttgcacacgttggaagttttggatcgtcactgttttgaccgaactgattccagcaattccatggagacactttatcataagattttctgggcaaaccaaaacaaagataaccaagaggttgcgcccaacgatgaagctgtggtgacgctgttatgtgaatgggccgtgagctgcaaacggtctggcaagcacagggccatggctgtggcaaaactcctggagaagaggcaagcagaaattgaggcagagagatgtggtgaatcagaagtcttagatgagaaggagtctatttcttcatcctctcttgctggatccagtttgcctgttttccagaatgtgctgttaaggtttttagatacacaggccccctctttgtcggacccaaacagtgaatgtgaaaaggtggaatttgtgaacctggtgctgctcttctgcgagttcatccgccatgatgtcttctcccatgacgcatacatgtgtaccctcatatctcgaggagatttgtcagtcactgcctcaactcggccgcggtcaccagtaggggaaaatgcagatgaacactattcaaaggaccatgatgtgaaaatggagattttttctcctatgcctggagaatcctgtgagaatgccaacacttcgttgggcagaagaatgtcagttaattgtgagaagttggtgaagagggaaaagccaagggaattaatttttccatctaattatgacctccttcgccacttacagtatgcaacacattttcctatacctctggtaagtcattgcttcagttaatctataccctgattattttattataagatcaataactgttgaacgtcagattattcaa

SEQ ID NO: 152139 - DNA, 10744 bp, Homo sapiens
  Payload ID: 9940
  Gene Symbol: MED12L
  Gene Name: mediator complex subunit 12-like
  Uniprot ID: Q86YW9
  ENST ID: ENST00000474524
  CDS Start-End: 39-6476
ccaactctcattcatttcgccggttaacatgagagatcatggccgccttcgggcttctcagctatgagcagagaccgctgaagcgcccccggctcgggccgcccgacgtctacccacaggaccccaagcagaaggaggatgaacttactgctgtgaatgtaaagcaaggcttcaataatcagccagccttcactggagatgaacatggctcagccagaaatattgtaattaacccatcaaagattggagcttattttagcagcatattagctgagaaactgaagcttaacactttccaggacacgggaaagaagaaaccacaagttaatgctaaagataattattggctggttactgctcgatcccagagtgcaattcatagttggttttctgacttagcaggaaataagccactttctattttggcaaaaaaggttcctatccttagtaaaaaagaggatgtttttgcatatttagctaaatattctgtgccaatggttcgagcaacgtggctgatcaagatgacttgtgcctattattctgctatatctgaagctaaaattaagaaacgtcaggctcctgatccgaatttggagtggacacagatatctaccagatatcttcgagagcagttggccaagatttctgacttttaccacatggcctccagcacgggcgatggccctgtccctgtgccaccagaggtggagcaagccatgaagcaatgggaatacaacgaaaagctagcatttcacatgttccaggaaggaatgttagaaaaacacgaatatttgacatggatcctggatgttttagaaaagatcagaccaatggatgatgatcttcttaaactcttgctaccactaatgctgcagtattcagatgagtttgttcagtcggcctacctgtctcgtcgtcttgcctacttttgtgcccggcgtctttccttgctgctgagcgatagccccaacctccttgctgcccactcaccccacatgatgataggaccaaacaactcgagtatcggggcccccagccctggcccccccggccctggcatgagccccgtgcagctggccttctcagattttctttcctgtgcacagcatggtcccctggtttatggacttagttgtatgttgcagactgtcactctctgttgcccaagtgccttggtgtggaattattccacaaatgaaaataagagcgcaaacccaggctcacccctggatctgctgcaggtggccccgtccagcctccccatgccgggtgggaacacggctttcaatcagcaggttcgggcaaggatttatgaagtagaacaacagataaaacaaagaggccgtgcagtggaagttcggtggtcatttgacaagtgccaagaatccacagcaggggtgactattagtcgggttttgcacacgttggaagttttggatcgtcactgttttgaccgaactgattccagcaattccatggagacactttatcataagattttctgggcaaaccaaaacaaagataaccaagaggttgcgcccaacgatgaagctgtggtgacgctgttatgtgaatgggccgtgagctgcaaacggtctggcaagcacagggccatggctgtggcaaaactcctggagaagaggcaagcagaaattgaggcagagagatgtggtgaatcagaagtcttagatgagaaggagtctatttcttcatcctctcttgctggatccagtttgcctgttttccagaatgtgctgttaaggtttttagatacacaggccccctctttgtcggacccaaacagtgaatgtgaaaaggtggaatttgtgaacctggtgctgctcttctgcgagttcatccgccatgatgtcttctcccatgacgcatacatgtgtaccctcatatctcgaggagatttgtcagtcactgcctcaactcggccgcggtcaccagtaggggaaaatgcagatgaacactattcaaaggaccatgatgtgaaaatggagattttttctcctatgcctggagaatcctgtgagaatgccaacacttcgttgggcagaagaatgtcagttaattgtgagaagttggtgaagagggaaaagccaagggaattaatttttccatctaattatgacctccttcgccacttacagtatgcaacacattttcctatacctctggatgaatcttcaagtcatgaatgtaaccagcgcacaatccttctctatggagtcggcaaagagcgtgatgaagcaaggcatcagctgaagaagattaccaaagatatcctgaaaattctaaataagaagagcaccacagagacaggggttggggacgaaggacaaaaagccaggaagaacaaacaggagacatttccaacactggagactgtgttcactaaactccagctcctttcatattttgatcaacatcaagtgacatctcagatttctaacaatgtgctagaacaaatcacaagctttgcgtcaggaacatcctatcatctccctttggctcaccacattcagctcatctttgatctcatggagccagcactgaacatcaacggactaattgacttcgcaatacagttactaaatgaactgagtgttgtggaagctgaactgctcctaaaatcctccagcctggcaggaagttatacaacaggactgtgtgtctgcatcgtggctgttctcaggcgctatcacagttgtctaatcttgaatcctgatcagacagcccaggtgtttgaagggttgtgtggtgtggtcaagcatgtcgtaaacccctcagaatgttcttcccctgaaagatgcattttagcctacctctatgatctctatgtgtcatgtagccacctcagaagtaaatttggagacctcttcagtagtgcctgttcaaaagtaaagcaaaccatatataataacgtgatgcctgcaaattcgaacttgcgatgggatccagacttcatgatggattttattgagaatccctcagcccgcagcatcaactactcaatgctgggcaagatcctcagtgacaatgcggccaatcgctacagctttgtctgcaatacactcatgaatgtatgtatgggccatcaggatgctggcaggattaacgacatagccaatttctcctctgagcttacggcttgctgcactgttcttagttcagaatggctgggggttctgaaggctctttgttgttcttcaaatcacgtgtgggggtttaatgatgtactttgcactgtagatgtgagtgacctttcattccatgattcattagctactttcattgctattctgatagcacgacagtgtttttccctggaggacgtcgtgcagcatgtcgcacttccctctcttctagcagcagcttgtggggatgcggacgccgagcctggggcgagaatgacatgccgactcttgcttcatctcttccgagctccccaggcctgcttcttacctcaagcaacgggcaaacctttccctggaataagatcatcttgtgatagacacctcttagccgctgctcacaacagcattgaagtgggagccgtgtttgctgtcttaaaagcaattatgatgcttggagatgccaaaattggcaataacagtgtcagctctttaaagaatgatgacttcaccatgagaggtttgcgatgtgatgggaatgctgatgatatctggactgcctcacaaaatccaaaatcctgtgggaaaagcatttccatagaaactgccaatttaagagaatacgctagatatgtactgaggactatctgtcaacaggaatgggtaggagagcattgcttaaaagaacctgaaagattatgtacagacaaagaacttatattggaccctgtgctttcaaatatgcaagcacagaaattactgcagcttatctgttatcctcatggcattaaagaatgtaccgagggggacaatctgcaaagacagcacattaagcgtattcttcagaatcttgagcagtggacactgaggcaatcctggttagaactccagctaatgatcaaacagtgcttgaaggaccctggctctggttctgtggccgaaatgaacaacttactggacaatattgcaaaggcaacaatagaggtattccagcagtctgcagacctaaataattcttctaattctggcatgagcctcttcaacccaaacagtattggaagtgctgatacaagtagcacgagacagaatggaataaagacattcctaagttcctccgaacgcaggggtgtatggttggtggcccccctcatcgccaggttgccaacttctgtgcaaggaagagtgctgaaagccgctggggaagagctggagaagggacagcacttgggttcttcttccaaaaaggaaagggacagacagaaacagaaaagtatgtctcttttgagtcaacaacccttcctctcactggtacttacctgccttaagggacaagatgaacaaagggaaggcctcctaacatctctccagaatcaagttaaccagattttaagtaactggagagaagaacgataccaagatgacataaaagcgcggcagatgatgcacgaagcattgcaactccgcctaaatttggtaggaggaatgtttgacacggtgcagaggagcacccagtggactacagactgggccctgctactccttcagatcattacttcaggaactgttgacatgcacactaacaatgaattattcacaacagttcttgacatgctgggtgttttaatcaatggaacgttagcctctgacctatcaaatgcatcccctgggggatctgaagagaacaagcgtgcatacatgaatttagtaaagaaactgaaaaaagagctaggagacaagcgatcagaaagtattgacaaagttcgacagttactacctttgccgaaacagacatgtgatgtcatcacttgtgaacctatgggttccttgattgacacaaaaggaaacaaaattgctggatttgactctatagataaaaaacagggtctccaggtctctacgaagcagaaggtgtccccgtgggacttgtttgagggtcagaagaacccagctcctttgtcctgggcctggtttgggacagtccgagtggaccgaagagtgatcaagtacgaggagcagcatcacctcctgctgtatcacacacaccccatgcccaagccccgcagttactacctccagccactgcccctgcctcctgaggaggaagaggaagagcccacatctccagtttctcaggaaccagaaaggaagtccgctgagctgtcagatcagggaaaaaccacaacagatgaagaaaagaaaacaaaaggaaggaagcgcaagacgaaatctagctcaagagttgatgaatatccacagagcaacatataccgagtgcctcctaattactcgcctatctcctcccaaatgatgcaccatccacagtccaccttgtggggttacaacctcgtgggccagccccagcagcccggctttttccttcagaaccaatctcttactccaggtggctccagattggaccctgcaggctcctttgtcccaaccaacaccaaacaagctctgtcaaacatgctacagcggcgctcaggcgccatgatgcagccgccttctcttcatgcaatcacatcgcagcagcagttgatacagatgaagcttctgcagcagcagcagcaacagcgacttctcaggcaagcccagactcggcctttccaacagggccagccgggggaccaggctgctctctttgctgcgcaagcacggccctcccctcagctccctcagtatccagggctgcagcaagcacagaccatgccacagggctatacaatgtatgggacacagatgcctttgcagcagacatcgcagcagcaggctggcagtgtggtcctgtctcccagctataactccagagcctatccggccgcacattccaaccccgtgctaatggaaagactcagacagattcagcagcagccgagtggctatgttcagcagcaggcctcgccgtacctgcagcccctgactggctctcagagactgaaccatcaggctctacagcagagccctctggtgggcgggggaattgatgctgtgctgacttctgcacatccaaaccttccctccgtgcccctgcctcaggatcccatgagacccagacagccgcaagttcgacagcagcagagactcctccagatgcagcagccccagcagccccagccccagcagcctccccagccccagcagtcctcgcagtcccagagtcagacccttggtctccaagcaatgcagccccagcagcccttgtttcccaggcaaggcttgcagcagacccagcagcagcagcagacggccgccttggtgcggcagctccagaagcagctttccagcaaccagccacagcaaggagtgactccgtatgggcatccttcacacttctgaatctgcaagaggagaagacatgacgttttatgtttgcactgaaaaacagaaaatcaaatttaatgcattagtcatcttaaaaatgtccctttttttcatttctttgacattttactatattttatgctacatctcacaaaaaaaaaaaaaggtgtttaaacaaaaagccaaggagaagttgtggtttgattttgttgaattcacctttaaagtaggtttacaaatgtgaatcatgcaggcaggcctactcccggaagagtgtgctagcagaccttttgaaattggtgctttttttgaatctcacatttctagaaagaatggattatgatggatctaaggtatttatgtatttcattcattaatgatgacgttgtttttttttttttaattttattttccaaactgtgctggaccaaactactgatttgaaaggcatgtcagatcttgacagaaacatggcctgtttattctgcattcacctgtgatggtgaaacggacatttatttgcatcgctctaatttgaaatgtttgtaatctcataagcactttataaactttgttcttatttatgtaggactcttctttgcttttgttgtggtcaaaaggtgctgaaacagattgttgcttcgtacttaaacttcttaaaccaagaacctaaaccaaggtttctttgagagccgccctaagatgtgcggaaacctgttagaagtagctgtactcaaatttgttttgaggcaagatcattgatgagagtcattgtgaaggtacaacatgtaaatcctaaaggcctgaaagaactgcagtggaatcgtccaactatttattgccagttttggttctcctgaaccttatgccaccttaaggggaaaaaaaaatccagtagctggcttgagattccagtgctcacacttgacatggtttccagagaatctggccccaaagtccagaaggctctggttttcataaaaggtgtatttgctgtttattttgtatggtaagtatttgctcttttgaatttaattattactgtcagtgtcagtcttggttgtgtattgcatatactgtatttataaattggtgcaaaaagcacaagtaaattatacatcaaatttattataaagaaatagtaactattttaactttgttcaagtatgtggtaatttgctcctattagagtaaaaaagaaaccagtaaattatcagtttgtgtaacttaagagtattctatataatatttttttagatttagatgcataaaattttgaatgtgaaaattgcagggcattttaaaacatatgtgggggatattttcccatgttctctgttatttcattttcttttgccatatgattttacatataatatagtcaagcatactgtgaatagacttgtctataatgagcagaccatgtaaatctactttttttaaaatgtagctagtacaactttagtagacattttcttttgcaaatcattatctataaataatttatatcttcctgggtgagttactcattgcaaagtttgactcatgcaaatgacctcaaatacatgtcagcttactttgctgtggcaacatccatgtgaactgctttgtacactgtgaaaatatttcactccagcctgcccattttgtgtttactctgggctggaaaagactttgccaaaacattaaaaactattcttttcactaaattaatagtctatctgctttcagaagatgtatcatctatctgtacacatttttgctggttttgtatatcagattttttcctctcaagaaacatacttagataagctaatgaagttgttttcttcaaagtaatatatctatataatgactgcattggcaaatcaaccgaaatgtgaatgttgtgcctagtgagtgagtcatgttccatcattatttctttccaaatttctttgccagttcagtttgaaccatatattttgtagctcagcattgcaaacaacagtaatactgttttaagaatgagtgttataattgcatagcatttgtatgcactttatactttgcagaggtgagttaaattattaatcattttgcacatgaaagctgtggggcatatcttttttctttttttaggtgaggaagttatgctacgactctaattaattccacgattctattgaaagttgaggaatgctgttttacccctgcgcattataaagaaaataactagaattactttagtcttcagattttctccctgttaattctgtatcttgagaggtttcttttttttttttttttttttcttttcttgcaaatgcattcttttgcattaagatggtcacaaggtaaagccctgtggcagaacctggtactttaccttaccagaggaaattaccttagaataagatggagcgagaccccagctccccttaaagacaagaccttgaaatcaaatggagtcagctatacctatcaatcaatcacagttcttggatataagaagcccatagactctcttgtttacactgtaggctttttcttaatagggttgcatttgtcagtcattgcatttacccttcttggcctggaagtagaggagatcaatgcgtagctttgaccacttccagccacagggtactaacatcagacataagttgcaaccaggtcacattttaggctgagatggggctaactgaaagtcagtgtgatgaaaacccaagggcgctattccacatgtctcaaatgattggcaggggctaacttattagtaattctcggttttgtgcactgagatatctaagacctatggcatttttttcccatttataaagctcctataattcttaagtaagtactaggtgaatgtttgaatagatgctggagaaattacactggaaaaccccacccctagatttagataagatcaatcatttaatattccccaaattaattcaggttgaattaagcatgtaatataaattcagtgaattacaaaaacacattttgtgtaggattgatcagattttaaatacagtgaaacttcattatatataatagacctagaccctcccaagcattttcccatcccataaagaattaatgaaatgaaatgcttatagagcaacgattcctgctcagaaaaatttccttataaacagctccaaaccaggggtgcctgagctagattttaaagttataaagaagtttcattgtatttttaaaacctttttaatgggtgtatttggacaaaaataacccccttttcacattttatgatgtgcaggtattacattgctttttacatgtggaaaagtgagcctgcatttatttttaaatgcagttattaaaacatttttgtattccccatcaatgaaaattttcagtgtgaacaaatggtgaatcataagacagttcagtgcttattttctgtaggttttagcaaaaaaatttataaaccacaaaatatttatacatcaggatggtaaatttacatcataaagattgcagatttaatattttccattgtctctgttctgagtgccatgcttgtaacattgataggaggtggacactaggcaactggtattagaagttcatttttttactgaaaaattcaggtacattagccatttgttattttatagtgaaccgtttcaatgtttgtttattgttatttgttggcaaaataaaagtgccttaagttaaaagtttgttttgagatccattaaataaatcagtatcatcagttcataatgcatttatttacaagtccttttattttgcatgttcattgtaaatttaatactgtaaatgtattcaaattcatttacatgcctatggctgcctttgattaaacttcttccaaaaaataaattctgcccagatgttgttgactttattatttcatgtcagattacttgaatatacgttgctgcataatcactaccaagtgggttctttgctgtgcatttgtatatcccagaatcggaggtttggggattctgaatgactagggtaccttgtaagtgaagctgctcacttccatgtgtcctctctttacttgccgttgagagaagggagtggtcaggcatctcccatgtgatttctggcttgggaactcccaaggccacacagtggagctgaaaggctgcccctgtcctggtgacaatactcctgggtggacgatttgtaattcggggagggtaggctacaatcattactggaacagtaatcagtgtatgaccaacactattttgagccttacagatatagtttcctctgtcataagctgt

SEQ ID NO: 152140 - DNA, 749 bp, Homo sapiens
  Payload ID: 9940
  Gene Symbol: MED12L
  Gene Name: mediator complex subunit 12-like
  ENST ID: ENST00000480026
  CDS Start-End: 1-223
tgatgtgaaaatggagattttttctcctatgcctggagaatcctgtgagaatgccaacacttcgttgggcagaagaatgtcagttaattgtgagaagttggtgaagagggaaaagccaagggaattaatttttccatctaattatgacctccttcgccacttacagtatgcaacacattttcctatacctctggtattgatgtctgttcctccttctgtttgagagtcacctctgaggatcataaaaaattgagataagtgatgtaaacttccacatgtgttatatgttttgtttatgttaaaatagcgaatatgccttgtgtagaattagactgcatgttataagtctgacctgttttatcatttacatttgaacttattgaaatgagaagtcatcttcagaagagactttgcacaataacatgtaataaaggtgttggcattaattcttaaatggatttgatgtagttgtatatggtatggtgagtcatggtatctaatatctttgaacaaagaatttacaacaaagaatgatttagagtttaatgtaaattttgtattttatacacaccaatacaaacaagtaattacaaacagatcaatcactttcctctcagtagttatgctgtgcaactttgtaatcatatttaattaatttttttcactaaggtaaaatgttcattaacctaattagcagctattttctagaagctaattaataaaggtaagtgtcaatgatggtattattg

SEQ ID NO: 152141 - DNA, 10465 bp, Homo sapiens
  Payload ID: 9941
  Gene Symbol: MED13
  Gene Name: mediator complex subunit 13
  Uniprot ID: Q9UHV7
  ENST ID: ENST00000397786
  CDS Start-End: 78-6602
gtttctctctctggtcggaggcggcggtaatggcggatggtgggttgtggcgccggcggcggctgctgtgagggacgatgagtgcctccttcgtgccgaacggggccagcctggaagattgtcactgtaacctcttctgcctggctgacttgacaggaattaagtggaaaaaatatgtatggcaaggcccaacttctgcccctattctgtttcctgtgacagaagaagaccccattttgagcagttttagtcgctgccttaaggcagatgtacttggtgtttggcggcgagatcaaagacctggaagaagagaattgtggatattttggtggggtgaagaccccagttttgctgaccttattcaccatgacttatcagaagaagaagatggagtgtgggagaatggactttcctatgaatgccgtactctgcttttcaaagcagttcacaatctattggaacggtgtttaatgaacaggaattttgtacgtattggcaagtggtttgtaaagccttatgaaaaagatgaaaaacctataaataaaagtgaacacttgtcctgctccttcacctttttcttgcatggagacagcaatgtttgtaccagtgtggaaattaaccaacatcaacctgtataccttctcagtgaagagcatatcacccttgctcaacagtctaatagcccatttcaagttatcttatgcccatttggactaaatggcactctcacaggacaggcattcaagatgtctgattcagctacaaaaaaattaattggtgaatggaaacagttctatcctatctcatgttgcttgaaggagatgtctgaagaaaaacaggaagatatggattgggaagatgattctttagctgcagtagaagttcttgttgctggtgtccgaatgatctacccagcatgctttgttctagtccctcagtcagacattcctactcctagccctgtgggatccactcactgttcatcttcttgcttgggtgtccaccaagtgcctgcttccacaagagatcctgctatgtcttcggttacgcttacaccacctacgtctcctgaggaagtccaaacagttgatcctcagtctgtccagaagtgggtcaaattttcttcagtatctgatggcttcaactccgatagtactagccaccatggtgggaaaatacccagaaaattagcaaatcatgtggtggatagagtttggcaagaatgcaatatgaacagagcacagaacaagaggaagtattctgcttcatcaggtggtctatgcgaagaagcgacagctgctaaagtggcatcctgggattttgttgaagccacacaaagaacaaattgcagttgtttgaggcacaaaaatctcaagtcaagaaatgctggacaacaaggacaggcaccatctttaggtcagcaacaacaaatacttcctaagcacaagaccaatgagaagcaagaaaagagtgaaaagccacagaaacgccccttgactccttttcaccatcgtgtgtctgttagtgatgatgttggcatggacgcagattcagccagccaaagacttgtgatctctgctccagacagtcaagtgagattttcaaatatccgaactaatgatgtagcaaagactcctcagatgcatggcaccgaaatggcaaattcacctcaaccacccccacttagtcctcacccttgtgatgtggttgatgaaggagtgactaaaacaccttcaactcctcagagtcaacatttttatcaaatgccaacaccagatcccttggttccttctaaaccaatggaagataggatagacagtttgtcccagtctttcccacctcaatatcaggaagctgtagaacctacagtatatgttggtacagcagtaaacttggaagaagatgaagccaatatagcctggaagtattacaagttcccaaagaaaaaagatgtagagtttttaccacctcaacttccaagtgataaattcaaggatgatccagttggaccttttggacaggaaagtgtaacatcagttacagagttaatggtgcaatgtaagaaacctttaaaagtttctgatgaattagtgcagcaatatcaaattaaaaaccagtgtctttcagcaatagcatctgatgcagaacaagaacctaaaattgatccatatgcatttgttgaaggagatgaggaattcctttttcctgataaaaaagatagacaaaatagtgagagagaagctggaaaaaaacacaaggtagaagatgggacatctagtgtaacagtgttatcacatgaagaagatgctatgtcattatttagtccctctatcaagcaagatgctccacgccctactagtcatgcccgtcctccatcaacaagtttgatttatgactcagacctggctgtctcttatactgaccttgataatctcttcaattctgatgaagatgaactaacacctggatctaaaaaatcagcaaatggatcagatgataaagccagctgcaaggaatcaaagacaggaaatctggacccgttatcttgcataagcactgcagatcttcataaaatgtatcctacaccaccatcattggaacaacatattatgggattttccccaatgaatatgaataataaagaatatggtagtatggatacaacacctggaggaactgttctagaaggaaatagttctagtataggagcgcagttcaaaattgaggttgatgagggattctgtagccccaaaccttctgaaattaaagatttttcttatgtctataagcctgaaaattgtcaaattctagtgggatgttccatgtttgcacctctaaaaactctaccaagccaatatctgccccctatcaaattgccagaagagtgtatttaccgtcagagttggactgttggaaaattggaattgctttcttcagggccttcaatgccattcatcaaagagggtgatggaagtaatatggatcaagaatatggcactgcttatacacctcaaactcatacttcttttgggatgcctcctagcagtgcacctcctagtaacagcggagcaggaattcttccttctccatccacccctcggtttccaactccaaggactccaaggactcctcggactcctcgtggagctggtggacctgctagtgctcaaggttcagtcaaatatgaaaattcagacttgtattcaccagcttctaccccatctacatgcagaccccttaattctgttgaacctgcaactgtcccttccatccctgaagcacacagtctttatgtaaacctcatcctttcagaatcagttatgaatttgtttaaagactgtaactttgatagttgttgcatctgtgtttgcaacatgaacatcaagggtgccgatgttggagtttacattccagatccaacgcaggaagcacaatataggtgtacctgtggcttcagtgctgtcatgaacagaaaatttggaaacaattcaggattatttcttgaagatgaactagatatcataggacgcaatacagactgtggcaaagaagcagaaaaacgttttgaagctctcagggctacctctgctgaacatgttaatggaggactaaaggaatctgaaaaattatctgatgatttgatattattgctacaagatcagtgcactaatttattttcaccctttggagcagcagaccaagatccttttcctaaaagtggtgtaattagcaattgggtacgtgttgaagagcgtgactgttgcaatgactgctaccttgcattagaacatgggcgtcagttcatggataacatgtcaggaggaaaagttgatgaagcacttgtgaaaagttcatgcttacacccctggtccaaaagaaacgatgtgagtatgcagtgctcacaggatatacttcgaatgctcctctctcttcagccagttcttcaggatgccattcagaaaaaaagaacagtaagaccttggggtgttcagggtcctctcacttggcaacaatttcataaaatggctggccgaggctcttatggaactgatgaatccccagaaccactgccaatccccacatttttgttgggttatgattatgattatctggtgctttctccatttgctcttccttattgggagagacttatgctggaaccctatggatctcaaagagatatagcctatgttgtactgtgtccagaaaatgaagccttgttaaatggagcaaaaagcttttttagagatcttactgcaatatatgagtcctgtcgattaggtcaacatagacctgtttctcgactgttaacagatgggatcatgagagttggatctactgcatcaaagaaactatcagaaaagttggtagcagaatggttttctcaggcagctgacggtaacaatgaagcattttctaaactcaagctttatgcacaagtctgcagatatgacctaggtccttatcttgcttccctgccattggacagctctctactttcccagccaaatttagttgcccctacaagtcagtctttgattactccacctcagatgacaaatactggaaatgctaatactccatctgccaccttagcatctgcagcgagcagcactatgacagtgacttcaggtgttgccatatctacttcagttgccacagctaattcaactttgaccacagcttcaacttcatcttcatcatcctccaacttgaatagtggagtatcatcaaataaactaccttcgtttccaccctttggcagtatgaacagtaatgctgcaggatccatgtctacacaagcaaatacagttcagagtggtcagctaggagggcaacagacatcagctctacagacagctgggatttctggagaatcatcttcacttcccactcagccgcatcctgatgtgtctgaaagcacgatggatcgggataaagtgggaatccccacagatggtgattcacatgcagtcacgtatccacctgcaattgttgtttatataattgatccttttacatacgaaaatacagacgagagcactaactcttctagtgtgtggacattggggctacttcgatgctttctagaaatggtccagactcttcctcctcatatcaagagtactgtttctgtacagattattccttgtcagtacctgttgcaacctgtgaagcatgaagatagagaaatctatccccagcatttaaaatccctggctttttcggcctttacccagtgtcggaggccacttccaacatcaaccaatgtgaaaacattgactggctttggtccaggtttagccatggaaactgcccttagaagtcctgatagaccagagtgtattcgactttatgcacctccttttattctggctccagtgaaggacaaacagacagagctaggagaaacatttggagaagctggacagaaatataatgttctttttgtgggatactgtttatcacatgatcaaaggtggattcttgcatcttgcacagatctatatggagaacttttagaaacttgtatcattaacatcgatgttccaaatagggctcgtcggaaaaaaagttctgctagaaaatttggtctacagaaactttgggagtggtgcttaggacttgtacaaatgagttcattgccatggagagttgtaattggtcgtctaggaaggattggtcatggagaattgaaagattggagctgtttgctgagtcgtcgaaacttgcagtctctaagtaaaaggctcaaagacatgtgtagaatgtgtggtatatctgctgcagactcccctagcattctcagtgcttgcttggtggcaatggagccgcaaggctcttttgttattatgccagattctgtgtcaactggttctgtatttggaagaagcacgactctaaatatgcagacatctcagctaaataccccacaggatacatcatgtactcatatacttgtgtttcctacttctgcttctgtgcaagtagcttcagctacttataccactgaaaatttggatttagctttcaatcccaacaatgatggagcagatggaatgggtatctttgatttgttagacacaggagatgatcttgaccctgatatcattaatatccttcctgcttctccaactggttctcctgtacattctccaggatctcattacccccatggaggtgatgcgggcaagggtcagagtactgatcggctactatcaacagaacctcatgaggaagtacctaatattcttcagcaaccattggcccttggttactttgtatcaactgccaaagcaggtccattacctgactggttctggtcagcatgtcctcaagcacaatatcagtgtcccctttttcttaaggcctctttgcacctccacgtgccttcagtgcaatctgacgagctgcttcacagtaaacactcccacccacttgactcaaatcagacttcagatgtcctcaggtttgttttggaacagtacaatgcactctcctggctaacctgtgaccctgcaacccaggacagacgctcatgtctcccaattcattttgtggtgctgaatcagttatataactttattatgaatatgctgtgatcttcatttgatggaactgtgcaagaaaagaacaaggaaaaatggatgtttcgctgcaggattaagttacaattatcttctcagtgaaggtcatttgtgatggggtctaattcttattacttcaacaaatattgttttgacttggggggaggggctataaccctgctatttttcattgactctattgaactctttaggatgatgactgatcatacaaaacgtattataacattttcgtagcaaaattaaccttttttttttccagtcacagtatttgtgaaaagtaatgagccatagtacccagtcatgttaaatgaatattaaaagcatggagaggaaacatgaggaacaatgaatttcaacatatggcttcagaacatgaagatgttcttgtatggattatagtatctagtattcaaaaatgcctgcatctcttctcttatttattgtaagtttttaaatgtataaattgtcttatatttcttaacctcttttataaaaattttcctagaaggtttatactgccttcttgctttaaagcaattggtctaaaatatatgtaatcgtcttaattaaaaagttgcagtagggttgcttttagagtattatttttttgtaagggggtgggtgggacagtaaatttgtattgtctcgatgtacagtttaacggggatagagggggaataatgtccataccattgtgtgtggaggatttacagctaagctgtagttgcagagtacatgtacagtaatgaagttcactgtgtttataaattgaaaaggtaccaggtcttacagcattttatatatcacatctttacagaataacatgatggcaatatacaagtggtattgttaggtggtttaacttagaataaaatgagaattcttcagttatattttgtactatggtttagggctatgactaatatttcaggccatttccggtgaaagaaacttagttttacaagaaaaaccatttgctactgaatgcttaaactaattttagtgtttaatgttacatgcttaaatttttttcagttttaacagtggcatatttaggcatggaaatattattatgaaatttattttcaggatctgctataaggttgaaatttagcccagctctaggcattttacaaattatttttcaagcagtcattcttgattgtttgacttttttttttaaattaaagattgggaatgtatgtgagagtatgcatatgtatgggtgtgtgtgtgtgcgcgcaatcaaactgtggtgtaaatagattctcagtgaattctggtattcagactctattccactagtgaaagaaccattttttaaacttcccttgccttttttatttatttaattttcttggtttggagatgtcagtcccaaacaccagagtctgtacttttctataacacagctcagattaaggtagggcatatgccaaggaggttctcacctccctaaagaagggacttgaattttagggactttaattcacccctccttcaatacaactttcccccttcttgtttgcacatgccaagataactgcttttatgcaggctgtacccccttgaaaaatcctttctacagtgctgctcacaaaagagcccaagttcgcctcctacctgcattgctgacttgaattcacagtcgccgagtctacctagctttcttggaagcagtctagcaaaatttctatttgtacgttcactaattatctacaaggacaaaatcagttgtatttacaaaactctacttcagtgtttgttttagtttttttttttactgaaacttgtttttgtgaatactctgtgcttagaattaaatatcactttcttatgaacaacataacttcttcagattgtgtatatgaaaacattagcaagtcttgttttttctatgaagcaaacacaattggtgacaaaggttgtcaatcatttcttcaaaattataatgcagttctaatggtcagcatattttgatattaaatttaaagatcacctctctgcatttgtttttaaattatgctaatacaccacacattatgttggtatgttttgttctgtactttctttaaaaaaaaaaaaaaaacttgtctgagatttgaaggaaaatgtgcttatttggaatttccataaaaagagtatcctttttatacacttaatagtgactttacaaaataaaagttatattctcagttgtttaaaatcactaacctatgataaccacacctcaatttgaaagtagatttaaaattattccctgacaggttatttaatatggagccataaggagggaacccagtacacaattattttttatttgggaatcagggaatagttcccaaatatacaggatttattgataagattttttttcttcccttcatatatccattcaaactcaatggaaagttattaaataaccattagaaaagctcagtagacttatttgagaaattaagccttgtgcaggatgatggatttgacttactaatgtactgtcacagacaaatatgggtagttttgtttaaataggtaagcaaaatattatactttatagcagtggattaccaacaccttgacttctttgttacagtgctaacatctttttttttgtgcaggtatccatgattattaagcagggtggaagttcagtattttgtcatttaaaaagattagttatataatgtctgcttccagccagtgagaaacatctagccatacctttcttatgcaagccattgagttatcaggactgtgaattaacactgtatgaataaatttctgtacaccttattgtttggccagaaggccaccaagtgtacttatatgtaatccttaaattttaaagtagctgtaatttttaaatatttctaaacttttcttaaaccactaaaattaagctcttactacttagtcaactatcctcagctgtattcgtactcaattgtcagtatggcacagattactgtattaaaatattctcctttcgtcttcatatttaccttctgaggtaattttttaacttaatgtgttactacaaagatttgcagatctttaatcaagcactatgttaatactgtaatatcagaatactatgttgcattatttaaaatgttcaaattgaatagattaaaaagtttttaaatgctattgcatcatataatttgctattcatccactatggcattgcatatcaatcagttaatacacttaatgttgcatgagtgatattttggtctgggtttcctcttaagattttagtttgtctgaattaaggaaaaatgtttttaatatacattcttattttgtcccacccctccagaaataagctggaaatcttaactttttggggggtcttttttggtgttttaatgggcccagaactgtggtttaaatttttatgtatgtattttcttttttgtggagtataaatttaaaaactggatttgggacctaaaatactcctcaggttgatgtattcatgaagttttaaaacatctttagttttcaaagtaaactggatatgtggaccttaaagttattgagtttaagctacaaattgtaacgtcattactggacatgtcagcatcaaccctctcaaaatagcttggtcactttatgaaggggcgttttaaagttgttgtttagcagtgacatttaatatggtccaattgcttttctttttaacgtgacaaaaagagaataaggaacaaacactattgctgccgaatgccataacactgagttgtacaaattgtgattgaggaaatgaaaaggtttatactttttaaaaaaaaaaaaacaaaaacaaaaaacaaaacttcaaatggaataaattattcatgaagccttca

SEQ ID NO: 152142 - DNA, 1068 bp, Homo sapiens
  Payload ID: 9941
  Gene Symbol: MED13
  Gene Name: mediator complex subunit 13
  ENST ID: ENST00000583958
  CDS Start-End: 1-982
tgtccagaagtgggtcaaattttcttcagtatctgatggcttcaactccgatagtactagccaccatggtgggaaaatacccagaaaattagcaaatcatgtggtggatagagtttggcaagaatgcaatatgaacagagcacagaacaagaggaagtattctgcttcatcaggtggtctatgcgaagaagcgacagctgctaaagtggcatcctgggattttgttgaagccacacaaagaacaaattgcagttgtttgaggcacaaaaatctcaagtcaagaaatgctggacaacaaggacaggcaccatctttaggtcagcaacaacaaatacttcctaagcacaagaccaatgagaagcaagaaaagagtgaaaagccacagaaacgccccttgactccttttcaccatcgtgtgtctgttagtgatgatgttggcatggacgcagattcagccagccaaagacttgtgatctctgctccagacagtcaagtgagattttcaaatatccgaactaatgatgtagcaaagactcctcagatgcatggcaccgaaatggcaaattcacctcaaccacccccacttagtcctcacccttgtgatgtggttgatgaaggagtgactaaaacaccttcaactcctcagagtcaacatttttatcaaatgccaacaccagatcccttggttccttctaaaccaatggaagataggatagacagtttgtcccagtctttcccacctcaatatcaggaagctgtagaacctacagtatatgttggtacagcagtaaacttggaagaagatgaagccaatatagcctggaagtattacaagttcccaaagaaaaaagatgtagagtttttaccacctcaacttccaagtgataaattcaaggatgatccagttggaccttttggacaggaaagtgtaacatcagttacagagtatgtattttttttaatagtcaccattataatttaagggtggaagtgatgcaagttcttaatactaggactcagtattggattcaaggtaggatttacaagaataaattcattgagtattaa

SEQ ID NO: 152143 - DNA, 14234 bp, Homo sapiens
  Payload ID: 9942
  Gene Symbol: MED13L
  Gene Name: mediator complex subunit 13-like
  Uniprot ID: Q71F56
  ENST ID: ENST00000281928
  CDS Start-End: 208-6840
cccccccgccagcccgggcccgctgcccccggcgcggcgtcgccgcggcgcctcccgcctgcccgccggccctcgcgccctcccccggcggcggcggcggcccggccgccccgcgctccccggcgaggcgccgccgcccggcccggcctcgcctcggacgcctcgctccgacatgccccgctctggcggccgggctcgcggaggatcatgactgcggcagcgaactgggtggcgaacggggcgagcctggaggattgtcactccaacctcttttcgctggctgaactcacgggaatcaaatggcgtaggtacaattttggagggcatggggactgtggacccataatttcagccccagcccaagatgatccaattctgttaagtttcatccgctgtctgcaagctaacctgctttgtgtatggcgtcgtgatgtcaaaccagattgcaaagagttatggatattctggtggggagatgaacccaacctagtgggtgtaatacatcatgaactgcaggttgtggaagaaggactctgggaaaatggcctttcctatgaatgtaggacgctgctcttcaaagcgatccacaatctgttagaaaggtgcctaatggataagaacttcgttaggattgggaaatggtttgtccgaccctacgaaaaggatgaaaagccagtcaacaaaagtgagcatttgtcctgtgctttcacattctttctgcatggagaaagtaatgtatgcacaagtgtggagattgcccagcaccagccaatttatttgatcaatgaggagcatatacacatggctcagtcttcacctgcaccatttcaagtactggtaagtccttatggcttaaatgggacgctaacaggccaagcatacaagatgtcagacccagccactcgtaagttgattgaggaatggcagtatttctacccgatggtgctaaaaaagaaagaagaatcgaaagaggaagacgagttgggatatgatgatgatttccctgtggcagttgaagtaattgttggtggtgttcggatggtttacccttcagcatttgttttgatctctcagaatgacatcccggttcctcagagtgttgccagtgctggaggccacattgcagttgggcagcaagggcttggtagtgtgaaggacccaagtaactgtgggatgcctctgacccctcccacctctccagaacaggctatcctaggtgagagtggaggtatgcagagtgctgccagtcacctggtttcccaagatggagggatgataacgatgcacagtccaaagagatcggggaagattcctccaaaactccacaatcatatggtccatcgagtctggaaggaatgcatcctcaacagaacccagtccaagaggagccaaatgtcaactccaactcttgaagaagagcctgctagcaatcctgctacttgggattttgtggatccaacccaaagagtcagctgttcttgttccaggcataagcttttaaaacgttgtgcagtcgggcccaatcgacctcccacagtatctcaaccagggttcagtgcaggaccatcatcatcttcatctttaccacctcctgcttcttctaagcacaaaacagcagaaagacaggaaaaaggagacaagctgcaaaagagacccttaataccatttcaccataggccctctgtggccgaagaattatgcatggagcaagatacaccaggacagaaactagggttggcagggatagactcctccttagaggtgtctagcagtaggaaatatgataagcaaatggccgtgccttccagaaatacaagcaagcaaatgaatctgaatcctatggattcacctcattcccctatatcccctctgccaccaacactcagccctcagccacgaggtcaggaaacagagagtttggacccaccatcggtccctgtgaatccagccctttatggaaatggactagaactccagcagttgtctactctggatgacagaactgtcctcgtaggccaaagactgcctctcatggcagaggtcagcgagacagccttatattgtgggattaggccctcgaacccggagtcatcagaaaagtggtggcatagttatcgtctcccacccagtgatgatgctgagttcaggcctccagagctccagggtgagagatgtgatgccaaaatggaggtaaactcagagagcactgcattgcaaagactcttagcacaacctaacaaacggtttaaaatctggcaagacaaacagccccagttgcagccactccacttccttgacccattgcctctatcacaacaacctggagacagtttgggagaagtgaatgacccatatacctttgaagatggtgacataaaatacatctttacagccaacaagaaatgcaaacaagggacggagaaagattccctgaaaaagaataagtcagaggatggatttggtaccaaggatgtcactacaccaggtcattccacgccggtgcctgatgggaaaaatgccatgtctattttcagttctgctactaaaacagatgtccggcaggataatgctgctggcagagctggctccagtagccttacacaggtaacagatttggcaccttccctgcatgacttagacaacatctttgataattctgatgacgacgaacttggggctgtatcacctgctctgcgctcatcaaaaatgcctgcagttgggacagaagaccgacctcttgggaaggatggaagagctgctgttccttatccaccaacagttgcagacttgcaaaggatgtttcccactccaccatctttggaacagcatcctgcattttctcctgtgatgaattataaagatgggatcagctcagagacagtgacagcattaggcatgatggagagccctatggtcagtatggtttcaacacaactcacagaattcaaaatggaagtggaagatggattaggaagtcccaagcccgaggaaattaaggacttttcatatgtgcacaaagttccatcctttcaaccttttgtgggatcctccatgtttgctccactgaagatgttgccgagccattgtttgctacctctgaagatacctgatgcctgtctgtttcggccttcatgggcaattcctcctaaaattgaacaactgcccatgccccctgcagccactttcattagagatggctacaataacgtgcctagtgttgggagcctagcagatccagactatctgaacacaccacagatgaacacacccgtgacgttgaacagcgctgccccagccagcaatagtggggcaggagtcctaccatctccagcaacccctcgcttctctgtccccacaccacgaacccccaggaccccaagaactcccagaggtgggggcactgccagtggtcaagggtctgttaagtatgatagcaccgatcaaggatcaccagcctccaccccctctactacacggcccctcaactctgtggagcccgccaccatgcagccaattcccgaagcccacagcctctatgttaccctgattctctccgattccgtgatgaatatctttaaagacagaaactttgacagctgttgcatctgtgcctgcaacatgaacatcaaaggggcggatgtcgggctttacatccccgattcttccaatgaggaccagtaccgctgtacctgtgggtttagtgcgattatgaaccgcaaacttggctacaattcaggactcttccttgaagatgagttggatatttttgggaagaattctgatattggtcaggctgcagagaggcgcttaatgatgtgtcagtccaccttccttcctcaggtggaaggaaccaaaaaaccccaggagccacccataagccttctcctcctcctccagaatcaacacacacaaccttttgcttcactgaatttcctggactacatttcctctaacaatcgccaaactcttccctgtgtaagctggagttatgaccgggtgcaagcagataataatgattactggacggaatgctttaatgcgttggagcaggggcggcagtatgtggataaccccactggtggaaaagtggacgaagctctggtgagaagtgccactgtgcactcttggcctcacagcaatgtgctggacatcagcatgctctcctcccaggatgtggttcgtatgctgttgtccctgcagccctttctccaagatgccatccaaaagaagcgcacgggcaggacctgggagaacatccagcatgtgcagggaccactcacttggcagcagttccataaaatggcaggacggggaacctacggttcggaagaatctcctgagccgttgcccatccccactctgctggtaggctatgacaaggatttcctcaccatctcgccattctccttgccgttttgggagaggctcttgttggacccatatgggggccaccgtgatgttgcctatattgtggtgtgtccagaaaatgaggccttgctcgaaggagccaaaactttcttcagggacttgagtgctgtatacgagatgtgtaggcttgggcagcacaagcccatctgcaaagtgctacgtgacgggatcatgcgcgtgggaaaaactgtggcacagaagctgacagatgagcttgtgagtgagtggtttaaccagccttggagcggcgaggagaatgacaatcattccagactcaaactttatgcgcaagtttgccgccatcacctagcaccttatttagccactctgcagcttgatagcagcctattgataccacctaaataccagaccccaccagcagcagcacagggacaagctacgccagggaatgctgggcccttagctccaaatggatcagcagctcccccagctggcagtgcatttaatcccacctcgaatagtagttctacaaatcctgcagcaagtagttctgcatctggttcctctgtgccaccggtctcatcgtctgcctctgctcctggtattagccagataagcactacctcttcttcaggattcagtggtagtgttggagggcagaaccccagcactgggggcatttctgcggatagaacgcaagggaacataggctgtggtggagacactgaccctgggcagagctcttctcagccctcacaggatggacaagagagtgttacagaaagggagagaataggaattcccacggagcctgactctgcagacagccatgcccaccctccagctgttgtcatttacatggtggacccgttcacgtatgctgcagaggaggactccacttctgggaacttttggctgttgagcttgatgcgctgctacacagaaatgctggataatttacctgagcatatgagaaattctttcattctccagattgtgccttgccagtacatgctgcagacaatgaaggatgagcaagttttctacattcaatacttgaagtccatggcattttcagtgtactgccagtgcaggcgaccactgcctacacagatccacattaaatccctcacgggatttgggcctgcagccagcattgagatgaccctcaagaaccctgagcggcccagcccaatccagctttactcccctccctttatattggccccaatcaaagacaagcagacagagctgggagagacgtttggtgaggcgagccagaaatacaatgtgctcttcgtgggctattgtctgtctcacgaccagcgctggcttttggcttcctgcactgacctccatggggaattattagagacctgcgttgtaaatattgctttaccaaacaggtcacggaggagtaaagtatctgcacgtaaaattggactacagaagttatgggagtggtgcatagggattgtccaaatgacatctctaccctggagagttgtaatcgggcgacttgggcgtcttggccatggggagcttaaagattggagtatcctccttggagaatgttcactacagacaatcagcaaaaagctcaaggatgtgtgccggatgtgtggaatctctgccgcagactctccttctatccttagtgcctgcctggttgccatggagccccaggggtcctttgtagtgatgccagatgctgtcacaatgggctctgtttttggccgaagtactgcactgaacatgcagtcatctcagctcaacacccctcaagatgcttcttgtacacacatcttggtgttcccaacatcatcaaccatccaggtggctccagccaactaccccaatgaagatgggtttagccccaacaatgatgatatgtttgttgaccttccattcccagatgatatggacaatgatattggcatattaatgactgggaacctccattcctctcccaactcttccccagtaccctccccaggctctccttctggaattggtgtgggctctcacttccagcatagtcggagccagggtgagcgtcttctttctagagaagcaccagaggagctaaagcagcagcccctggcccttgggtattttgtatcaactgccaaagctgagaatcttccccagtggttttggtcatcgtgtccccaggctcaaaaccagtgccctctcttcttaaaggcttcgctgcatcaccacatttcagtagcacagacagacgaacttctgcctgccaggaattctcagcgggttccacaccctcttgactccaaaaccacgtcggatgttttaaggtttgttttggagcagtacaacgctctgtcctggctcacgtgcaatccggccacccaggaccgtacttcctgccttcccgtccactttgtggtgctcactcagttgtacaatgccatcatgaatatactttaattggaaaagcacttgttctctctggctcagttccttctccctgcaacctcagtccaaggaacctgctacactctgcaaataacccacatccttttcttcagaccactctccacagtcctgcactgtgattccttctcagcaggcacatgtcaattctgcagtgttcattaccagagtgactccttgacacttctctcatggacctggaaacttccataagtggtgactttcagccagtgcggtggtgtgtgtagccccaaccactggtccccaggaagtggtggtggttgatggcttttcagcgggaaacagaagagacagtgtccttttgcacaagagtctgtgttttcagcctctgtatacaattgagggcagtctagccctttggatgaaatcctcttagttactggtgtatggcctgtgggttacctgaactccataatctgggactttttaaaaataagaaccagctcaagtacatggtttcatactggggtttctgtctccctagtgttcccatccagattagcatgagtgctttggttgacttcaaacctgtgtgtcaatgcagaaggtctggagacagcttcattttgtttatttattttaatttgttttgtcatatggtttttgtgactttatttttttaattcacaaggaccaggtacagtagctgaaacccaattcagatccaccataggattctttgactacatacctctgtcctagaagccggaaaaggagtaaaaacacattggggagatcatgcctaaaagtaatatattcaaaaccacccagcagtaggttttgttaacaacaaactggattttaaaagttctgccatgttaagtggccagcatttcatgaaggataacatttttatacagaaggcagtcaagctcaactcagagccatggaggcaagtaccttaattagttttatatagtcacaacggaaatatattttctagtgaattcttattggaagccaggtctctcctctcattagatcaaaagggacttatgtacatacaacaattgaaagtgtttgctcatgaaatcagttataaatatggtgaattttttctggaccataggaatattatttcaaagaaatattacaacttaaccattaaattagtacttgaagttgagcctttgtggtgggactttttaaaaaaatgcctttttaaagcattaatggctaattgaagtattttatgactcctcattcctggcccagagggttgtctttgaaaccctgtttctaacccttgtgttgtgtgtttctgtctgaggacagtgggtgtgtactggcctcccgggagccactgtgaccaggcctttgagctcttgtcatctgtggagagaatcatgcaaattttaaaagttcttccaagagacttccatgtcctggttattaacaaaaaaggaaaaatgtaataattgatatgattttgtaaaagtatttttcttgaaataatctaaagtttaaaacattatattaaaaaaaaagttgtgtggtgggaatgtgaaagcagagaaataacttgtaaatggataattttgttctctgtaccaccagttgaagggggggttgactttcgcaatgtataggataaaaaatctgatatatcaaaccatttgtatctaatgtgtacagtgtaaaattgactttaaaaatattgcagtgctattttttcttaatcagaaaggaaaattctcaaggccttttgaagagcataagaagatgaagattgtaaacttgtataaaattatcttggtgagaagacaaattgtaaagtagatatttgtaatcttttaccactttggggttgcttttttcccggaattcatcagaactttgaattttttttttaaatgggctgtttttaatgcaggggcttttcttccctagaaacccaattctaagcagaaaaagaaaaaaaacacaaaaaataaaaaacccctacaaaaaaactttaaaaaaaatggcagcaaagggtagttttcatctggtgtcttttatttaagttttttaagttaagaaaagctggtgacatatttatacgtttttgtgcaaaaataaatgaatggcaatagattttaaaaaatcttattatgtacttctgtgtgaaaaagtctgtataatatttcccttaaatatgcattattttacttgtgagttttttactgaattaatctgaaatgtacaagccctggatttgctacagagtgagaagttattttatttttttttatttttaattttggaaattctgcagaaatcagaactcttaccatggtttgaacaaaaaaaggggaaatggggaggggaaaagggtgggattgtccagcatgcttgtatgtatatttcagaaccttttttaaatgtaaaagctgtacatttctgggaagttctgaatttcttttgtttccttttttccttcaagcattttgcagtgagcttcttttatatatagcaaacaatttgaaagaatacaaaaatatgtgaagttcatttaaaaaaataactacagtatagcgctggtacagtacactaaaagactttgataaaaagaaacaataataaaaggcctccattttaaatgtcattcatatataccttgtggatgagagctatatacttttacacacttttttagaggaataaattattgaattactgaagctttgagtggcttttttcccttcctctcctgcctttgtataaaattatctacacctgtttgagaggtgcatgtatatgtattgaatagccctagattagtagccaggcctctaccttccagtcagtgcaatggatgtagaattttaccaccctgatcacccccctaacagctgttctgaaatggtattctcatgctccagggcacaagtacactcccccatcagtttttacatgctaacacacacaacaccgaatcaactgctgtgagtcgatgagctctaatggtgtctctcagctgtaagattgtggtcaattctagcacaaatgacaagtctgtatcttatattccaccgcctttctctacacagtctcagccagtttctttatgatgtctcttagaaatgacagatacatctctctctgctgttttcctgattcacaggctggtgacgggagtttggcatctgatacaccacacgcaagtccctgttggctgcacaccatctaccatgctgttcccttcttgggtccatcagctaggaaaagccacatgttctagcaggagttgcgagggtatatttcgtatactgcccttgcaaaatctctcattaaaaatggttaaaccccaggacttggcagagcttacaataaacatttgaataattggaaaggccttgcttttaatctgccttcatcattttagaaatatacgttgttctgaacctaacattatcagaatccagagataaagctattgagacaactcaaccttctgttacttcatctgcaaatgagggatgaggatgattgcatgagaaatgctttgcaaactaaaaggcttgtatccatgttacagctgcactgttgaagaaagactgagaaaagtgaggccaactttttggttaaaaaataatagtgatctcatccagttactgccttacatatataacttttatatagtcctgcagcagctaaataatcagaactaggaggtacttttacaagcattcagtagcttcaatgcttagctcatacgttgggtggtactatattcaacaattagtgttggctttatagtaggaatgtcattttcataagtgcccccacctgtaccaattcagcaaccgcagctaaatctctttgaggtaggataaatgaatgcatttaaatgtcttccaagttagatgtagataagccatcagccttcagcagtttgcatcacccagattctgctcttcacaccagttcattccctccaaccatgtgattatgtagtttttggttttactgttcaggaagtcatgagcaaaggtatttgttaccaactgggcatcaaagaaccactaaaaatctttataaaagtacagttcgtcaatgagtttttaaaagcaaacctcgtaagacatactgcagaagcataagccacatattgaaaacagtctttgccgcttgtcatttacagtcaagccagtataaaaaggaaatcgtgctttggaattcaccgcacgcccaaatcctatcaagatgcaattttcacttattaccgtgttattttggtgttaaacgattctcttgtttatattcccttgacaaaaaggtcactttagcagtaattatttcatgtcattaatacctaatgagacaccactagaaaattctgttgtgccaggtaattatagagggttgtaatgtttgccctgggcatcctgctctgcctggaaccagatttaccagtcttcctccactttgcttacaattccagggtcacgtttaaaaaagattttttgacacttaactgcttctagctagaacgctaaatcatgaagcagttaagaaatagaagttgatgagaaagtttaatctccaggaagaaggttggacataaccaaagtattgatttttctctgtaaaggctatttcctcaatgaattcaagttcccaggtgatgggaagacccgaagacagacattcctgttagtcccactttttctttgttttctttcaaacaagcagggaagtgaggaaagcacaggttcagttttaataatctgctaacatggcacttgtctgggctgttacccatatgggtcaaaccatgtctgtcctggagtgtgcttgaaattcacccagtgatcacagcatgcagacacgttgaaattggcagcatctctgagcatttctctggctcctgctgcctagtgtatacctcttttgccttgctgttgggtgaggcatgtttcaatctacttgttttataagactagacaatattcagtaaaatgggccaccccagagcttagaacagaagctctgggaaaaaaaatatctaatacgaggaagtattcgttgtgggggaatgtcaatttaaataatttaacatgtaaaatagtaattgtcttaatttaggctataacgtttttcagtaagcattttcacgttagcttctcataaatcttagtttgttcacttagaggtcttgatgttcttattaatttcgatacattatttacatatataatttcctgtctgcttcctttgaagtatgtgattttttttttaattgtagaggagacacagtttctgtaattatacatacaccagtgttttttgttgttgctatttcttgtattactgcaaagcttaggaggttttctctcttaggtctaggggtcaagatcacgtttgcttgataagatgaaccaatgaacttccccgtcattttccgtgagcccaaagagtttatctttcatgacaccaactttctattgggctgagactgaataaaggactgaagtaggcactcacgaaatgtttgtcaaatactgatactgttgaaagagtagaattagttgcacctcaaaaatctgaaataatttaccagtaaattcatcagatcctgatgccttttggggaagcggtttacaaaacaggaatttttttttttttcgtttttggttgatttggggtttccatttcttttgttgattttgttaatttagatttttacaggaaaaaaatgagtttttcaaatgtattacttaatgcaatggtgcagaatacccccttaattttgaaactttttggtgatgtatgctcttttccatttctagcaatattaatgcttttattccacctcgattgatttttctagcagtttgattttttttttttagtttttgtttgatttttccaaagaaacagctcatggacttaacaattctgctgtttgtaccttggctttgtcttcttattctttttcctagtttccttgagagttatgtttcattttgcttgaattttaattgcctgcttagttaatttattttcacttttgatgatataggcattatagcctgggggcttctggatgtgttggccctcctcaaattatatgcagaattcttcatgtgcatttttttttagggagacagtctttgtatcagattctcagagatgtcaaaccctaaaagggataaaattgcttttatcgtttgagatgtcaaacgctaaaagggatgaaatctggcactagatttaagttgattacatcctacaagtcttgatgcttaatgttttcatttttatttttatactcttggttctttatttcttttttgatccgtttttgttaaggaaaattctcttaaagtctctcacgctgtaatattctcctatgctacaacataatcttgcattctctgaaatcttcaaaacaaggtgtgtcctatttcatgggcagtgttgcctaatataaatagaatgtgaaccatacatgtaatttaatattttctagaagccacatttaaaaagtaaaaataaacaggtgaaattaattttaatatattttatttaaccaaatatatccaaattcttattccatgtcaacctaaaatcaatatgaaaattatcagtgaactatgtagcattcttatttttgcagtaagtctttgaaatctgtatgtagttaacatttacagcacgtctacatttggatgctaaattttcaatagttgaggaaaaatgtagttctatcaaaaaaaaagggatttagcagaaaaaatgcactgcttccgtttttaaattaaatttaaattaattagacttaataaaattaaaagattagtttctcagtcacactcaccgtatttcaaaatgatcaacagccacatggagtagtggtgatcctatgggccagtacagctggggtgtaagatttggtagcaactaattgtgtcttgagtatattgtttttgtttgttttctacaccccattcggacctcaacctctgtcccaggcaggcagtaggagttaaaatttcctgctggaagtttggtcttcctttgtacttccttactggtgcataaaggtttaatgatgtttatgtattatataatttatctctgtataatcaccctttgttctgcataatgctctttgctttaaattatccttttaataccgcccctctttcctttgattagaattccagtgttatatctttggcccaccacttattttcaacctttgtcattttgtgtcaggtgtacttcatacaaactcttgtattttatttcttaagagaacaatactatttttatttgaatagggtaatttttgcctttgcatttcctgtttcatgttatactttgacttgtcagccaatttttataaatacacatacagatttatttgcttcctttaa

SEQ ID NO: 152144 - DNA, 1041 bp, Homo sapiens
  Payload ID: 9942
  Gene Symbol: MED13L
  Gene Name: mediator complex subunit 13-like
  ENST ID: ENST00000549786
  CDS Start-End: 1-572
ggcccttagctccaaatggatcagcagctcccccagctggcagtgcatttaatcccacctcgaatagtagttctacaaatcctgcagcaagtagttctgcatctggttcctctgtgccaccggtctcatcgtctgcctctgctcctggtattagccagataagcactacctcttcttcaggattcagtggtagtgttggagggcagaaccccagcactgggggcatttctgcggatagaacgcaagggaacataggctgtggtggagacactgaccctgggcagagctcttctcagccctcacaggatggacaagagagtgttacagaaagggagagaataggaattcccacggagcctgactctgcagacagccatgcccaccctccagctgttgtcatttacatggtggacccgttcacgtatgctgcagaggaggactccacttctgggaacttttggctgttgagcttgatgcgctgctacacagaaatgctggataatttacctgagcatatgagaaattctttcattctccaggttactgtttgcaagtttattatttacttttgatgttgttatttttgttgttatgaaaataaatacaggcctatgatttttcttaaaaaatggaagtacaggttaattatcccctaaccaaaatactaggaaccagagtgttttggatttccgattttggaatatttgcatatatataatgggagacctttgcagtgggcccaagtctaaacataaaatttatttatgtttcatatacaccttacacacataacctgaaggtaattttatacaatatttttggtcatgttgtgctttatacaaagttttgattaaattttgactgcaatacatcacatgaggtctgataacggaattttccacttgtggcgttttattggcattccaaaagttttgggttttggtgcattttggatttcagattttttgattagggatattcaacctgtacatgaaagtataaaagaaaaatagtcataattccgtcttttacattcaacca

SEQ ID NO: 152145 - DNA, 568 bp, Homo sapiens
  Payload ID: 9942
  Gene Symbol: MED13L
  Gene Name: mediator complex subunit 13-like
  ENST ID: ENST00000548743
  CDS Start-End: 289-568
tgcaatcgcactccccttctcctcccctttcccccctttttttccccccgtaaatgtggaaggctttgccttgtgctgccgcgcctccgatcggcaacctcttcccccgttgttggatcagctgcctgcccgcccgcctgccttttgaatttttttaaattccataatgacacctgcaatttcgccctaaaatagttgattgaatgcgattgtgtcaggaaaggactcttgcacccgaagctcccgcgattgtaaacatcgacagccgcctgcctctcggggcttactatgctggagagccgtaaagccattgcaccgagccgacggaaggctgaactcacgggaatcaaatggcgtaggtacaattttggagggcatggggactgtggacccataatttcagccccagcccaagatgatccaattctgttaagtttcatccgctgtctgcaagctaacctgctttgtgtatggcgtcgtgatgtcaaaccagattgcaaagagttatggatattctggtggggagatgaacccaacctagtgggtgtaatacatcatgaactgcagg

SEQ ID NO: 152146 - DNA, 665 bp, Homo sapiens
  Payload ID: 9942
  Gene Symbol: MED13L
  Gene Name: mediator complex subunit 13-like
  ENST ID: ENST00000552340
  CDS Start-End: 1-423
gagagaataggaattcccacggagcctgactctgcagacagccatgcccaccctccagctgttgtcatttacatggtggacccgttcacgtatgctgcagaggaggactccacttctgggaacttttggctgttgagcttgatgcgctgctacacagaaatgctggataatttacctgagcatatgagaaattctttcattctccagattgtgccttgccagtacatgctgcagacaatgaaggatgagcaagttttctacattcaatacttgaagtccatggcattttcagtgtactgccagtgcaggcgaccactgcctacacagatccacattaaatccctcacgggatttgggcctgcagccagcattgagatgaccctcaagaaccctgaggtaggtattggcaggacagaaacttagaaaatttatactaaaatgcaagctagaagaggtattttatctaacccagagattggctggttgcttagttggtcttctacattgatataagagttgctaggctggatgtgttggctcacacctgtagtcttagcactttcggaggctgaggtggaaggattgcttaagcctaggagtttgagaccacactgggcaacatagcaagaccccatctctacaaattttcttttaaaaattatcca

SEQ ID NO: 152147 - DNA, 584 bp, Homo sapiens
  Payload ID: 9942
  Gene Symbol: MED13L
  Gene Name: mediator complex subunit 13-like
  ENST ID: ENST00000552447
  CDS Start-End: 1-584
gcagacagagctgggagagacgtttggtgaggcgagccagaaatacaatgtgctcttcgtgggctattgtctgtctcacgaccagcgctggcttttggcttcctgcactgacctccatggggaattattagagacctgcgttgtaaatattgctttaccaaacagggaccccttccccttccccatttctttatttgttaggtcacggaggagtaaagtatctgcacgtaaaattggactacagaagttatgggagtggtgcatagggattgtccaaatgacatctctaccctggagagttgtaatcgggcgacttgggcgtcttggccatggggagcttaaagattggagtatcctccttggagaatgttcactacagacaatcagcaaaaagctcaaggatgtgtgccggatgtgtggaatctctgccgcagactctccttctatccttagtgcctgcctggttgccatggagccccaggggtcctttgtagtgatgccagatgctgtcacaatgggctctgtttttggccgaagtactgcactgaacatgcagtcatctcagctcaacacccctcaagatg

SEQ ID NO: 152148 - DNA, 7984 bp, Homo sapiens
  Payload ID: 9943
  Gene Symbol: MED14
  Gene Name: mediator complex subunit 14
  Uniprot ID: O60244
  ENST ID: ENST00000324817
  CDS Start-End: 120-4484
cggcccggcggtaggcggtggcgactctgcccgctcccgtttcggcgcggtgaccgagcgcccgggaggctcgaggaccgcatcgtgtgccgttgcgccaagcccggtcctgcgccgccatggccccagtgcagctggagaaccaccagctggtcccgcccggaggcggcggcgggggcagcggcggacccccgtcagccccagcccctcctcccccgggagccgccgtggcggcggccgctgcagctgcggctagcccgggctaccggctgagcaccctcattgaatttctgctgcaccgggcctactcggagcttatggtgttgacggacctactgccaaggaaatctgatgtggaaaggaaaatagaaatagtgcagtttgctagccggacacgccaactcttcgttcgattattagctttagtgaaatgggctaataatgctggcaaagtggaaaaatgtgcgatgatttcaagctttttagatcagcaagccatcctgtttgtggacactgctgatcgcctggcctcgttagctagagatgctctggtccatgcacgcctgcctagttttgccatcccatatgccattgatgtactaactactggatcttacccacggctgccaacctgcattagggacaaaattattcctccagacccaattaccaaaattgaaaaacaagccacactccatcagctgaatcagattcttagacatcggcttgtaaccacagatcttcctcctcagttagcaaatcttacagttgcaaatggccgggtgaagtttcgtgttgaaggagaatttgaagccaccttgactgtgatgggagatgaccctgatgttccatggcgtcttctcaagctagaaattctagttgaggataaggaaacaggagatgggcgagctttggttcatagcatgcaaatcagcttcatccatcaactggtgcagtctaggctctttgctgatgagaaacctcttcaggatatgtacaactgcctacattctttctgtttatcacttcagttagaagtgttacattcccaaactctaatgttaatccgagaacggtggggagaccttgtgcaggtggaaaggtatcatgctggaaagtgcctctccctttcagtttggaatcaacaggttcttgggagaaaaactggaacagcatctgttcacaaagttacaattaaaattgatgagaatgatgtctccaagcctttacagatttttcacgatcctcctttgccagcttctgattccaaattagtagaaagagccatgaagatcgaccacttatcaatagaaaaactcctgattgacagtgtccatgcaagagctcatcagaagctccaagaactgaaggccattcttagaggcttcaatgccaatgaaaactcttccatagagactgcactcccagctcttgttgttcccatcttggagccctgtggtaattcagagtgtctgcacatttttgtagatttacattctggaatgtttcaattgatgctttatggacttgaccaggccactctggatgacatggagaagtctgtgaatgatgatatgaaacgaatcataccctggattcagcaacttaagttttggcttggacaacagcgttgcaagcagtctataaaacatctgcctacgataagcagtgaaacattgcagctttccaattactcaactcatcctattggaaacctttctaagaataaactgttcattaaacttacccgccttccacaatactacattgttgtggagatgttggaggttcccaataaacccacacaactgtcgtacaagtactactttatgtctgtgaatgctgcagatcgtgaagacagccctgcaatggcattgctgctgcagcagttcaaggaaaacattcaggacttggtttttcgtacaaaaaccgggaaacagaccagaaccaatgccaagcgcaagttgtctgatgatccatgtccagtagaatccaagaaaacaaaacgagcaggagaaatgtgtgccttcaataaagttttagcccacttcgtcgctatgtgtgatacaaatatgccatttgtaggacttcggttggagttgtccaatctggagattccacatcaaggagtgcaagtggaaggtgatggcttcagccatgcaattcgcttattaaaaattcctccctgtaagggtataactgaggaaacccaaaaggctctggaccgctctcttcttgattgcactttccgattacaaggtagaaataaccgcacttgggtagcagagttagtgtttgcaaattgtccacttaatggcacttctactagggagcaaggaccatcccggcacgtttacctgacatatgaaaatctgttgtctgagcctgttggtggtagaaaggtggttgaaatgtttcttaatgactggaatagcattgcacgattatatgagtgtgtgttggaatttgcacgttctctaccagacatacctgctcatctaaatattttctcagaagttcgtgtttataattaccgaaaacttatcttgtgttatggaaccaccaagggaagctcaattagtatccaatggaattcgatccatcaaaaattccacatttctttgggaactgttggcccaaactcaggttgcagtaactgtcacaataccattctccatcagcttcaagaaatgttcaacaaaacaccaaatgtggttcagttattacaggtactgtttgatactcaggctccattaaatgccatcaacaaactccccactgtgccgatgttgggcttgacccagagaaccaatactgcctaccagtgcttctccattctgccacagtcgtccacccacatcagactggccttcaggaacatgtattgcattgatatatactgccggagtcgaggtgttgtggcaatacgggatggtgcctatagtctttttgataacagcaaactagttgaaggtttctatcctgcaccaggactaaagacgttcctgaatatgtttgttgacagcaatcaggatgctcgaagaaggtctgtaaatgaggacgataatcccccttctcctataggaggagatatgatggattctttaatatcgcagctccagccaccaccccagcaacagccatttccaaagcagccaggaacatcaggtgcttatcctcttacttcaccccctacatcttatcatagcacagtcaatcagtctccctcaatgatgcacacacagtctccaggaaatctgcatgctgccagctcccccagtggggctttgagagccccatcaccagcgtcatttgttccaactcctcccccatcctcgcatggaatctcaataggaccaggggccagttttgctagtccacatggaactcttgaccctagttccccatacactatggtgtcaccaagtggacgagcagggaactggccaggatctcctcaagtgtctggcccctcaccagcagcacgcatgcctggaatgtcaccagccaacccctcactacattctccggttccagatgcttctcattcccctcgagctggaacaagttctcaaacaatgccaacaaacatgcctccacctcgtaaactacctcagcgctcttgggcggcatccatacctaccatcctcactcacagtgccttgaacattttactgctgccctctccaactccaggccttgtgcccggcctggcaggtagttacctttgttctccacttgagagattccttggatcagtcatcatgagacgacatcttcaaagaattattcaacaagaaacgctgcagctgataaattctaatgaacccggagtgatcatgtttaagactgatgcactgaaatgcagagtagctcttagtcccaaaaccaaccaaacgcttcagctaaaagtgacacctgaaaatgcaggacagtggaaacctgatgaacttcaagttttggagaaattctttgaaacaagagttgcaggaccaccatttaaagctaatacgttaatagccttcaccaagctattaggagctcctacacacatcctcagggattgtgtgcacattatgaagctggagctgttccctgaccaagcaacacagctaaaatggaatgttcagttttgcctgacgatccctcccagcgcgccgccgattgcacctcctgggacgcctgctgtggtgctgaaatccaaaatgctattttttcttcaactaactcagaaaacatcggtccctccccaagaacctgttagtattatagttccaatcatttatgacatggcttcaggtacaacccagcaggcagacattcccagacagcagaactcttctgttgctgctcccatgatggtcagcaacattctgaagaggtttgcagagatgaatccaccacgacaaggtgaatgcacaatatttgcagctgttcgtgatttaatggctaatcttacactgccccctggtgggcgtccatagacactattgtttttaaaccaggaaggctgacagatgagacaacaaaaaaaatctgaattcagccttcagtttaaaaaaggaaaaggactttttttttaaactttaagagctaaatattctaaactggcaaaaattttcagggtgcacttctttcatcaaaatgatcatccatcttttgtataatgaacttgtatagtgtgtttaaatgggacacatttcaaaggaaataaatcagtgtccgtttgccagtaataaatttaatattctgttttatactataaagttatgaaaatgccaaacttgtttatttaattgttttcttatgttttgggtgtaatagtccttttttggtttttgttttgttttttaaggcaggtctgtcatttttgaatactgtaaaactgtgataaactttatattgaagctgtattttaatatgaccgctttgaatccttacatgaaatgttctgggagttgttataaacacaccccaaggaagcaatatttaataaaactaggtcaaaaacaaaacaaaacagtgacactcacttgtgtgtatataaactctagagacatcttaggccctcccttcatctttaacctggtggatggagccagttattaatttataataatacatgtctgaaatttgaccaaaaacatcttctttatgtcaaggttaatatattttcttcagacattcctaacttgactagtggttaacatttagcaccttggttgtctttcaatatataggatttgggtgaaaaataaggaacttagtctttgagaagggacagtatgtggttcgtattgatcaaggatcccaaataatgcaatcattctcatctgttgaggatgtgggaacttttctgtcaggaaaatttagtttacagaatacttctgcatacaacattaattaggaaacaaagaactttaatgctgtacctctgcatgaagtttctgtgagctttctttatcttgcttaacttatcctcctttccttccccaccaaaattgggattgttctaaacaatttcaatttaattcattgtcaacaaaacgatagaatgttttgcttggaagaaacctggtccattcccctcattgtgaagaatcccgaatcctgggcctgtccagggtcaaatggagtttttggtattaatacatctctgcagggtttctttttggagcactgtgctgtctttcctagtcagtcagggacttttttaagcttcaaagaacatggtctgatgcaaaggtcttctaccgacttcatggtatttaggaaaaatttttaagtgataataccatgccgagttacctggtcactgtaatactggttctccattaaaatgtagatgctttgtctaattccacttcaagatgatttaattgagcttctataactatcaactatcaaattctagtttcaagtatctcactgtacctatatcatatctgttctcaactttgtttgattctccactcattttcaatcagagttgaagccttctttgcctttcttctttgtcttatttctgccttcatctcccacttctcacccaactctgccactgttcaggagcagttgactaaacttttatccttcctttaacttaatctttttatccttctgtttttagttcttacagtggtaatcacatcagtttggcaatctaagatgtctttatcaagggtcagcccttttctatttggagctgaatcttttctttcatgtagaaatctacatgtatatacaagaaatgtatttttatctgcaggataatattgtttcaaataattttattaagagttaactttttaggtattttcccttttaatgtggttttgaaatgttaattgcatttttacacatgatgcattcagtggacactcttttttcctaattataactcatctctgaatgcattgtgccaatcaagagtaagataggattcagtgcgcaaaatttgcttttgatgcttattaagagtaaacccatgaatttgaatttttatattatgcttggtacttggaattgatatataccttattaaagcttgaaaacatttagcatttgaatagtaagtttcatcacaaatcatgtcttttgcctcttttgttacccaggttcgatcaaggggactggatgcccaagtgattttctctaataatcgggttgggacttaactttaaggtgttttcaatgtgattttagtatttacagtaataaataaaatttatacaaagtttcagagaactaccaactctctagttaattttgatgaagatgttttcattaatagtctggtttagtattaatttaaccttgaaataagaaattggtcctgatttgccaccttcatttttccatctgctgaaatgccatttcagaatgtataaaagtactttcagaattagaagaaaagtgagagcttcagcagaacgtgtcaagtcgctaataacaggagtcgaaccttatgtttgaaaattaactgagtgagttaagtgcaagcataaactaaaatttatatgactttgaatttaagaaccactaataactgtgttctaattaacacagtaatctgttcagccaaaggatactaacagccattctttggactgtggttaatttgataacttcaagaagttataactttgctaccctggattctgatgcaatttcaatataaaaagttgttcctttcatagtttttccccccaaaagaagtgcctattacattttaccttaatgtttatttatcatccaagtgttcttgatataaaatcagtatacagaaaattttaagagaacttacattcaagggacatagagggaaaatgttaatgtgtatttcattgtttcttgtggaatttttttttcattcggtttgagaatggacagtgtgtctaaggatgtgatttaaatttacttaggatggatttagcattgaggttattaagacaaagttagcagaggccagccagcactgtgctgcacaactccaggaactccatggtatgctcacaattttctgcaagttgcctccacttccaagtggccagtgatttgttaaaataccttgcccaagaatataactgattgatgaaagggcatatttaggtcaatataaaataatagcaagtatttactgagagcttactgtgtgctaggcattttcttaatatttcaatgtgtatttaatcctcacaacaacccaatgtggtaggttattgatatcctcttcttaaaaatgagtaaatggaggcccagagaaatgtaatttgcctgagatcaaattaaggttgcttaagatcaaactgctaagaaggggcagtttgagtctgagctagtgctcctaaacactggacatttttgctgtgaaccacagtcgggaaggtttaatgtttagactctttcctcagaggcttttaactacacacaattttgacatgttttccaagctcagaaagctcattaaaaacaactaaaactg

SEQ ID NO: 152149 - DNA, 557 bp, Homo sapiens
  Payload ID: 9943
  Gene Symbol: MED14
  Gene Name: mediator complex subunit 14
  ENST ID: ENST00000416199
  CDS Start-End: 1-468
gttgcaggaccaccatttaaagctaatacgttaatagccttcaccaagctattaggagctcctacacacatcctcagggattgtgtgcacattatgaagctggagctgttccctgaccaagcaacacagctaaaatggaatgttcagttttgcctgacgatccctcccagcgcgccgccgattgcacctcctgggacgcctgctgtggtgctgaaatccaaaatgctattttttcttcaactaactcagaaaacatcggtccctccccaagaacctgttagtattatagttccaatcatttatgacatggcttcaggtacaacccagcaggcagacattcccagacagcagaactcttctgttgctgctcccatgatggtcagcaacattctgaagaggtttgcagagatgaatccaccacgacaaggttcgatcaaggggactggatgcccaagtgattttctctaataatcgggttgggacttaactttaaggtgttttcaatgtgattttagtatttacagtaataaataaaatttatacaaagtttcagagaa

SEQ ID NO: 152150 - DNA, 1480 bp, Homo sapiens
  Payload ID: 9943
  Gene Symbol: MED14
  Gene Name: mediator complex subunit 14
  ENST ID: ENST00000433003
  CDS Start-End: 1-996
ccaagtggacgagcagggaactggccaggatctcctcaagtgtctggcccctcaccagcagcacgcatgcctggaatgtcaccagccaacccctcactacattctccggttccagatgcttctcattcccctcgagctggaacaagttctcaaacaatgccaacaaacatgcctccacctcgtaaactacctcagcgctcttgggcggcatccatacctaccatcctcactcacagtgccttgaacattttactgctgccctctccaactccaggccttgtgcccggcctggcaggtagttacctttgttctccacttgagagattccttggatcagtcatcatgagacgacatcttcaaagaattattcaacaagaaacgctgcagctgataaattctaatgaacccggagtgatcatgtttaagactgatgcactgaaatgcagagtagctcttagtcccaaaaccaaccaaacgcttcagctaaaagtgacacctgaaaatgcaggacagtggaaacctgatgaacttcaagttttggagaaattctttgaaacaagagttgcaggaccaccatttaaagctaatacgttaatagccttcaccaagctattaggagctcctacacacatcctcagggattgtgtgcacattatgaagctggagctgttccctgaccaagcaacacagctaaaatggaatgttcagttttgcctgacgatccctcccagcgcgccgccgattgcacctcctgggacgcctgctgtggtgctgaaatccaaaatgctattttttcttcaactaactcagaaaacatcggtccctccccaagaacctgttagtattatagttccaatcatttatgacatggcttcaggtacaacccagcaggcagacattcccagacagcagaactcttctgttgctgctcccatgatggtcagcaacattctgaagaggtttgcagagatgaatccaccacgacaaggtacatgaccagtagacaatattttattgcatatatgttataaaagttcttttgagagacacccctttctcctcttctcttctccctccttacctactctaccacccaatcatagcaatagaggtctggttgccgtggccctcttaatgtctgcctgtcgctttcttcctttctcactggttcttcatttttgtccatttctctgctgcctggactttttgttagtgatttactattgggactgacccagttgctaatgccagaagcttgtatttatagcacacattgccacaaagacctaggttaggatgatagaattttccacggctgtgaattcctgccctaccatcaatacctgccactctgtacatcacaaagttgaaatgcatgttggtttctcatatttcatggttcaatcacgaatagaagaatattattaaaagttctgtatcttctaaatgttttgtgaagaataaaagctgatacaaatgg

SEQ ID NO: 152151 - DNA, 3351 bp, Homo sapiens
  Payload ID: 9944
  Gene Symbol: MED15
  Gene Name: mediator complex subunit 15
  Uniprot ID: Q96RN5
  ENST ID: ENST00000263205
  CDS Start-End: 70-2436
ggctctgtgactgaggcggcggcggtggcggccaagcgggatacgggcggcgggagctggggaacaggcatggacgtttccgggcaagagaccgactggcggagcaccgccttccggcagaagctggtcagtcaaatcgaggatgccatgaggaaagctggtgtggcacacagtaaatccagcaaggatatggagagccatgttttcctgaaggccaagacccgggacgaatacctttctctcgtggccaggctcattatccattttcgagacattcataacaagaaatctcaagcttccgtcagtgatcctatgaatgcactccagagcctgactggcggacctgctgcgggagccgctggaattggcatgcctcctcggggcccgggacagtctctgggcgggatgggtagccttggtgccatgggacagccaatgtctctctcagggcagccgcctcctgggacctcggggatggcccctcacagcatggctgtcgtgtctacggcaactccacagacccagctgcagctccagcaggtggcgctgcagcagcagcagcaacagcagcagttccagcagcagcagcaggcggcgctacagcagcagcagcagcagcagcaacagcagcagttccaggctcagcagagtgccatgcagcagcagttccaagcagtagtgcagcagcagcagcagctccagcagcagcagcagcagcagcagcatctaattaaattgcatcatcaaaatcagcaacagatacagcagcagcaacagcagctgcagcgaatagcacagctgcagctccaacaacagcaacagcagcagcagcagcagcagcagcagcagcagcaggctttgcaggcccagccaccaattcagcagccaccgatgcagcagccacagcctccgccctcccaggctctgccccagcagctgcagcagatgcatcacacacagcaccaccagccgccaccacagccccagcagcctccagttgctcagaaccaaccatcacaactcccgccacagtcgcagacccagcctttggtgtcacaggcgcaagctctccctggacaaatgttgtatacccaaccaccactgaaatttgtccgagctccgatggtggtgcagcagcccccagtgcagccccaggtgcagcagcagcagacagcagtacagacagctcaggctgcccagatggtggctcccggagtccagatgatcacggaagccttggcccaaggtgggatgcacataagagcccggttcccgcctaccaccgctgtgtccgccatcccgtcaagctccatccctttgggcagacagcccatggcacaggtcagccagagcagcctccccatgctgtcctcgccgtcaccgggccagcaggtgcagaccccgcagtcgatgccccctcccccccagccgtccccgcagcccggccagcccagctcacagcccaactccaacgtcagctctggccctgccccatctcccagtagcttcctgcccagcccctcaccgcagccctcccagagcccagtgacggcgcggaccccacagaacttcagtgtcccctcacctggacctttaaacacacctgtgaaccccagctctgtcatgagcccagctggctccagccaggctgaggagcagcagtacctggacaagctgaagcagctgtcgaagtacatcgagcccctgcgccgcatgatcaacaagatcgacaagaacgaagacagaaaaaaggacctgagtaagatgaagagccttctggacattctgacagacccctcgaagcggtgtcccctgaagaccttgcaaaagtgtgagatcgccctggagaaactcaagaatgacatggcggtgcccactcccccaccgcccccggtgccaccgaccaaacagcagtacctatgccagccgctcctggatgccgtcctggccaacatccgctcacctgtcttcaaccattccctgtaccgcacattcgttccagccatgaccgccattcacggcccacccatcacggccccagtggtgtgcacccggaagcgcaggcttgaggatgatgagcggcagagcatccccagtgtgctccagggtgaggtggccaggctggaccccaagttcctggtaaacctggacccttctcactgcagcaacaatggcactgtccacctgatctgcaagctggatgacaaggacctcccaagtgtgccaccactggagctcagtgtgcccgctgactatcctgcccaaagcccgctgtggatagaccggcagtggcagtacgacgccaaccccttcctccagtcggtgcaccgctgcatgacctccaggctgctgcagctcccggacaagcactcggtcaccgccttgctcaacacctgggcccagagcgtccaccaggcctgcctctcagccgcctagccaagactgcagggatggcccgcagcctcatcggggccaaggacacacgcctcctgtcagacacttctaggtgttggcttccttagagagcctggggttaggttagctttcctgcttttatcttctgccttggggacctgccaaacgaaatcccacacctgtacagaactgggataggcgcagtggagcgggttgcttggggggcgttggccgacttcttagagaaggccctccatgtgacttcctcccaggagccagatgcgatcctcaggctgctctcaccgtggcctgtccacggtccaggtccatctcagcagcgtgagggtgcactcagggtgttgttagagcgtctcgtgtgtgctagacgcacccctactcgttcctatagaacacagaggacataggaaacccttaaaacacacatgggattctctggtcacagttttgggttcaggctatgctgctttgggcaggtggagcaccccccgaggaagcctgcaagtccagggcacaggctgccttttggagggagggctggcccataggtgctgctggctccccgccaccagctgggcctcagccctcacggcattcctgctgagcaccgtggggcacccagggagcaggggcgtcagggatcctgctgccggcacccctgtgccgctggcatgagggccgtgtccccactgtgaaggatgaagagcaaggccctcaggacccgtgtcctcagagcaccacacactgagcacccagagacagcgggcctggcagcgggccgggccatgcagggagcgcctccctatgttgcctgccactctgggcaccggccagcaccctctggtgagaagaggtcccccctttttatgtgcactaccccaccatctgtgattataataaatttattattcctgtgtt

SEQ ID NO: 152152 - DNA, 3252 bp, Homo sapiens
  Payload ID: 9944
  Gene Symbol: MED15
  Gene Name: mediator complex subunit 15
  Uniprot ID: Q96RN5
  ENST ID: ENST00000292733
  CDS Start-End: 78-2324
ttgggcctggctctgtgactgaggcggcggcggtggcggccaagcgggatacgggcggcgggagctggggaacaggcatggacgtttccgggcaagagaccgactggcggagcaccgccttccggcagaagctggtcagtcaaatcgaggatgccatgaggaaagctggtgtggcacacagtaaatccagcaaggatatggagagccatgttttcctgaaggccaagacccgggacgaatacctttctctcgtggccaggctcattatccattttcgagacattcataacaagaaatctcaagcttccgtcagtgatcctatgaatgcactccagagcctgactggcggacctgctgcgggagccgctggaattggcatgcctcctcggggcccgggacagtctctgggcgggatgggtagccttggtgccatgggacagccaatgtctctctcagggcagccgcctcctgggacctcggggatggcccctcacagcatggctgtcgtgtctacggcaactccacagacccagctgcagctccagcaggtggcgctgcagcagcagcagcaacagcagcagttccagcagcagcagcaggcggcgctacagcagcagcagcagcagcagcaacagcagcagttccaggctcagcagagtgccatgcagcagcagttccaagcagtagtgcagcagcagcagcagctccagcagcagcagcagcagcagcagcatctaattaaattgcatcatcaaaatcagcaacagatacagcagcagcaacagcagctgcagcgaatagcacagctgcagctccaacaacagcaacagcagcagcagcagcagcagcagcagcagcagcaggctttgcaggcccagccaccaattcagcagccaccgatgcagcagccacagcctccgccctcccaggctctgccccagcagctgcagcagatgcatcacacacagcaccaccagccgccaccacagccccagcagcctccagttgctcagaaccaaccatcacaactcccgccacagtcgcagacccagcctttggtgtcacaggcgcaagctctccctggacaaatgttgtatacccaaccaccactgaaatttgtccgagctccgatggtggtgcagcagcccccagtgcagccccaggtgcagcagcagcagacagcagtacagacagctcaggctgcccagatggtggctcccggagtccaggtcagccagagcagcctccccatgctgtcctcgccgtcaccgggccagcaggtgcagaccccgcagtcgatgccccctcccccccagccgtccccgcagcccggccagcccagctcacagcccaactccaacgtcagctctggccctgccccatctcccagtagcttcctgcccagcccctcaccgcagccctcccagagcccagtgacggcgcggaccccacagaacttcagtgtcccctcacctggacctttaaacacacctgtgaaccccagctctgtcatgagcccagctggctccagccaggctgaggagcagcagtacctggacaagctgaagcagctgtcgaagtacatcgagcccctgcgccgcatgatcaacaagatcgacaagaacgaagacagaaaaaaggacctgagtaagatgaagagccttctggacattctgacagacccctcgaagcggtgtcccctgaagaccttgcaaaagtgtgagatcgccctggagaaactcaagaatgacatggcggtgcccactcccccaccgcccccggtgccaccgaccaaacagcagtacctatgccagccgctcctggatgccgtcctggccaacatccgctcacctgtcttcaaccattccctgtaccgcacattcgttccagccatgaccgccattcacggcccacccatcacggccccagtggtgtgcacccggaagcgcaggcttgaggatgatgagcggcagagcatccccagtgtgctccagggtgaggtggccaggctggaccccaagttcctggtaaacctggacccttctcactgcagcaacaatggcactgtccacctgatctgcaagctggatgacaaggacctcccaagtgtgccaccactggagctcagtgtgcccgctgactatcctgcccaaagcccgctgtggatagaccggcagtggcagtacgacgccaaccccttcctccagtcggtgcaccgctgcatgacctccaggctgctgcagctcccggacaagcactcggtcaccgccttgctcaacacctgggcccagagcgtccaccaggcctgcctctcagccgcctagccaagactgcagggatggcccgcagcctcatcggggccaaggacacacgcctcctgtcagacacttctaggtgttggcttccttagagagcctggggttaggttagctttcctgcttttatcttctgccttggggacctgccaaacgaaatcccacacctgtacagaactgggataggcgcagtggagcgggttgcttggggggcgttggccgacttcttagagaaggccctccatgtgacttcctcccaggagccagatgcgatcctcaggctgctctcaccgtggcctgtccacggtccaggtccatctcagcagcgtgagggtgcactcagggtgttgttagagcgtctcgtgtgtgctagacgcacccctactcgttcctatagaacacagaggacataggaaacccttaaaacacacatgggattctctggtcacagttttgggttcaggctatgctgctttgggcaggtggagcaccccccgaggaagcctgcaagtccagggcacaggctgccttttggagggagggctggcccataggtgctgctggctccccgccaccagctgggcctcagccctcacggcattcctgctgagcaccgtggggcacccagggagcaggggcgtcagggatcctgctgccggcacccctgtgccgctggcatgagggccgtgtccccactgtgaaggatgaagagcaaggccctcaggacccgtgtcctcagagcaccacacactgagcacccagagacagcgggcctggcagcgggccgggccatgcagggagcgcctccctatgttgcctgccactctgggcaccggccagcaccctctggtgagaagaggtcccccctttttatgtgcactaccccaccatctgtgattataataaatttattattcctgtgtttgtcagttgttca

SEQ ID NO: 152153 - DNA, 2235 bp, Homo sapiens
  Payload ID: 9944
  Gene Symbol: MED15
  Gene Name: mediator complex subunit 15
  Uniprot ID: Q96RN5
  ENST ID: ENST00000382974
  CDS Start-End: 39-2072
ccaagcgggatacgggcggcgggagctggggaacaggcatggacgtttccgggcaagagaccgactggcggagcaccgccttccggcagaagctggtcagtcaaatcgaggatgccatgaggaaagctggtgtggcacacagtaaatccagcaaggatatggagagccatgttttcctgaaggccaagacccgggacgaatacctttctctcgtggccaggctcattatccattttcgagacattcataacaagaaatctcaagcttccgtcagtgcccagctgcagctccagcaggtggcgctgcagcagcagcagcaacagcagcagttccagcagcagcagcaggcggcgctacagcagcagcagcagcagcagcaacagcagcagttccaggctcagcagagtgccatgcagcagcagttccaagcagtagtgcagcagcagcagcagctccagcagcagcagcagcagcagcagcatctaattaaattgcatcatcaaaatcagcaacagatacagcagcagcaacagcagctgcagcgaatagcacagctgcagctccaacaacagcaacagcagcagcagcagcagcagcagcagcagcagcaggctttgcaggcccagccaccaattcagcagccaccgatgcagcagccacagcctccgccctcccaggctctgccccagcagctgcagcagatgcatcacacacagcaccaccagccgccaccacagccccagcagcctccagttgctcagaaccaaccatcacaactcccgccacagtcgcagacccagcctttggtgtcacaggcgcaagctctccctggacaaatgttgtatacccaaccaccactgaaatttgtccgagctccgatggtggtgcagcagcccccagtgcagccccaggtgcagcagcagcagacagcagtacagacagctcaggctgcccagatggtggctcccggagtccaggtcagccagagcagcctccccatgctgtcctcgccgtcaccgggccagcaggtgcagaccccgcagtcgatgccccctcccccccagccgtccccgcagcccggccagcccagctcacagcccaactccaacgtcagctctggccctgccccatctcccagtagcttcctgcccagcccctcaccgcagccctcccagagcccagtgacggcgcggaccccacagaacttcagtgtcccctcacctggacctttaaacacacctgtgaaccccagctctgtcatgagcccagctggctccagccaggctgaggagcagcagtacctggacaagctgaagcagctgtcgaagtacatcgagcccctgcgccgcatgatcaacaagatcgacaagaacgaagacagaaaaaaggacctgagtaagatgaagagccttctggacattctgacagacccctcgaagcggtgtcccctgaagaccttgcaaaagtgtgagatcgccctggagaaactcaagaatgacatggcggtgcccactcccccaccgcccccggtgccaccgaccaaacagcagtacctatgccagccgctcctggatgccgtcctggccaacatccgctcacctgtcttcaaccattccctgtaccgcacattcgttccagccatgaccgccattcacggcccacccatcacggccccagtggtgtgcacccggaagcgcaggcttgaggatgatgagcggcagagcatccccagtgtgctccagggtgaggtggccaggctggaccccaagttcctggtaaacctggacccttctcactgcagcaacaatggcactgtccacctgatctgcaagctggatgacaaggacctcccaagtgtgccaccactggagctcagtgtgcccgctgactatcctgcccaaagcccgctgtggatagaccggcagtggcagtacgacgccaaccccttcctccagtcggtgcaccgctgcatgacctccaggctgctgcagctcccggacaagcactcggtcaccgccttgctcaacacctgggcccagagcgtccaccaggcctgcctctcagccgcctagccaagactgcagggatggcccgcagcctcatcggggccaaggacacacgcctcctgtcagacacttctaggtgttggcttccttagagagcctggggttaggttagctttcctgcttttatcttctgccttggggacctgccaaacgaaatcccacacctgta

SEQ ID NO: 152154 - DNA, 3210 bp, Homo sapiens
  Payload ID: 9944
  Gene Symbol: MED15
  Gene Name: mediator complex subunit 15
  ENST ID: ENST00000406969
  CDS Start-End: 129-2297
gactgaggcggcggcggtggcggccaagcgggatacgggcggcgggagctggggaacaggcatggacgtttccgggcaagagaccgactggcggagcaccgccttccggcagaagctgcgaggatgccatgaggaaagctggtgtggcacacagtaaatccagcaaggatatggagagccatgttttcctgaaggccaagacccgggacgaatacctttctctcgtggccaggctcattatccattttcgagacattcataacaagaaatctcaagcttccgtcagtgatcctatgaatgcactccagagcctgactggcggacctgctgcgggagccgctggaattggcatgcctcctcggggcccgggacagtctctgggcgggatgggtagccttggtgccatgggacagccaatgtctctctcagggcagccgcctcctgggacctcggggatggcccctcacagcatggctgtcgtgtctacggcaactccacagacccagctgcagctccagcaggtggcgctgcagcagcagcagcaacagcagcagttccagcagcagcagcaggcggcgctacagcagcagcagcagcagcagcaacagcagcagttccaggctcagcagagtgccatgcagcagcagttccaagcagtagtgcagcagcagcagcagctccagcagcagcagcagcagcagcagcatctaattaaattgcatcatcaaaatcagcaacagatacagcagcagcaacagcagctgcagcgaatagcacagctgcagctccaacaacagcaacagcagcagcagcagcagcagcagcagcagcagcaggctttgcaggcccagccaccaattcagcagccaccgatgcagcagccacagcctccgccctcccaggctctgccccagcagctgcagcagatgcatcacacacagcaccaccagccgccaccacagccccagcagcctccagttgctcagaaccaaccatcacaactcccgccacagtcgcagacccagcctttggtgtcacaggcgcaagctctccctggacaaatgttgtatacccaaccaccactgaaatttgtccgagctccgatggtggtgcagcagcccccagtgcagccccaggtgcagcagcagcagacagcagtacagacagctcaggctgcccagatggtggctcccggagtccaggtcagccagagcagcctccccatgctgtcctcgccgtcaccgggccagcaggtgcagaccccgcagtcgatgccccctcccccccagccgtccccgcagcccggccagcccagctcacagcccaactccaacgtcagctctggccctgccccatctcccagtagcttcctgcccagcccctcaccgcagccctcccagagcccagtgacggcgcggaccccacagaacttcagtgtcccctcacctggacctttaaacacacctgtgaaccccagctctgtcatgagcccagctggctccagccaggctgaggagcagcagtacctggacaagctgaagcagctgtcgaagtacatcgagcccctgcgccgcatgatcaacaagatcgacaagaacgaagacagaaaaaaggacctgagtaagatgaagagccttctggacattctgacagacccctcgaagcggtgtcccctgaagaccttgcaaaagtgtgagatcgccctggagaaactcaagaatgacatggcggtgcccactcccccaccgcccccggtgccaccgaccaaacagcagtacctatgccagccgctcctggatgccgtcctggccaacatccgctcacctgtcttcaaccattccctgtaccgcacattcgttccagccatgaccgccattcacggcccacccatcacggccccagtggtgtgcacccggaagcgcaggcttgaggatgatgagcggcagagcatccccagtgtgctccagggtgaggtggccaggctggaccccaagttcctggtaaacctggacccttctcactgcagcaacaatggcactgtccacctgatctgcaagctggatgacaaggacctcccaagtgtgccaccactggagctcagtgtgcccgctgactatcctgcccaaagcccgctgtggatagaccggcagtggcagtacgacgccaaccccttcctccagtcggtgcaccgctgcatgacctccaggctgctgcagctcccggacaagcactcggtcaccgccttgctcaacacctgggcccagagcgtccaccaggcctgcctctcagccgcctagccaagactgcagggatggcccgcagcctcatcggggccaaggacacacgcctcctgtcagacacttctaggtgttggcttccttagagagcctggggttaggttagctttcctgcttttatcttctgccttggggacctgccaaacgaaatcccacacctgtacagaactgggataggcgcagtggagcgggttgcttggggggcgttggccgacttcttagagaaggccctccatgtgacttcctcccaggagccagatgcgatcctcaggctgctctcaccgtggcctgtccacggtccaggtccatctcagcagcgtgagggtgcactcagggtgttgttagagcgtctcgtgtgtgctagacgcacccctactcgttcctatagaacacagaggacataggaaacccttaaaacacacatgggattctctggtcacagttttgggttcaggctatgctgctttgggcaggtggagcaccccccgaggaagcctgcaagtccagggcacaggctgccttttggagggagggctggcccataggtgctgctggctccccgccaccagctgggcctcagccctcacggcattcctgctgagcaccgtggggcacccagggagcaggggcgtcagggatcctgctgccggcacccctgtgccgctggcatgagggccgtgtccccactgtgaaggatgaagagcaaggccctcaggacccgtgtcctcagagcaccacacactgagcacccagagacagcgggcctggcagcgggccgggccatgcagggagcgcctccctatgttgcctgccactctgggcaccggccagcaccctctggtgagaagaggtcccccctttttatgtgcactaccccaccatctgtgattataataaatttattattcctgtg

SEQ ID NO: 152155 - DNA, 596 bp, Homo sapiens
  Payload ID: 9944
  Gene Symbol: MED15
  Gene Name: mediator complex subunit 15
  ENST ID: ENST00000445189
  CDS Start-End: 224-596
acatgcttgcctggtggtgaatgggacactttcaggcgagacctaggggagccccaggccagcaccaggacagagatctcgaggcctttccaactctgctggttcttcagaagtcaaaccaacagattggagtatgtgaaggaagctcgtgtattcttctgaactagcttagacaacagtacacagtttgaagggcagcagccttttctgcagcgaggatgccatgaggaaagctggtgtggcacacagtaaatccagcaaggatatggagagccatgttttcctgaaggccaagacccgggacgaatacctttctctcgtggccaggctcattatccattttcgagacattcataacaagaaatctcaagcttccgtcagtgatcctatgaatgcactccagagcctgactggcggacctgctgcgggagccgctggaattggcatgcctcctcggggcccgggacagtctctgggcgggatgggtagccttggtgccatgggacagccaatgtctctctcagggcagccgcctcctgggacctcggggatggcccctcacagcatggctgtcgtgtctacggcaactccacaga

SEQ ID NO: 152156 - DNA, 3267 bp, Homo sapiens
  Payload ID: 9944
  Gene Symbol: MED15
  Gene Name: mediator complex subunit 15
  ENST ID: ENST00000433831
  CDS Start-End: 95-262
gcggacggcttccgggtttgggcctggctctgtgactgaggcggcggcggtggcggccaagcgggatacgggcggcgggagctggggaacaggcatggacgtttccgggcaagagaccgactggcggagcaccgccttccggcagaagctggtcagtcaaatcgaggatgccatgaggaaagctggtgtggcacacagtaaatccagcaaggatatggagagccatgttttcctgaaggccaagacccgggtaaggccctagacgaatacctttctctcgtggccaggctcattatccattttcgagacattcataacaagaaatctcaagcttccgtcagtgatcctatgaatgcactccagagcctgactggcggacctgctgcgggagccgctggaattggcatgcctcctcggggcccgggacagtctctgggcgggatgggtagccttggtgccatgggacagccaatgtctctctcagggcagccgcctcctgggacctcggggatggcccctcacagcatggctgtcgtgtctacggcaactccacagacccagctgcagctccagcaggtggcgctgcagcagcagcagcaacagcagcagttccagcagcagcagcaggcggcgctacagcagcagcagcagcagcagcaacagcagcagttccaggctcagcagagtgccatgcagcagcagttccaagcagtagtgcagcagcagcagcagctccagcagcagcagcagcagcagcagcatctaattaaattgcatcatcaaaatcagcaacagatacagcagcagcaacagcagctgcagcgaatagcacagctgcagctccaacaacagcaacagcagcagcagcagcagcagcagcagcagcagcaggctttgcaggcccagccaccaattcagcagccaccgatgcagcagccacagcctccgccctcccaggctctgccccagcagctgcagcagatgcatcacacacagcaccaccagccgccaccacagccccagcagcctccagttgctcagaaccaaccatcacaactcccgccacagtcgcagacccagcctttggtgtcacaggcgcaagctctccctggacaaatgttgtatacccaaccaccactgaaatttgtccgagctccgatggtggtgcagcagcccccagtgcagccccaggtgcagcagcagcagacagcagtacagacagctcaggctgcccagatggtggctcccggagtccaggtcagccagagcagcctccccatgctgtcctcgccgtcaccgggccagcaggtgcagaccccgcagtcgatgccccctcccccccagccgtccccgcagcccggccagcccagctcacagcccaactccaacgtcagctctggccctgccccatctcccagtagcttcctgcccagcccctcaccgcagccctcccagagcccagtgacggcgcggaccccacagaacttcagtgtcccctcacctggacctttaaacacacctgtgaaccccagctctgtcatgagcccagctggctccagccaggctgaggagcagcagtacctggacaagctgaagcagctgtcgaagtacatcgagcccctgcgccgcatgatcaacaagatcgacaagaacgaagacagaaaaaaggacctgagtaagatgaagagccttctggacattctgacagacccctcgaagcggtgtcccctgaagaccttgcaaaagtgtgagatcgccctggagaaactcaagaatgacatggcggtgcccactcccccaccgcccccggtgccaccgaccaaacagcagtacctatgccagccgctcctggatgccgtcctggccaacatccgctcacctgtcttcaaccattccctgtaccgcacattcgttccagccatgaccgccattcacggcccacccatcacggccccagtggtgtgcacccggaagcgcaggcttgaggatgatgagcggcagagcatccccagtgtgctccagggtgaggtggccaggctggaccccaagttcctggtaaacctggacccttctcactgcagcaacaatggcactgtccacctgatctgcaagctggatgacaaggacctcccaagtgtgccaccactggagctcagtgtgcccgctgactatcctgcccaaagcccgctgtggatagaccggcagtggcagtacgacgccaaccccttcctccagtcggtgcaccgctgcatgacctccaggctgctgcagctcccggacaagcactcggtcaccgccttgctcaacacctgggcccagagcgtccaccaggcctgcctctcagccgcctagccaagactgcagggatggcccgcagcctcatcggggccaaggacacacgcctcctgtcagacacttctaggtgttggcttccttagagagcctggggttaggttagctttcctgcttttatcttctgccttggggacctgccaaacgaaatcccacacctgtacagaactgggataggcgcagtggagcgggttgcttggggggcgttggccgacttcttagagaaggccctccatgtgacttcctcccaggagccagatgcgatcctcaggctgctctcaccgtggcctgtccacggtccaggtccatctcagcagcgtgagggtgcactcagggtgttgttagagcgtctcgtgtgtgctagacgcacccctactcgttcctatagaacacagaggacataggaaacccttaaaacacacatgggattctctggtcacagttttgggttcaggctatgctgctttgggcaggtggagcaccccccgaggaagcctgcaagtccagggcacaggctgccttttggagggagggctggcccataggtgctgctggctccccgccaccagctgggcctcagccctcacggcattcctgctgagcaccgtggggcacccagggagcaggggcgtcagggatcctgctgccggcacccctgtgccgctggcatgagggccgtgtccccactgtgaaggatgaagagcaaggccctcaggacccgtgtcctcagagcaccacacactgagcacccagagacagcgggcctggcagcgggccgggccatgcagggagcgcctccctatgttgcctgccactctgggcaccggccagcaccctctggtgagaagaggtcccccctttttatgtgcactaccccaccatctgtgattataataaatttattattcctgtgtt

SEQ ID NO: 152157 - DNA, 717 bp, Homo sapiens
  Payload ID: 9944
  Gene Symbol: MED15
  Gene Name: mediator complex subunit 15
  ENST ID: ENST00000414658
  CDS Start-End: 294-717
actgcggacggcttccgggtttgggcctggctctgtgactgaggcggcggcggtggcggccaagcgggatacgggcggcgggagctggggaacaggcatggacgtttccgggcaagagaccgactggcggagcaccgccttccggcagaagctggtcagtcaaatggtctcactctgtcactcaggctgaagtgcagtggcgtgattgtggctcactgcaacctccacctcctgggctcaagcgatcctcccacgtcagcctcccaagtagctgggaccacagcgaggatgccatgaggaaagctggtgtggcacacagtaaatccagcaaggatatggagagccatgttttcctgaaggccaagacccgggacgaatacctttctctcgtggccaggctcattatccattttcgagacattcataacaagaaatctcaagcttccgtcagtgatcctatgaatgcactccagagcctgactggcggacctgctgcgggagccgctggaattggcatgcctcctcggggcccgggacagtctctgggcgggatgggtagccttggtgccatgggacagccaatgtctctctcagggcagccgcctcctgggacctcggggatggcccctcacagcatggctgtcgtgtctacggcaactccacagacccagctgcagctccagcaggtggcgctgcagcagcagcagcaacagcagc

SEQ ID NO: 152158 - DNA, 589 bp, Homo sapiens
  Payload ID: 9944
  Gene Symbol: MED15
  Gene Name: mediator complex subunit 15
  ENST ID: ENST00000424287
  CDS Start-End: 93-589
gttattggccagcctagctgagcactgacggctctcttccgagaggcggattccagaggaggccgagcaagcgtctgaatctgccttgcaggatgggcttcagctcggacgaatacctttctctcgtggccaggctcattatccattttcgagacattcataacaagaaatctcaagcttccgtcagtgatcctatgaatgcactccagagcctgactggcggacctgctgcgggagccgctggaattggcatgcctcctcggggcccgggacagtctctgggcgggatgggtagccttggtgccatgggacagccaatgtctctctcagggcagccgcctcctgggacctcggggatggcccctcacagcatggctgtcgtgtctacggcaactccacagacccagctgcagctccagcaggtggcgctgcagcagcagcagcaacagcagcagttccagcagcagcagcaggcggcgctacagcagcagcagcagcagcagcaacagcagcagttccaggctcagcagagtgccatgcagcagcagttccaagcagtagtgcagcagcagcagcagctccagcagca

SEQ ID NO: 152159 - DNA, 590 bp, Homo sapiens
  Payload ID: 9944
  Gene Symbol: MED15
  Gene Name: mediator complex subunit 15
  ENST ID: ENST00000445987
  CDS Start-End: 231-590
agacgtaggcccgggggttcccggcctggccgggtagcagcgcgggggcggccctggggcggggagacagggggcggctccactccggcgctctgcggaggacagcagcgatcgccaaggctcactctatgatcagaagatggcataagtggggctgggcacagtggctcagtgcccagctgggattacgcctgtaataccagcactttgggaggccaagcgaggatgccatgaggaaagctggtgtggcacacagtaaatccagcaaggatatggagagccatgttttcctgaaggccaagacccgggacgaatacctttctctcgtggccaggctcattatccattttcgagacattcataacaagaaatctcaagcttccgtcagtgatcctatgaatgcactccagagcctgactggcggacctgctgcgggagccgctggaattggcatgcctcctcggggcccgggacagtctctgggcgggatgggtagccttggtgccatgggacagccaatgtctctctcagggcagccgcctcctgggacctcggggatggcccctcacagcatggctgtcgtgtctacg

SEQ ID NO: 152160 - DNA, 418 bp, Homo sapiens
  Payload ID: 9944
  Gene Symbol: MED15
  Gene Name: mediator complex subunit 15
  ENST ID: ENST00000451058
  CDS Start-End: 103-418
gggcactggggcagtaaattggttgcaggattggaagaagtccaaggacagtgtgggatgccaccctgtagctgtctagagacctagtgaagcgaggatgccatgaggaaagctggtgtggcacacagtaaatccagcaaggatatggagagccatgttttcctgaaggccaagacccgggacgaatacctttctctcgtggccaggctcattatccattttcgagacattcataacaagaaatctcaagcttccgtcagtgatcctatgaatgcactccagagcctgactggcggacctgctgcgggagccgctggaattggcatgcctcctcggggcccgggacagtctctgggcgggatgggtagccttggtgccatgggacagccaatgtctctctcagggcagccgcctcctg

SEQ ID NO: 152161 - DNA, 598 bp, Homo sapiens
  Payload ID: 9944
  Gene Symbol: MED15
  Gene Name: mediator complex subunit 15
  ENST ID: ENST00000432052
  CDS Start-End: 282-598
ttccgggtttgggcctggctctgtgactgaggcggcggcggtggcggccaagcgggatacgggcggcgggagctggggaacaggcatggacgtttccgggcaagagaccgactggcggagcaccgccttccggcagaagctggtcagtcaaatggtctcactctgtcactcaggctgaagtgcagtggcgtgattgtggctcactgcaacctccacctcctgggctcaagcgatcctcccacgtcagcctcccaagtagctgggaccacagcgaggatgccatgaggaaagctggtgtggcacacagtaaatccagcaaggatatggagagccatgttttcctgaaggccaagacccgggacgaatacctttctctcgtggccaggctcattatccattttcgagacattcataacaagaaatctcaagcttccgtcagtgcccagctgcagctccagcaggtggcgctgcagcagcagcagcaacagcagcagttccagcagcagcagcaggcggcgctacagcagcagcagcagcagcagcaacagcagcagttccaggctcagcagagtgccatgcagcagcagttccaagcagt

SEQ ID NO: 152162 - DNA, 581 bp, Homo sapiens
  Payload ID: 9944
  Gene Symbol: MED15
  Gene Name: mediator complex subunit 15
  ENST ID: ENST00000423862
  CDS Start-End: 1-581
attccagaggaggccgagcaagcgtctgaatctgccttgcaggatgggcttcagctcggacgaatacctttctctcgtggccaggctcattatccattttcgagacattcataacaagaaatctcaagcttccgtcagtgatcctatgaatgcactccagagcctgactggcggacctgctgcgggagccgctggaattgggcagccgcctcctgggacctcggggatggcccctcacagcatggctgtcgtgtctacggcaactccacagacccagctgcagctccagcaggtggcgctgcagcagcagcagcaacagcagcagttccagcagcagcagcaggcggcgctacagcagcagcagcagcagcagcaacagcagcagttccaggctcagcagagtgccatgcagcagcagttccaagcagtagtgcagcagcagcagcagctccagcagcagcagcagcagcagcagcatctaattaaattgcatcatcaaaatcagcaacagatacagcagcagcaacagcagctgcagcgaatagcacagctgcagctccaacaacagcaacagcagcagc

SEQ ID NO: 152163 - DNA, 551 bp, Homo sapiens
  Payload ID: 9944
  Gene Symbol: MED15
  Gene Name: mediator complex subunit 15
  ENST ID: ENST00000444094
  CDS Start-End: 139-303
atttcccacaagccctccttcacttccggctcggccgaggcactgcggacggcttccgggtttgggcctggctctgtgactgaggcggcggcggtggcggccaagcgggatacgggcggcgggagctggggaacaggcatggacgtttccgggcaagagaccgactggcggagcaccgccttccggcagaagctggtcagtcaaatcgaggatgccatgaggaaagctggtgtggcacacagtaaatccagcaaggatatggagagccatgttttcctgaaggccaagacccggatcctatgaatgcactccagagcctgactggcggacctgctgcgggagccgctggaattggcatgcctcctcggggcccgggacagtctctgggcgggatgggtagccttggtgccatgggacagccaatgtctctctcagggcagccgcctcctgggacctcggggatggcccctcacagcatggctgtcgtgtctacggcaactccacagacccagctgcagctccagcaggtggcgctgcagcagcagcagcaa

SEQ ID NO: 152164 - DNA, 573 bp, Homo sapiens
  Payload ID: 9944
  Gene Symbol: MED15
  Gene Name: mediator complex subunit 15
  ENST ID: ENST00000438962
  CDS Start-End: 217-573
gaatagggaaagggagagaagcagccggctgtagtgggtttagcagggctgggtgcttcatggtttctcttccagaaaagcgcatcaacggtgaaagaaagtgatgggaggagggtggatgtaagatgagattgggaaggtagttgtttggggtgtgggcggtgggacggaggatctgagggtgaccccccgaaggaatgtggactttgccgaaggatggcaggaagccgctgtcaggaagcgatcgtcgtttctggaggagagcgtgaagagctggggtcagtggccccgctcagaggaactctagcccctcaccaccgactgcttgtttctgttagcagtttttttcatgcgcgtccgtgtgaagagaccaccaaacaggctttgtggtctcactctgtcactcaggctgaagtgcagtggcgtgattgtggctcactgcaacctccacctcctgggctcaagcgatcctcccacgtcagcctcccaagtagctgggaccacagcgaggatgccatgaggaaagctggtgtggcacacagtaaatccagcaaggatatggagagccatgtt

SEQ ID NO: 152165 - DNA, 572 bp, Homo sapiens
  Payload ID: 9944
  Gene Symbol: MED15
  Gene Name: mediator complex subunit 15
  ENST ID: ENST00000428629
  CDS Start-End: 327-572
aatgaaagcccttctttacagatagtgcaaagacacagcggcccacccacggctgcctctgacaggccttgtgccctcaggccagcgcctcatcacccccaacctgcctgtcccctttgtgatgaagagagggcactcaagatggctcccagctctctcagctgagtgcctttccatcaggggagaggagtggccgttggaggctctctgtccccttcttgtttctttgtgcctgttattggccagcctagctgagcactgacggctctcttccgagaggcggattccagaggaggccgagcaagcgtctgaatctgccttgcaggatgggcttcagctcggacgaatacctttctctcgtggccaggctcattatccattttcgagacattcataacaagaaatctcaagcttccgtcagtgcccagctgcagctccagcaggtggcgctgcagcagcagcagcaacagcagcagttccagcagcagcagcaggcggcgctacagcagcagcagcagcagcagcaacagcagcagttccaggctcagcagagtgccatgcagcagcagttc

SEQ ID NO: 152166 - DNA, 840 bp, Homo sapiens
  Payload ID: 9944
  Gene Symbol: MED15
  Gene Name: mediator complex subunit 15
  ENST ID: ENST00000441501
  CDS Start-End: 226-411
aaccacactgaatagggaaagggagagaagcagccggctgtagtgggtttagcagggctgggtgcttcatggtttctcttccagaaaagcgcatcaacggtgaaagaaagtgatgggaggagggtggatgtaagatgagattgggaaggtagttgtttggggtgtgggcggtgggacggaggatctgagggtgaccccccgaaggaatgtggactttgccgaaggatggcaggaagccgctgtcaggaagcgatcgtcgtttctggaggagagcgtgaagagctggggtcagtggccccgctcagaggaactctagcccctcaccaccgactgcttgtttctgttagcagtttttttcatgcgcgtccgtgtgaagagaccaccaaacaggctttgtcgaggatgccatgaggaaagctggtgtggcacacagtaaatccagcaaggatatggagagccatgttttcctgaaggccaagacccgggacgaatacctttctctcgtggccaggctcattatccattttcgagacattcataacaagaaatctcaagcttccgtcagtgatcctatgaatgcactccagagcctgactggcggacctgctgcgggagccgctggaattggcatgcctcctcggggcccgggacagtctctgggcgggatgggtagccttggtgccatgggacagccaatgtctctctcagggcagccgcctcctgggacctcggggatggcccctcacagcatggctgtcgtgtctacggcaactccacagacccagctgcagctccagcaggtggcgctgcagcagcagcagcaacagcagcagttccagc

SEQ ID NO: 152167 - DNA, 623 bp, Homo sapiens
  Payload ID: 9944
  Gene Symbol: MED15
  Gene Name: mediator complex subunit 15
  ENST ID: ENST00000457322
  CDS Start-End: 142-623
agcaacaggctgggctgagaaatgaaagcccttctttacagatagtgcaaagacacagcggcccacccacggctgcctctgacaggccttgtgccctcaggccagcgcctcatcacccccaacctgcctgtcccctttgtgatgaagagagggcactcaagatggctcccagctctctcagacgaatacctttctctcgtggccaggctcattatccattttcgagacattcataacaagaaatctcaagcttccgtcagtgatcctatgaatgcactccagagcctgactggcggacctgctgcgggagccgctggaattggcatgcctcctcggggcccgggacagtctctgggcgggatgggtagccttggtgccatgggacagccaatgtctctctcagggcagccgcctcctgggacctcggggatggcccctcacagcatggctgtcgtgtctacggcaactccacagacccagctgcagctccagcaggtggcgctgcagcagcagcagcaacagcagcagttccagcagcagcagcaggcggcgctacagcagcagcagcagcagcagcaacagcagcagttccaggctcagcagagtgccatgcagcagcagtt

SEQ ID NO: 152168 - DNA, 430 bp, Homo sapiens
  Payload ID: 9944
  Gene Symbol: MED15
  Gene Name: mediator complex subunit 15
  ENST ID: ENST00000420849
  CDS Start-End: 21-131
gtctgaatctgccttgcaggatgggcttcagctcggacgaatacctttctctcgtggccaggctcattatccattttcgagacattcggacagtggcctggctggtgcacacagtcctgtggggctcatgaggtcatgggaagcagccgagcaggaggctcagggccccatgactgctacagaagttctccgctgggcactggggtcagctggactggcttccagctggccgtggacagcctcagtttcctcatctagataacaagaaatctcaagcttccgtcagtgatcctatgaatgcactccagagcctgactggcggacctgctgcgggagccgctggaattggcatgcctcctcggggcccgggacagtctctgggcgggatgggtagccttggtgccatgggacagccaatgtctctctcagg

SEQ ID NO: 152169 - DNA, 1199 bp, Homo sapiens
  Payload ID: 9945
  Gene Symbol: MED16
  Gene Name: mediator complex subunit 16
  ENST ID: ENST00000269814
  CDS Start-End: 134-790
ggccccacgcctcaggcgactggttgttaccgaggaagatggcggcgccagacccgaggcgctagggaagatcgcaccgcggacgcccgctgagcttggcgcacgggccgaccaggagctggtgactgccctcatgtgtgatttgcggcggccagcggcaggtgggatgatggacttggcctacgtctgtgagtgggagaaatggtccaagagcacccactgcccatcggtgcccctggcctgcgcctggtcctgccgaaatctcatcgccttcaccatggacctgcgcagcgatgaccaggacctgacccgcatgatccacatcctggacacggagcacccctgggacctgcactcgatcccctcagagcaccacgaggccatcacctgcctggagtgggaccagtcaggctcccggctcctgtcagcagatgccgacgggcagatcaagtgctggagcatggcggaccacctggctaatagctgggagagctcagtgggcagcctagtggagggggaccccattgtggccctgtcctggctgcacaatggtgtgaaactggccctgcacgtggagaagtcgggcgcctccagcttcggggagaagttctcccgagtcaagttctcaccgtcgcccacggaggaatgcaaggcctgcaccaggtgcggctgtgtcaccatgctcaagtcgcccaacagaaccacggcggtgaagcagtgggagcagcgctggatcaagaactgcctgtgcggtgggctctggtggcgggtgcccctcagctacccctgagcccagctgcccctcagctactcctcagctacccctcagctgcccctgagcccggctgctgcaagagccaccgctcgccctggactctcctcggcgcggttaacctcagcccgccctgcagggctgttgaaggccgtgggccggacgcctgcgtgaccagcagagcttctgaggaagcccctgcctttgtccagctgggcccgcagtccacacaccactctcccaggacccccagatccctggaccatctgcatccagaggaccgtccgtgacggccgggggtccaggcggaccttgtggtgacccggctcgggcgtctcctcggtttccttgcctcacccgcggagagcgctgaacctggacaagcagcggctgggaaggacaggtccaataaacgccctctgcgccc

SEQ ID NO: 152170 - DNA, 3229 bp, Homo sapiens
  Payload ID: 9945
  Gene Symbol: MED16
  Gene Name: mediator complex subunit 16
  Uniprot ID: Q9Y2X0
  ENST ID: ENST00000312090
  CDS Start-End: 127-2709
cgcctcaggcgactggttgttaccgaggaagatggcggcgccagacccgaggcgctagggaagatcgcaccgcggacgcccgctgagcttggcgcacgggccgaccaggagctggtgactgccctcatgtgtgatttgcggcggccagcggcaggtgggatgatggacttggcctacgtctgtgagtgggagaaatggtccaagagcacccactgcccatcggtgcccctggcctgcgcctggtcctgccgaaatctcatcgccttcaccatggacctgcgcagcgatgaccaggacctgacccgcatgatccacatcctggacacggagcacccctgggacctgcactcgatcccctcagagcaccacgaggccatcacctgcctggagtgggaccagtcaggctcccggctcctgtcagcagatgccgacgggcagatcaagtgctggagcatggcggaccacctggctaatagctgggagagctcagtgggcagcctagtggagggggaccccattgtggccctgtcctggctgcacaatggtgtgaaactggccctgcacgtggagaagtcgggcgcctccagcttcggggagaagttctcccgagtcaagttctcaccgtcgctcacgctgttcggcggcaagcccatggagggctggatcgcggtgacggtcagcggcctggtcaccgtgtccctgctgaagcccagcgggcaggtgctgacgtccaccgagagcctgtgccggctgcgcggccgcgtggccctggccgacatcgccttcaccggcggcggcaacatcgtggtggccacggcggacggcagcagcgcgtcgcccgtgcagttctacaaggtgtgcgtgagcgtggtgagcgagaagtgccgtatcgacacggagatcctgccctccctgttcatgcgctgcaccaccgacctcaaccgcaaggacaagtttcccgccatcacccacctcaagttcctggcccgggacatgtcggagcaggtgcttttgtgcgcgtccagccagaccagcagcatcgtggagtgctggtccctgcgcaaggagggactccccgtgaacaacatcttccagcagatctcccccgtggttggcgacaaacagcccacaattctcaaatggcggatcctatcggccaccaacgatctggaccgtgtgtcggccgtggcgctgcccaagctgcccatctcgctcaccaacaccgacctcaaggtggccagcgacacacagttctaccctggcctcgggctggccctggccttccacgacggcagcgtccacatcgtgcaccggctctcactgcagaccatggccgtcttctacagctccgcggccccgaggcctgtggatgagccggccatgaagcgcccccgcaccgcgggccccgccgtccacttaaaggctatgcagctatcgtggacgtcactggccctggtggggattgacagccacgggaagctgagcgtgctccgcctctcaccttccatgggccacccgctggaggtggggctggcgctgcggcacctgctcttcctgctggagtactgcatggtgaccggctacgactggtgggacatcctgctgcacgtgcagcccagtatggtacagagcctggtggagaagctgcacgaggagtacacgcgccagaccgctgccctgcagcaggtcctctccacccggatcctggccatgaaggcctcgctctgcaagctgtcgccctgcacggtgacccgcgtgtgcgactaccacaccaagctcttcctcatcgccatcagctccaccctgaagtcgctgctgcgcccccactttctcaacacgcctgacaagagccccggcgaccggctgaccgagatctgcaccaagatcaccgacgtcgacattgacaaggtcatgatcaacctcaagacggaggaatttgtgctggacatgaacacactgcaggcgctgcagcagctcttgcagtgggtgggcgacttcgtgctgtacctgctggccagcctacccaaccagggttccctgctgaggccgggccacagctttctgcgggacggcacctcgctgggcatgcttcgggaattgatggtggtcatccgcatctggggccttctgaagcccagctgcctgcccgtgtatacggccacctcggatacccaggacagcatgtccctgctcttccgcctgctcaccaagctctggatctgctttcctagcacaggtccatgctctgtgtgggtgcttttgggatggcagccacttccaggtcgcgatgagggcccagcgagcgagccggacgaggcgctggtggatgaatgctgcctgctgcccagccagctgcttatccccagcctggactggctgccagccagcgacggcctggttagccgcctgcagcccaagcagccccttcgtctgcagtttggccgggcgcccacgctgcctggcagtgctgccaccctgcagctcgacggcctcgccagggccccaggccagcccaagatcgaccacctgcggaggctgcaccttggcgcttgccccacggaggaatgcaaggcctgcaccaggtgcggctgtgtcaccatgctcaagtcgcccaacagaaccacggcggtgaagcagtgggagcagcgctggatcaagaactgcctgtgcggtgggctctggtggcgggtgcccctcagctacccctgagcccagctgcccctcagctactcctcagctacccctcagctgcccctgagcccggctgctgcaagagccaccgctcgccctggactctcctcggcgcggttaacctcagcccgccctgcagggctgttgaaggccgtgggccggacgcctgcgtgaccagcagagcttctgaggaagcccctgcctttgtccagctgggcccgcagtccacacaccactctcccaggacccccagatccctggaccatctgcatccagaggaccgtccgtgacggccgggggtccaggcggaccttgtggtgacccggctcgggcgtctcctcggtttccttgcctcacccgcggagagcgctgaacctggacaagcagcggctgggaaggacaggtccaataaacgccctctgcgcccaggcccgcgtccctgccgtcggtgcccccgaccccacccacgacctcgatttggtgccgggagcctgtgtcctcttggcctgtctttaaatccttcagcatttatggggca

SEQ ID NO: 152171 - DNA, 2922 bp, Homo sapiens
  Payload ID: 9945
  Gene Symbol: MED16
  Gene Name: mediator complex subunit 16
  Uniprot ID: Q9Y2X0
  ENST ID: ENST00000325464
  CDS Start-End: 152-2785
cagaagtctttgggaggcggccccacgcctcaggcgactggttgttaccgaggaagatggcggcgccagacccgaggcgctagggaagatcgcaccgcggacgcccgctgagcttggcgcacgggccgaccaggagctggtgactgccctcatgtgtgatttgcggcggccagcggcaggtgggatgatggacttggcctacgtctgtgagtgggagaaatggtccaagagcacccactgcccatcggtgcccctggcctgcgcctggtcctgccgaaatctcatcgccttcaccatggacctgcgcagcgatgaccaggacctgacccgcatgatccacatcctggacacggagcacccctgggacctgcactcgatcccctcagagcaccacgaggccatcacctgcctggagtgggaccagtcaggctcccggctcctgtcagcagatgccgacgggcagatcaagtgctggagcatggcggaccacctggctaatagctgggagagctcagtgggcagcctagtggagggggaccccattgtggccctgtcctggctgcacaatggtgtgaaactggccctgcacgtggagaagtcgggcgcctccagcttcggggagaagttctcccgagtcaagttctcaccgtcgctcacgctgttcggcggcaagcccatggagggctggatcgcggtgacggtcagcggcctggtcaccgtgtccctgctgaagcccagcgggcaggtgctgacgtccaccgagagcctgtgccggctgcgcggccgcgtggccctggccgacatcgccttcaccggcggcggcaacatcgtggtggccacggcggacggcagcagcgcgtcgcccgtgcagttctacaaggtgtgcgtgagcgtggtgagcgagaagtgccgtatcgacacggagatcctgccctccctgttcatgcgctgcaccaccgacctcaaccgcaaggacaagtttcccgccatcacccacctcaagttcctggcccgggacatgtcggagcaggtgcttttgtgcgcgtccagccagaccagcagcatcgtggagtgctggtccctgcgcaaggagggactccccgtgaacaacatcttccagcagatctcccccgtggttggcgacaaacagcccacaattctcaaatggcggatcctatcggccaccaacgatctggaccgtgtgtcggccgtggcgctgcccaagctgcccatctcgctcaccaacaccgacctcaaggtggccagcgacacacagttctaccctggcctcgggctggccctggccttccacgacggcagcgtccacatcgtgcaccggctctcactgcagaccatggccgtcttctacagctccgcggccccgaggcctgtggatgagccggccatgaagcgcccccgcaccgcgggccccgccgtccacttaaaggctatgcagctatcgtggacgtcactggccctggtggggattgacagccacgggaagctgagcgtgctccgcctctcaccttccatgggccacccgctggaggtggggctggcgctgcggcacctgctcttcctgctggagtactgcatggtgaccggctacgactggtgggacatcctgctgcacgtgcagcccagtatggtacagagcctggtggagaagctgcacgaggagtacacgcgccagaccgctgccctgcagcaggtcctctccacccggatcctggccatgaaggcctcgctctgcaagctgtcgccctgcacggtgacccgcgtgtgcgactaccacaccaagctcttcctcatcgccatcagctccaccctgaagtcgctgctgcgcccccactttctcaacacgcctgacaagagccccggcgaccggctgaccgagatctgcaccaagatcaccgacgtcgacattgacaaggtcatgatcaacctcaagacggaggaatttgtgctggacatgaacacactgcaggcgctgcagcagctcttgcagtgggtgggcgacttcgtgctgtacctgctggccagcctacccaaccagggttccctgctgaggccgggccacagctttctgcgggacggcacctcgctgggcatgcttcgggaattgatggtggtcatccgcatctggggccttctgaagcccagctgcctgcccgtgtatacggccacctcggatacccaggacagcatgtccctgctcttccgcctgctcaccaagctctggatctgctgtcgcgatgagggcccagcgagcgagccggacgaggcgctggtggatgaatgctgcctgctgcccagccagctgcttatccccagcctggactggctgccagccagcgacggcctggttagccgcctgcagcccaagcagccccttcgtctgcagtttggccgggcgcccacgctgcctggcagtgctgccaccctgcagctcgacggcctcgccagggccccaggccagcccaagatcgaccacctgcggaggctgcaccttggcgcttgccccacggaggaatgcaaggcctgcaccaggtgcggctgtgtcaccatgctcaagtcgcccaacagaaccacggcggtgaagcagtgggagcagcgctggatcaagaactgcctggctgttgaaggccgtgggccggacgcctgcgtgaccagcagagcttctgaggaagcccctgcctttgtccagctgggcccgcagtccacacaccactctcccaggacccccagatccctggaccatctgcatccagaggaccgtccgtgacggccgggggtccaggcggaccttgtggtgacccggctcgggcgtctcctcggtttccttgcctcacccgcggagagcgctgaacctggacaagcagcggctgggaaggacaggtccaataaacgccctctgcgccc

SEQ ID NO: 152172 - DNA, 3420 bp, Homo sapiens
  Payload ID: 9945
  Gene Symbol: MED16
  Gene Name: mediator complex subunit 16
  Uniprot ID: Q9Y2X0
  ENST ID: ENST00000395808
  CDS Start-End: 152-2677
cagaagtctttgggaggcggccccacgcctcaggcgactggttgttaccgaggaagatggcggcgccagacccgaggcgctagggaagatcgcaccgcggacgcccgctgagcttggcgcacgggccgaccaggagctggtgactgccctcatgtgtgatttgcggcggccagcggcaggtgggatgatggacttggcctacgtctgtgagtgggagaaatggtccaagagcacccactgcccatcggtgcccctggcctgcgcctggtcctgccgaaatctcatcgccttcaccatggacctgcgcagcgatgaccaggacctgacccgcatgatccacatcctggacacggagcacccctgggacctgcactcgatcccctcagagcaccacgaggccatcacctgcctggagtgggaccagtcaggctcccggctcctgtcagcagatgccgacgggcagatcaagtgctggagcatggcggaccacctggctaatagctgggagagctcagtgggcagcctagtggagggggaccccattgtggccctgtcctggctgcacaatggtgtgaaactggccctgcacgtggagaagtcgggcgcctccagcttcggggagaagttctcccgagtcaagttctcaccgtcgctcacgctgttcggcggcaagcccatggagggctggatcgcggtgacggtcagcggcctggtcaccgtgtccctgctgaagcccagcgggcaggtgctgacgtccaccgagagcctgtgccggctgcgcggccgcgtggccctggccgacatcgccttcaccggcggcggcaacatcgtggtggccacggcggacggcagcagcgcgtcgcccgtgcagttctacaaggtgtgcgtgagcgtggtgagcgagaagtgccgtatcgacacggagatcctgccctccctgttcatgcgctgcaccaccgacctcaaccgcaaggacaagtttcccgccatcacccacctcaagttcctggcccgggacatgtcggagcaggtgcttttgtgcgcgtccagccagaccagcagcatcgtggagtgctggtccctgcgcaaggagggactccccgtgaacaacatcttccagcagatctcccccgtggttggcgacaaacagcccacaattctcaaatggcggatcctatcggccaccaacgatctggaccgtgtgtcggccgtggcgctgcccaagctgcccatctcgctcaccaacaccgacctcaaggtggccagcgacacacagttctaccctggcctcgggctggccctggccttccacgacggcagcgtccacatcgtgcaccggctctcactgcagaccatggccgtcttctacagctccgcggccccgaggcctgtggatgagccggccatgaagcgcccccgcaccgcgggccccgccgtccacttaaaggctatgcagctatcgtggacgtcactggccctggtggggattgacagccacgggaagctgagcgtgctccgcctctcaccttccatgggccacccgctggaggtggggctggcgctgcggcacctgctcttcctgctggagtactgcatggtgaccggctacgactggtgggacatcctgctgcacgtgcagcccagtatggtacagagcctggtggagaagctgcacgaggagtacacgcgccagaccgctgccctgcagcaggtcctctccacccggatcctggccatgaaggcctcgctctgcaagctgtcgccctgcacggtgacccgcgtgtgcgactaccacaccaagctcttcctcatcgccatcagctccaccctgaagtcgctgctgcgcccccactttctcaacacgcctgacaagagccccggcgaccggctgaccgagatctgcaccaagatcaccgacgtcgacattgacaaggtcatgatcaacctcaagacggaggaatttgtgctggacatgaacacactgcaggcgctgcagcagctcttgcagtgggtgggcgacttcgtgctgtacctgctggccagcctacccaaccagggttccctgctgaggccgggccacagctttctgcgggacggcacctcgctgggcatgcttcgggaattgatggtggtcatccgcatctggggccttctgaagcccagctgcctgcccgtgtatacggccacctcggatacccaggacagcatgtccctgctcttccgcctgctcaccaagctctggatctgctgtcgcgatgagggcccagcgagcgagccggacgaggcgctggtggatgaatgctgcctgctgcccagccagctgcttatccccagcctggactggctgccagccagcgacggcctggttagccgcctgcagcccaagcagccccttcgtctgcagtttggccgggcgcccacgctgcctggcagtgctgccaccctgcagctcgacggcctcgccagggccccaggccagcccaagatcgaccacctgcggaggctgcaccttggcgcttgccccacggaggaatgcaaggcctgcaccaggtgcggctgtgtcaccatgctcaagtcgcccaacagaaccacggcggtgaagcagtgggagcagcgctggatcaagaactgcctgtgcggtgggctctggtggcgggtgcccctcagctacccctgagcccagctgcccctcagctactcctcagctacccctcagctgcccctgagcccggctgctgcaagagccaccgctcgccctggactctcctcggcgcggttaacctcagcccgccctgcagggctgttgaaggccgtgggccggacgcctgcgtgaccagcagagcttctgaggaagcccctgcctttgtccagctgggcccgcagtccacacaccactctcccaggacccccagatccctggaccatctgcatccagaggaccgtccgtgacggccgggggtccaggcggaccttgtggtgacccggctcgggcgtctcctcggtttccttgcctcacccgcggagagcgctgaacctggacaagcagcggctgggaaggacaggtccaataaacgccctctgcgcccaggcccgcgtccctgccgtcggtgcccccgaccccacccacgacctcgatttggtgccgggagcctgtgtcctcttggcctgtctttaaatccttcagcatttatggggcacctagtggatgccgagtctgggggtatccaaagtgagcagtggggacaggacacagcaggccggtggatgggatggggcggccatcgtcagggtggcttctgtccaggcatctgcctttcagtgtgttgtctgcctgtctctatactgtctctgcgtgctctccttgtttctgcgtgtctctggtatctctgcacttctctgtgtatggtctctgtgtctctg

SEQ ID NO: 152173 - DNA, 2772 bp, Homo sapiens
  Payload ID: 9945
  Gene Symbol: MED16
  Gene Name: mediator complex subunit 16
  Uniprot ID: Q9Y2X0
  ENST ID: ENST00000589119
  CDS Start-End: 1-2634
atgtgtgatttgcggcggccagcggcaggtgggatgatggacttggcctacgtctgtgagtgggagaaatggtccaagagcacccactgcccatcggtgcccctggcctgcgcctggtcctgccgaaatctcatcgccttcaccatggacctgcgcagcgatgaccaggacctgacccgcatgatccacatcctggacacggagcacccctgggacctgcactcgatcccctcagagcaccacgaggccatcacctgcctggagtgggaccagtcaggctcccggctcctgtcagcagatgccgacgggcagatcaagtgctggagcatggcggaccacctggctaatagctgggagagctcagtgggcagcctagtggagggggaccccattgtggccctgtcctggctgcacaatggtgtgaaactggccctgcacgtggagaagtcgggcgcctccagcttcggggagaagttctcccgagtcaagttctcaccgtcgctcacgctgttcggcggcaagcccatggagggctggatcgcggtgacggtcagcggcctggtcaccgtgtccctgctgaagcccagcgggcaggtgctgacgtccaccgagagcctgtgccggctgcgcggccgcgtggccctggccgacatcgccttcaccggcggcggcaacatcgtggtggccacggcggacggcagcagcgcgtcgcccgtgcagttctacaaggtgtgcgtgagcgtggtgagcgagaagtgccgtatcgacacggagatcctgccctccctgttcatgcgctgcaccaccgacctcaaccgcaaggacaagtttcccgccatcacccacctcaagttcctggcccgggacatgtcggagcaggtgcttttgtgcgcgtccagccagaccagcagcatcgtggagtgctggtccctgcgcaaggagggactccccgtgaacaacatcttccagcagatctcccccgtggttggcgacaaacagcccacaattctcaaatggcggatcctatcggccaccaacgatctggaccgtgtgtcggccgtggcgctgcccaagctgcccatctcgctcaccaacaccgacctcaaggtggccagcgacacacagttctaccctggcctcgggctggccctggccttccacgacggcagcgtccacatcgtgcaccggctctcactgcagaccatggccgtcttctacagctccgcggccccgaggcctgtggatgagccggccatgaagcgcccccgcaccgcgggccccgccgtccacttaaaggctatgcagctatcgtggacgtcactggccctggtggggattgacagccacgggaagctgagcgtgctccgcctctcaccttccatgggccacccgctggaggtggggctggcgctgcggcacctgctcttcctgctggagtactgcatggtgaccggctacgactggtgggacatcctgctgcacgtgcagcccagtatggtacagagcctggtggagaagctgcacgaggagtacacgcgccagaccgctgccctgcagcaggtcctctccacccggatcctggccatgaaggcctcgctctgcaagctgtcgccctgcacggtgacccgcgtgtgcgactaccacaccaagctcttcctcatcgccatcagctccaccctgaagtcgctgctgcgcccccactttctcaacacgcctgacaagagccccggcgaccggctgaccgagatctgcaccaagatcaccgacgtcgacattgacaaggtcatgatcaacctcaagacggaggaatttgtgctggacatgaacacactgcaggcgctgcagcagctcttgcagtgggtgggcgacttcgtgctgtacctgctggccagcctacccaaccagggttccctgctgaggccgggccacagctttctgcgggacggcacctcgctgggcatgcttcgggaattgatggtggtcatccgcatctggggccttctgaagcccagctgcctgcccgtgtatacggccacctcggatacccaggacagcatgtccctgctcttccgcctgctcaccaagctctggatctgctgtcgcgatgagggcccagcgagcgagccggacgaggcgctggtggatgaatgctgcctgctgcccagccagctgcttatccccagcctggactggctgccagccagcgacggcctggttagccgcctgcagcccaagcagccccttcgtctgcagtttggccgggcgcccacgctgcctggcagtgctgccaccctgcagctcgacggcctcgccagggccccaggccagcccaagatcgaccacctgcggaggctgcaccttggcgcttgccccacggaggaatgcaaggcctgcaccaggtgcggctgtgtcaccatgctcaagtcgcccaacagaaccacggcggtgaagcagtgggagcagcgctggatcaagaactgcctggctgttgaaggccgtgggccggacgcctgcgtgaccagcagagcttctgaggaagcccctgcctttgtccagctgggcccgcagtccacacaccactctcccaggacccccagatccctggaccatctgcatccagaggaccgtccgtgacggccgggggtccaggcggaccttgtggtgacccggctcgggcgtctcctcggtttccttgcctcacccgcggagagcgctgaacctggacaagcagcggctgggaaggacaggtccaataaacgccctctgcgccca

SEQ ID NO: 152174 - DNA, 1403 bp, Homo sapiens
  Payload ID: 9945
  Gene Symbol: MED16
  Gene Name: mediator complex subunit 16
  ENST ID: ENST00000586017
  CDS Start-End: 18-1403
agctggtgactgccctcatgtgtgatttgcggcggccagcggcaggtgggatgatggacttggcctacgtctgtgagtgggagaaatggtccaagagcacccactgcccatcggtgcccctggcctgcgcctggtcctgccgaaatctcatcgccttcaccatggacctgcgcagcgatgaccaggacctgacccgcatgatccacatcctggacacggagcacccctgggacctgcactcgatcccctcagagcaccacgaggccatcacctgcctggagtgggaccagtcaggctcccggctcctgtcagcagatgccgacgggcagatcaagtgctggagcatggcggaccacctggctaatagctgggagagctcagtgggcagcctagtggagggggaccccattgtggccctgtcctggctgcacaatggtgtgaaactggccctgcacgtggagaaggtgcttttgtgcgcgtccagccagaccagcagcatcgtggagtgctggtccctgcgcaaggagggactccccgtgaacaacatcttccagcagatctcccccgtggttggcgacaaacagcccacaattctcaaatggcggatcctatcggccaccaacgatctggaccgtgtgtcggccgtggcgctgcccaagctgcccatctcgctcaccaacaccgacctcaaggtggccagcgacacacagttctaccctggcctcgggctggccctggccttccacgacggcagcgtccacatcgtgcaccggctctcactgcagaccatggccgtcttctacagctccgcggccccgaggcctgtggatgagccggccatgaagcgcccccgcaccgcgggccccgccgtccacttaaaggctatgcagctatcgtggacgtcactggccctggtggggattgacagccacgggaagctgagcgtgctccgcctctcaccttccatgggccacccgctggaggtggggctggcgctgcggcacctgctcttcctgctggagtactgcatggtgaccggctacgactggtgggacatcctgctgcacgtgcagcccagtatggtacagagcctggtggagaagctgcacgaggagtacacgcgccagaccgctgccctgcagcaggtcctctccacccggatcctggccatgaaggcctcgctctgcaagctgtcgccctgcacggtgacccgcgtgtgcgactaccacaccaagctcttcctcatcgccatcagctccaccctgaagtcgctgctgcgcccccactttctcaacacgcctgacaagagccccggcgaccggctgaccgagatctgcaccaagatcaccgacgtcgacattgacaaggtcatgatcaacctcaagacggaggaatttgtgctg

SEQ ID NO: 152175 - DNA, 927 bp, Homo sapiens
  Payload ID: 9945
  Gene Symbol: MED16
  Gene Name: mediator complex subunit 16
  ENST ID: ENST00000592373
  CDS Start-End: 92-316
cggcgccagacccgaggcgctagggaagatcgcaccgcggacgcccgctgagcttggcgcacgggccgaccaggagctggtgactgccctcatgtgtgatttgcggcggccagcggcaggtgggatgatggacttggcctacgtctgtgagtgggagaaatggtccaagagcacccactgcccatcggtgcccctggcctgcgcctggtcctgccgaaatctcatcgccttcaccatggacctgcgcagcgatgaccagggcctgctctgttcctgcggggggacagcctgttccctgagctgtcgactcggctgacagcagttctgtgaccttcctggggtgggacacacaccggcttacctggagcctgcctggagtcatcgtcatcgtctgcaggctgtggtgccaggccgtgctgaccatgccccgtccccacagacctgacccgcatgatccacatcctggacacggagcacccctgggacctgcactcgatcccctcagagcaccacgaggccatcacctgcctggagtgggaccagtcagtcgggcgcctccagcttcggggagaagttctcccgagtcaagttctcaccgtcgctcacgctgttcggcggcaagcccatggagggctggatcgcggtgacggtcagcggcctggtcaccgtgtccctgctgaagcccagcgggcaggtgctgacgtccaccgagagcctgtgccggctgcgcggccgcgtggccctggccgacatcgccttcaccggcggcggcaacatcgtggtggccacggcggacggcagcagcgcgtcgcccgtgcagttctacaaggtgtgcgtgagcgtggtgagcgagaagtgccgtatcgacacggagatcctgccctccctgttcatgcgctgcaccaccgacctcaaccgcaaggacaa

SEQ ID NO: 152176 - DNA, 635 bp, Homo sapiens
  Payload ID: 9945
  Gene Symbol: MED16
  Gene Name: mediator complex subunit 16
  ENST ID: ENST00000586342
  CDS Start-End: 488-635
ggggcctaaggagagtttggggcgaggctgaaggcgcttggtgggacttcgggggcggggcctggagtgggtttggggtcgccggggtggagcctggggactggggggctgtagaggcagggcctggagactgcggggttatcggtgcggggcctggagagggaatagggtccctagggtggagactggggactgcggagttataggggtctggagagggtagggggtccctgggatggaccctggagattgggggttataggggcggggcctgaagaggctatggggtccctgggatgaagcctcgtatttgggggcaataggggaagggcctggagagtacgtggggtccccggggtggagtctggggactggggagttttaggggttgggcctggagagctaagggcgttggaggctggacctggagagtacatgggacccctacggtgaagcctgagaatttagggagctggtgactgccctcatgtgtgatttgcggcggccagcggcaggtgggatgatggacttggcctacgtctgtgagtgggagaaatggtccaagagcacccactgcccatcggtgcccctggcctgcgcctggtcctgccgaaatctcatcgccttcaccatgg

SEQ ID NO: 152177 - DNA, 1628 bp, Homo sapiens
  Payload ID: 9945
  Gene Symbol: MED16
  Gene Name: mediator complex subunit 16
  ENST ID: ENST00000592943
  CDS Start-End: 18-1628
agctggtgactgccctcatgtgtgatttgcggcggccagcggcaggtgggatgatggacttggcctacgtctgtgagtgggagaaatggtccaagagcacccactgcccatcggtgcccctggcctgcgcctggtcctgccgaaatctcatcgccttcaccatggacctgcgcagcgatgaccaggacctgacccgcatgatccacatcctggacacggagcacccctgggacctgcactcgatcccctcagagcaccacgaggccatcacctgcctggagtgggaccagtcaggctcccggctcctgtcagcagatgccgacgggcagatcaagtgctggagcatggcggaccacctggctaatagctgggagagctcagtgggcagcctagtggagggggaccccattgtggccctgtcctggctgcacaatggtgtgaaactggccctgcacgtggagaagtcgggcgcctccagcttcggggagaagttctcccgagtcaagttctcaccgtcgctcacgctgttcggcggcaagcccatggagggctggatcgcggtgacggtcagcggcctggtcaccgtgtccctgctgaagcccagcgggcaggtgctgacgtccaccgagagcctgtgccggctgcgcggccgcgtggccctggccgacatcgccttcaccggcggcggcaacatcgtggtggccacggcggacggcagcagcgcgtcgcccgtgcagttctacaaggtgtgcgtgagcgtggtgagcgagaagtgccgtatcgacacggagatcctgccctccctgttcatgcgctgcaccaccgacctcaaccgcaaggacaagtttcccgccatcacccacctcaagttcctggcccgggacatgtcggagcaggtgcttttgtgcgcgtccagccagaccagcagcatcgtggagtgctggtccctgcgcaaggagggactccccgtgaacaacatcttccagcagatctcccccgtggttggcgacaaacagcccacaattctcaaatggcggatcctatcggccaccaacgatctggaccgtgtgtcggccgtggcgctgcccaagctgcccatctcgctcaccaacaccgacctcaaggtggccagcgacacacagttctaccctggcctcgggctggccctggccttccacgacggcagcgtccacatcgtgcaccggctctcactgcagaccatggccgtcttctacagctccgcggccccgaggcctgtggatgagccggccatgaagcgcccccgcaccgcgggccccgccgtccacttaaaggctatgcagctatcgtggacgtcactggccctggtggggattgacagccacgggaaggtcctctccacccggatcctggccatgaaggcctcgctctgcaagctgtcgccctgcacggtgacccgcgtgtgcgactaccacaccaagctcttcctcatcgccatcagctccaccctgaagtcgctgctgcgcccccactttctcaacacgcctgacaagagccccggcgaccggctgaccgagatctgcaccaagatcaccgacgtcgacattgacaaggtcatgatcaacctcaagacggaggaatttgtgctg

SEQ ID NO: 152178 - DNA, 3181 bp, Homo sapiens
  Payload ID: 9945
  Gene Symbol: MED16
  Gene Name: mediator complex subunit 16
  ENST ID: ENST00000606248
  CDS Start-End: 150-2141
gaagtctttgggaggcggccccacgcctcaggcgactggttgttaccgaggaagatggcggcgccagacccgaggcgctagggaagatcgcaccgcggacgcccgctgagcttggcgcacgggccgaccaggagctggtgactgccctcatgtgtgatttgcggcggccagcggcaggtgggatgatggacttggcctacgtctgtgagtgggagaaatggtccaagagcacccactgcccatcggtgcccctggcctgcgcctggtcctgccgaaatctcatcgccttcaccatggacctgcgcagcgatgaccaggacctgacccgcatgatccacatcctggacacggagcacccctgggacctgcactcgatcccctcagagcaccacgaggccatcacctgcctggagtgggaccagtcaggctcccggctcctgtcagcagatgccgacgggcagatcaagtgctggagcatggcggaccacctggctaatagctgggagagctcagtgggcagcctagtggagggggaccccattgtggccctgtcctggctgcacaatggtgtgaaactggccctgcacgtggagaagtcgggcgcctccagcttcggggagaagttctcccgagtcaagttctcaccgtcgctcacgctgttcggcggcaagcccatggagggctggatcgcggtgacggtcagcggcctggtcaccgtgtccctgctgaagcccagcgggcaggtgctgacgtccaccgagagcctgtgccggctgcgcggccgcgtggccctggccgacatcgccttcaccggcggcggcaacatcgtggtggccacggcggacggcagcagcgcgtcgcccgtgcagttctacaaggtgtgcgtgagcgtggtgagcgagaagtgccgtatcgacacggagatcctgccctccctgttcatgcgctgcaccaccgacctcaaccgcaaggacaagtttcccgccatcacccacctcaagttcctggcccgggacatgtcggagcaggtgcttttgtgcgcgtccagccagaccagcagcatcgtggagtgctggtccctgcgcaaggagggactccccgtgaacaacatcttccagcagatctcccccgtggttggcgacaaacagcccacaattctcaaatggcggatcctatcggccaccaacgatctggaccgtgtgtcggccgtggcgctgcccaagctgcccatctcgctcaccaacaccgacctcaaggtggccagcgacacacagttctaccctggcctcgggctggccctggccttccacgacggcagcgtccacatcgtgcaccggctctcactgcagaccatggccgtcttctacagctccgcggccccgaggcctgtggatgagccggccatgaagcgcccccgcaccgcgggccccgccgtccacttaaaggctatgcagctatcgtggacgtcactggccctggtggggattgacagccacgggaagctgagcgtgctccgcctctcaccttccatgggccacccgctggaggtggggctggcgctgcggcacctgctcttcctgctggagtactgcatggtgaccggctacgactggtgggacatcctgctgcacgtgcagcccagtatggtacagagcctggtggagaagctgcacgaggagtacacgcgccagaccgctgccctgcagcaggtcctctccacccggatcctggccatgaaggcctcgctctgcaagctgtcgccctgcacggtgacccgcgtgtgcgactaccacaccaagctcttcctcatcgccatcagctccaccctgaagtcgctgctgcgcccccactttctcaacacgcctgacaagagccccggcgaccggctgaccgagatctgcaccaagatcaccgacgtcgacattgacaaggtcatgatcaacctcaagacggaggaatttgtgctggacatgaacacactgcaggcgctgcagcagctcttgcagtgggtgggcgacttcgtgctgtacctgctggccagcctacccaaccagccctcccccacctcggagccctcccccacctcggagccctgccccacctcggagccctcccccacctcggagccctcctctccatgaagcctctgctggttccctgctgaggccgggccacagctttctgcgggacggcacctcgctgggcatgcttcgggaattgatggtggtcatccgcatctggggccttctgaagcccagctgcctgcccgtgtatacggccacctcggatacccaggacagcatgtccctgctcttccgcctgctcaccaagctctggatctgctgtcgcgatgagggcccagcgagcgagccggacgaggcgctggtggatgaatgctgcctgctgcccagccagctgcttatccccagcctggactggctgccagccagcgacggcctggttagccgcctgcagcccaagcagccccttcgtctgcagtttggccgggcgcccacgctgcctggcagtgctgccaccctgcagctcgacggcctcgccagggccccaggccagcccaagatcgaccacctgcggaggctgcaccttggcgcttgccccacggaggaatgcaaggcctgcaccaggtgcggctgtgtcaccatgctcaagtcgcccaacagaaccacggcggtgaagcagtgggagcagcgctggatcaagaactgcctgtgcggtgggctctggtggcgggtgcccctcagctacccctgagcccagctgcccctcagctactcctcagctacccctcagctgcccctgagcccggctgctgcaagagccaccgctcgccctggactctcctcggcgcggttaacctcagcccgccctgcagggctgttgaaggccgtgggccggacgcctgcgtgaccagcagagcttctgaggaagcccctgcctttgtccagctgggcccgcagtccacacaccactctcccaggacccccagatccctggaccatctgcatccagaggaccgtccgtgacggccgggggtccaggcggaccttgtggtgacccggctcgggcgtctcctcggtttccttgcctcacccgcggagagcgctgaacctggacaagcagcggctgggaaggacaggtccaataaacgccctctgcgccc

SEQ ID NO: 152179 - DNA, 2004 bp, Homo sapiens
  Payload ID: 9945
  Gene Symbol: MED16
  Gene Name: mediator complex subunit 16
  ENST ID: ENST00000607471
  CDS Start-End: 1-1517
gcgtggtgagcgagaagtgccgtatcgacacggagatcctgccctccctgttcatgcgctgcaccaccgacctcaaccgcaaggacaagtttcccgccatcacccacctcaagttcctggcccgggacatgtcggagcaggtgcttttgtgcgcgtccagccagaccagcagcatcgtggagtgctggtccctgcgcaaggagggactccccgtgaacaacatcttccagcagatctcccccgtggttggcgacaaacagcccacaattctcaaatggcggatcctatcggccaccaacgatctggaccgtgtgtcggccgtggcgctgcccaagctgcccatctcgctcaccaacaccgacctcaaggtggccagcgacacacagttctaccctggcctcgggctggccctggccttccacgacggcagcgtccacatcgtgcaccggctctcactgcagaccatggccgtcttctacagctccgcggccccgaggcctgtggatgagccggccatgaagcgcccccgcaccgcgggccccgccgtccacttaaaggctatgcagctatcgtggacgtcactggccctggtggggattgacagccacgggaagctgagcgtgctccgcctctcaccttccatgggccacccgctggaggtggggctggcgctgcggcacctgctcttcctgctggagtactgcatggtgaccggctacgactggtgggacatcctgctgcacgtgcagcccagtatggtacagagcctggtggagaagctgcacgaggagtacacgcgccagaccgctgccctgcagcaggtcctctccacccggatcctggccatgaaggcctcgctctgcaagctgtcgccctgcacggtgacccgcgtgtgcgactaccacaccaagctcttcctcatcgccatcagctccaccctgaagtcgctgctgcgcccccactttctcaacacgcctgacaagagccccggcgaccggctgaccgagatctgcaccaagatcaccgacgtcgacattgacaaggtcatgatcaacctcaagacggaggaatttgtgctggacatgaacacactgcaggcgctgcagcagctcttgcagtgggtgggcgacttcgtgctgtacctgctggccagcctacccaaccaggtcgcgatgagggcccagcgagcgagccggacgaggcgctggtggatgaatgctgcctgctgcccagccagctgcttatccccagcctggactggctgccagccagcgacggcctggttagccgcctgcagcccaagcagccccttcgtctgcagtttggccgggcgcccacgctgcctggcagtgctgccaccctgcagctcgacggcctcgccagggccccaggccagcccaagatcgaccacctgcggaggctgcaccttggcgcttgccccacggaggaatgcaaggcctgcaccaggtgcggctgtgtcaccatgctcaagtcgcccaacagaaccacggcggtgaagcagtgggagcagcgctggatcaagaactgcctgtgcggtgggctctggtggcgggtgcccctcagctacccctgagcccagctgcccctcagctactcctcagctacccctcagctgcccctgagcccggctgctgcaagagccaccgctcgccctggactctcctcggcgcggttaacctcagcccgccctgcagggctgttgaaggccgtgggccggacgcctgcgtgaccagcagagcttctgaggaagcccctgcctttgtccagctgggcccgcagtccacacaccactctcccaggacccccagatccctggaccatctgcatccagaggaccgtccgtgacggccgggggtccaggcggaccttgtggtgacccggctcgggcgtctcctcggtttccttgcctcacccgcggagagcgctgaacctggacaagcagcggctgggaaggacaggtccaataaacgccctctgcgccca

SEQ ID NO: 152180 - DNA, 492 bp, Homo sapiens
  Payload ID: 9945
  Gene Symbol: MED16
  Gene Name: mediator complex subunit 16
  ENST ID: ENST00000621073
  CDS Start-End: 1-238
tgccaccctgcagctcgacggcctcgccagggccccaggccagcccaagatcgaccacctgcggaggctgcaccttggcgcttgccccacggaggaatgcaaggcctgcaccaggtgcggctgtgtcaccatgctcaagtcgcccaacagaaccacggcggtgaagcagtgggagcagcgctggatcaagaactgcctgtgcgggctgttgaaggccgtgggccggacgcctgcgtgaccagcagagcttctgaggaagcccctgcctttgtccagctgggcccgcagtccacacaccactctcccaggacccccagatccctggaccatctgcatccagaggaccgtccgtgacggccgggggtccaggcggaccttgtggtgacccggctcgggcgtctcctcggtttccttgcctcacccgcggagagcgctgaacctggacaagcagcggctgggaaggacaggtccaataaacgccctctgcgccca

SEQ ID NO: 152181 - DNA, 1078 bp, Homo sapiens
  Payload ID: 9945
  Gene Symbol: MED16
  Gene Name: mediator complex subunit 16
  ENST ID: ENST00000616387
  CDS Start-End: 18-677
agctggtgactgccctcatgtgtgatttgcggcggccagcggcaggtgggatgatggacttggcctacgtctgtgagtgggagaaatggtccaagagcacccactgcccatcggtgcccctggcctgcgcctggtcctgccgaaatctcatcgccttcaccatggacctgcgcagcgatgaccaggacctgacccgcatgatccacatcctggacacggagcacccctgggacctgcactcgatcccctcagagcaccacgaggccatcacctgcctggagtgggaccagtcaggctcccggctcctgtcagcagatgccgacgggcagatcaagtgctggagcatggcggaccacctggctaatagctgggagagctcagtgggcagcctagtggagggggaccccattgtggccctgtcctggctgcacaatggtgtgaaactggccctgcacgtggagaagtcgggcgcctccagcttcggggagaagttctcccgagtcaagttctcaccgtcgctcacgctgttcggcggcaagcccatggagggctggatcgcggtgacggtcagcggcctggtcaccgtgtccctgctgaagcccagcgggcaggtgctgacgtccaccgagagcctgtgcggtgggctctggtggcgggtgcccctcagctacccctgagcccagctgcccctcagctactcctcagctacccctcagctgcccctgagcccggctgctgcaagagccaccgctcgccctggactctcctcggcgcggttaacctcagcccgccctgcagggctgttgaaggccgtgggccggacgcctgcgtgaccagcagagcttctgaggaagcccctgcctttgtccagctgggcccgcagtccacacaccactctcccaggacccccagatccctggaccatctgcatccagaggaccgtccgtgacggccgggggtccaggcggaccttgtggtgacccggctcgggcgtctcctcggtttccttgcctcacccgcggagagcgctgaacctggacaagcagcggctgggaaggacaggtccaataaacgccct

SEQ ID NO: 152182 - DNA, 599 bp, Homo sapiens
  Payload ID: 9945
  Gene Symbol: MED16
  Gene Name: mediator complex subunit 16
  ENST ID: ENST00000606828
  CDS Start-End: 18-599
agctggtgactgccctcatgtgtgatttgcggcggccagcggcaggtgggatgatggacttggcctacgtctgtgagtgggagaaatggtccaagagcacccactgcccatcggtgcccctggcctgcgcctggtcctgccgaaatctcatcgccttcaccatggacctgcgcagcgatgaccaggacctgacccgcatgatccacatcctggacacggagcacccctgggacctgcactcgatcccctcagagcaccacgaggccatcacctgcctggagtgggaccagtcaggctcccggctcctgtcagcagatgccgacgggcagatcaagtgctggagcatggcggaccacctggctaatagctgggagagctcagtgggcagcctagtggagggggaccccattgtggccctgtcctggctgcacaatggtgtgaaactggccctgcacgtggagaagtcgctgctgcgcccccactttctcaacacgcctgacaagagccccggcgaccggctgaccgagatctgcaccaagatcaccgacgtcgacattgacaaggtcatgatcaacctcaagacggaggaatttgtgctg

SEQ ID NO: 152183 - DNA, 554 bp, Homo sapiens
  Payload ID: 9945
  Gene Symbol: MED16
  Gene Name: mediator complex subunit 16
  ENST ID: ENST00000617672
  CDS Start-End: 18-425
agctggtgactgccctcatgtgtgatttgcggctgtgtcaccatgctcaagtcgcccaacagaaccacggcggtgaagcagtgggagcagcgctggatcaagaactgcctgtgcggtgggctctggtggcgggtgcccctcagctacccctgagcccagctgcccctcagctactcctcagctacccctcagctgcccctgagcccggctgctgcaagagccaccgctcgccctggactctcctcggcgcggttaacctcagcccgccctgcagggctgttgaaggccgtgggccggacgcctgcgtgaccagcagagcttctgaggaagcccctgcctttgtccagctgggcccgcagtccacacaccactctcccaggacccccagatccctggaccatctgcatccagaggaccgtccgtgacggccgggggtccaggcggaccttgtggtgacccggctcgggcgtctcctcggtttccttgcctcacccgcggagagcgctgaacctggacaagcagcggctgggaaggacaggtccaataaacgccct

SEQ ID NO: 152184 - DNA, 1602 bp, Homo sapiens
  Payload ID: 9945
  Gene Symbol: MED16
  Gene Name: mediator complex subunit 16
  ENST ID: ENST00000633972
  CDS Start-End: 1-1115
ggctggccctggccttccacgacggcagcgtccacatcgtgcaccggctctcactgcagaccatggccgtcttctacagctccgcggccccgaggcctgtggatgagccggccatgaagcgcccccgcaccgcgggccccgccgtccacttaaaggctatgcagctatcgtggacgtcactggccctggtggggattgacagccacgggaagctgagcgtgctccgcctctcaccttccatgggccacccgctggaggtggggctggcgctgcggcacctgctcttcctgctggagtactgcatggtgaccggctacgactggtgggacatcctgctgcacgtgcagcccagtatggtacagagcctggtggagaagctgcacgaggagtacacgcgccagaccgctgccctgcagcaggtcctctccacccggatcctggccatgaaggcctcgctctgcaagctgtcgccctgcacggtgactcgcgtgtgcgactaccacaccaagctcttcctcatcgccatcagctccaccctgaagtcgctgctgcgcccccactttctcaacacgcctgacaagagccccggcgaccggctgaccgagatctgcaccaagatcaccgacgtcgacattgacaaggtcatgatcaacctcaagacggaggaatttgtgctggacatgaacacactgcaggcgctgcagcagctcttgcagtgggtgggcgacttcgtgctgtacctgctggccagcctacccaaccaggtcgcgatgagggcccagcgagcgagccggacgaggcgctggtggatgaatgctgcctgctgcccagccagctgcttatccccagcctggactggctgccagccagcgacggcctggtcagccgcctgcagcccaagcagccccttcgtctgcagtttggccgggcgcccacgctgcctggcagtgctgccaccctgcagctcgacggcctcgccagggccccaggccagcccaagatcgaccacctgcggaggctgcaccttggcgcttgccccacggaggaatgcaaggcctgcaccaggtgcggctgtgtcaccatgctcaagtcgcccaacagaaccacggcggtgaagcagtgggagcagcgctggatcaagaattgcctgtgcggtgggctctggtggcgggtgcccctcagctacccctgagcccagctgcccctcagctactcctcagctacccctcagctgctcctgagcccggctgctgcaagagccaccgctcgccctggactctcctcggcgcggttaacctcagcccgccctgcagggctgttgaaggccgtgggccggacgcctgcgtgaccagcagagcttctgaggaagcccctgcctttgtccagctgggcccgcagtccacacaccactctcccaggacccccagatccctggaccatctgcatccaaaggaccgtccgtgacggccgggggtccaggcggaccttgtggtgacccggctcgggcgtctcctcggtttccttgcctcacccacggagagcgctgaacctggacaagcagcggctgggaaggacaggtccaataaacgccctctgcgccca

SEQ ID NO: 152185 - DNA, 1631 bp, Homo sapiens
  Payload ID: 9945
  Gene Symbol: MED16
  Gene Name: mediator complex subunit 16
  ENST ID: ENST00000634212
  CDS Start-End: 1-1493
ggctggccctggccttccacgacggcagcgtccacatcgtgcaccggctctcactgcagaccatggccgtcttctacagctccgcggccccgaggcctgtggatgagccggccatgaagcgcccccgcaccgcgggccccgccgtccacttaaaggctatgcagctatcgtggacgtcactggccctggtggggattgacagccacgggaagctgagcgtgctccgcctctcaccttccatgggccacccgctggaggtggggctggcgctgcggcacctgctcttcctgctggagtactgcatggtgaccggctacgactggtgggacatcctgctgcacgtgcagcccagtatggtacagagcctggtggagaagctgcacgaggagtacacgcgccagaccgctgccctgcagcaggtcctctccacccggatcctggccatgaaggcctcgctctgcaagctgtcgccctgcacggtgactcgcgtgtgcgactaccacaccaagctcttcctcatcgccatcagctccaccctgaagtcgctgctgcgcccccactttctcaacacgcctgacaagagccccggcgaccggctgaccgagatctgcaccaagatcaccgacgtcgacattgacaaggtcatgatcaacctcaagacggaggaatttgtgctggacatgaacacactgcaggcgctgcagcagctcttgcagtgggtgggcgacttcgtgctgtacctgctggccagcctacccaaccagggttccctgctgaggccgggccacagctttctgcgggacggcacctcgctgggcatgcttcgggaattgatggtggtcatccgcatctggggccttctgaagcccagctgcctgcccgtgtatacggccacttcggatacccaggacagcatgtccctgctcttccgcctgctcaccaagctctggatctgctgtcgcgatgagggcccagcgagcgagccggacgaggcgctggtggatgaatgctgcctgctgcccagccagctgcttatccccagcctggactggctgccagccagcgacggcctggtcagccgcctgcagcccaagcagccccttcgtctgcagtttggccgggcgcccacgctgcctggcagtgctgccaccctgcagctcgacggcctcgccagggccccaggccagcccaagatcgaccacctgcggaggctgcaccttggcgcttgccccacggaggaatgcaaggcctgcaccaggtgcggctgtgtcaccatgctcaagtcgcccaacagaaccacggcggtgaagcagtgggagcagcgctggatcaagaattgcctggctgttgaaggccgtgggccggacgcctgcgtgaccagcagagcttctgaggaagcccctgcctttgtccagctgggcccgcagtccacacaccactctcccaggacccccagatccctggaccatctgcatccaaaggaccgtccgtgacggccgggggtccaggcggaccttgtggtgacccggctcgggcgtctcctcggtttccttgcctcacccacggagagcgctgaacctggacaagcagcggctgggaaggacaggtccaataaacgccctctgcgccca

SEQ ID NO: 152186 - DNA, 1962 bp, Homo sapiens
  Payload ID: 9945
  Gene Symbol: MED16
  Gene Name: mediator complex subunit 16
  ENST ID: ENST00000633123
  CDS Start-End: 1-1442
ggctggccctggccttccacgacggcagcgtccacatcgtgcaccggctctcactgcagaccatggccgtcttctacagctccgcggccccgaggcctgtggatgagccggccatgaagcgcccccgcaccgcgggccccgccgtccacttaaaggctatgcagctatcgtggacgtcactggccctggtggggattgacagccacgggaagctgagcgtgctccgcctctcaccttccatgggccacccgctggaggtggggctggcgctgcggcacctgctcttcctgctggagtactgcatggtgaccggctacgactggtgggacatcctgctgcacgtgcagcccagtatggtacagagcctggtggagaagctgcacgaggagtacacgcgccagaccgctgccctgcagcaggtcctctccacccggatcctggccatgaaggcctcgctctgcaagctgtcgccctgcacggtgactcgcgtgtgcgactaccacaccaagctcttcctcatcgccatcagctccaccctgaagtcgctgctgcgcccccactttctcaacacgcctgacaagagccccggcgaccggctgaccgagatctgcaccaagatcaccgacgtcgacattgacaaggtcatgatcaacctcaagacggaggaatttgtgctggacatgaacacactgcaggcgctgcagcagctcttgcagtgggtgggcgacttcgtgctgtacctgctggccagcctacccaaccagggttccctgctgaggccgggccacagctttctgcgggacggcacctcgctgggcatgcttcgggaattgatggtggtcatccgcatctggggccttctgaagcccagctgcctgcccgtgtatacggccacttcggatacccaggacagcatgtccctgctcttccgcctgctcaccaagctctggatctgctttcctagcacaggtccatgctctgtgtgggtgcttttgggatggcagccacttccaggtcgcgatgagggcccagcgagcgagccggacgaggcgctggtggatgaatgctgcctgctgcccagccagctgcttatccccagcctggactggctgccagccagcgacggcctggtcagccgcctgcagcccaagcagccccttcgtctgcagtttggccgggcgcccacgctgcctggcagtgctgccaccctgcagctcgacggcctcgccagggccccaggccagcccaagatcgaccacctgcggaggctgcaccttggcgcttgccccacggaggaatgcaaggcctgcaccaggtgcggctgtgtcaccatgctcaagtcgcccaacagaaccacggcggtgaagcagtgggagcagcgctggatcaagaattgcctgtgcggtgggctctggtggcgggtgcccctcagctacccctgagcccagctgcccctcagctactcctcagctacccctcagctgctcctgagcccggctgctgcaagagccaccgctcgccctggactctcctcggcgcggttaacctcagcccgccctgcagggctgttgaaggccgtgggccggacgcctgcgtgaccagcagagcttctgaggaagcccctgcctttgtccagctgggcccgcagtccacacaccactctcccaggacccccagatccctggaccatctgcatccaaaggaccgtccgtgacggccgggggtccaggcggaccttgtggtgacccggctcgggcgtctcctcggtttccttgcctcacccacggagagcgctgaacctggacaagcagcggctgggaaggacaggtccaataaacgccctctgcgcccaggcccgcgtccctgccgtcggtgcccccgaccccacccacgacctcgatttggtgccgggagcctgtgtcctcttggcctgtctttaaattcttcagcatttatggggca

SEQ ID NO: 152187 - DNA, 135 bp, Homo sapiens
  Payload ID: 9945
  Gene Symbol: MED16
  Gene Name: mediator complex subunit 16
  ENST ID: ENST00000631914
  CDS Start-End: 1-135
tcgctgctgcgcccccactttctcaacacgcctgacaagagccccggcgaccggctgaccgagatctgcaccaagatcaccgacgtcgacattgacaaggtcatgatcaacctcaagacggaggaatttgtgctg

SEQ ID NO: 152188 - DNA, 677 bp, Homo sapiens
  Payload ID: 9945
  Gene Symbol: MED16
  Gene Name: mediator complex subunit 16
  ENST ID: ENST00000631584
  CDS Start-End: 1-677
ggctggccctggccttccacgacggcagcgtccacatcgtgcaccggctctcactgcagaccatggccgtcttctacagctccgcggccccgaggcctgtggatgagccggccatgaagcgcccccgcaccgcgggccccgccgtccacttaaaggctatgcagctatcgtggacgtcactggccctggtggggattgacagccacgggaagctgagcgtgctccgcctctcaccttccatgggccacccgctggaggtggggctggcgctgcggcacctgctcttcctgctggagtactgcatggtgaccggctacgactggtgggacatcctgctgcacgtgcagcccagtatggtacagagcctggtggagaagctgcacgaggagtacacgcgccagaccgctgccctgcagcaggtcctctccacccggatcctggccatgaaggcctcgctctgcaagctgtcgccctgcacggtgactcgcgtgtgcgactaccacaccaagctcttcctcatcgccatcagctccaccctgaagtcgctgctgcgcccccactttctcaacacgcctgacaagagccccggcgaccggctgaccgagatctgcaccaagatcaccgacgtcgacattgacaaggtcatgatcaacctcaagacggaggaatttgtgctg

SEQ ID NO: 152189 - DNA, 1891 bp, Homo sapiens
  Payload ID: 9945
  Gene Symbol: MED16
  Gene Name: mediator complex subunit 16
  ENST ID: ENST00000634211
  CDS Start-End: 1-851
ggctggccctggccttccacgacggcagcgtccacatcgtgcaccggctctcactgcagaccatggccgtcttctacagctccgcggccccgaggcctgtggatgagccggccatgaagcgcccccgcaccgcgggccccgccgtccacttaaaggctatgcagctatcgtggacgtcactggccctggtggggattgacagccacgggaagctgagcgtgctccgcctctcaccttccatgggccacccgctggaggtggggctggcgctgcggcacctgctcttcctgctggagtactgcatggtgaccggctacgactggtgggacatcctgctgcacgtgcagcccagtatggtacagagcctggtggagaagctgcacgaggagtacacgcgccagaccgctgccctgcagcaggtcctctccacccggatcctggccatgaaggcctcgctctgcaagctgtcgccctgcacggtgactcgcgtgtgcgactaccacaccaagctcttcctcatcgccatcagctccaccctgaagtcgctgctgcgcccccactttctcaacacgcctgacaagagccccggcgaccggctgaccgagatctgcaccaagatcaccgacgtcgacattgacaaggtcatgatcaacctcaagacggaggaatttgtgctggacatgaacacactgcaggcgctgcagcagctcttgcagtgggtgggcgacttcgtgctgtacctgctggccagcctacccaaccagccctcccccacctcggagccctcccccacctcggagccctcccctccctcggagccctcccccacctcggagccctcctctccatgaagcctctgctggttccctgctgaggccgggccacagctttctgcgggacggcacctcgctgggcatgcttcgggaattgatggtggtcatccgcatctggggccttctgaagcccagctgcctgcccgtgtatacggccacttcggatacccaggacagcatgtccctgctcttccgcctgctcaccaagctctggatctgctgtcgcgatgagggcccagcgagcgagccggacgaggcgctggtggatgaatgctgcctgctgcccagccagctgcttatccccagcctggactggctgccagccagcgacggcctggtcagccgcctgcagcccaagcagccccttcgtctgcagtttggccgggcgcccacgctgcctggcagtgctgccaccctgcagctcgacggcctcgccagggccccaggccagcccaagatcgaccacctgcggaggctgcaccttggcgcttgccccacggaggaatgcaaggcctgcaccaggtgcggctgtgtcaccatgctcaagtcgcccaacagaaccacggcggtgaagcagtgggagcagcgctggatcaagaattgcctgtgcggtgggctctggtggcgggtgcccctcagctacccctgagcccagctgcccctcagctactcctcagctacccctcagctgctcctgagcccggctgctgcaagagccaccgctcgccctggactctcctcggcgcggttaacctcagcccgccctgcagggctgttgaaggccgtgggccggacgcctgcgtgaccagcagagcttctgaggaagcccctgcctttgtccagctgggcccgcagtccacacaccactctcccaggacccccagatccctggaccatctgcatccaaaggaccgtccgtgacggccgggggtccaggcggaccttgtggtgacccggctcgggcgtctcctcggtttccttgcctcacccacggagagcgctgaacctggacaagcagcggctgggaaggacaggtccaataaacgccctctgcgccc

SEQ ID NO: 152190 - DNA, 470 bp, Homo sapiens
  Payload ID: 9945
  Gene Symbol: MED16
  Gene Name: mediator complex subunit 16
  ENST ID: ENST00000632049
  CDS Start-End: 1-470
ggctggccctggccttccacgacggcagcgtccacatcgtgcaccggctctcactgcagaccatggccgtcttctacagctccgcggccccgaggcctgtggatgagccggccatgaagcgcccccgcaccgcgggccccgccgtccacttaaaggctatgcagctatcgtggacgtcactggccctggtggggattgacagccacgggaaggtcctctccacccggatcctggccatgaaggcctcgctctgcaagctgtcgccctgcacggtgactcgcgtgtgcgactaccacaccaagctcttcctcatcgccatcagctccaccctgaagtcgctgctgcgcccccactttctcaacacgcctgacaagagccccggcgaccggctgaccgagatctgcaccaagatcaccgacgtcgacattgacaaggtcatgatcaacctcaagacggaggaatttgtgctg

SEQ ID NO: 152191 - DNA, 492 bp, Homo sapiens
  Payload ID: 9945
  Gene Symbol: MED16
  Gene Name: mediator complex subunit 16
  ENST ID: ENST00000631904
  CDS Start-End: 1-238
tgccaccctgcagctcgacggcctcgccagggccccaggccagcccaagatcgaccacctgcggaggctgcaccttggcgcttgccccacggaggaatgcaaggcctgcaccaggtgcggctgtgtcaccatgctcaagtcgcccaacagaaccacggcggtgaagcagtgggagcagcgctggatcaagaattgcctgtgcgggctgttgaaggccgtgggccggacgcctgcgtgaccagcagagcttctgaggaagcccctgcctttgtccagctgggcccgcagtccacacaccactctcccaggacccccagatccctggaccatctgcatccaaaggaccgtccgtgacggccgggggtccaggcggaccttgtggtgacccggctcgggcgtctcctcggtttccttgcctcacccacggagagcgctgaacctggacaagcagcggctgggaaggacaggtccaataaacgccctctgcgccca

SEQ ID NO: 152192 - DNA, 2128 bp, Homo sapiens
  Payload ID: 9945
  Gene Symbol: MED16
  Gene Name: mediator complex subunit 16
  ENST ID: ENST00000631852
  CDS Start-End: 1-1385
ggctggccctggccttccacgacggcagcgtccacatcgtgcaccggctctcactgcagaccatggccgtcttctacagctccgcggccccgaggcctgtggatgagccggccatgaagcgcccccgcaccgcgggccccgccgtccacttaaaggctatgcagctatcgtggacgtcactggccctggtggggattgacagccacgggaagctgagcgtgctccgcctctcaccttccatgggccacccgctggaggtggggctggcgctgcggcacctgctcttcctgctggagtactgcatggtgaccggctacgactggtgggacatcctgctgcacgtgcagcccagtatggtacagagcctggtggagaagctgcacgaggagtacacgcgccagaccgctgccctgcagcaggtcctctccacccggatcctggccatgaaggcctcgctctgcaagctgtcgccctgcacggtgactcgcgtgtgcgactaccacaccaagctcttcctcatcgccatcagctccaccctgaagtcgctgctgcgcccccactttctcaacacgcctgacaagagccccggcgaccggctgaccgagatctgcaccaagatcaccgacgtcgacattgacaaggtcatgatcaacctcaagacggaggaatttgtgctggacatgaacacactgcaggcgctgcagcagctcttgcagtgggtgggcgacttcgtgctgtacctgctggccagcctacccaaccagggttccctgctgaggccgggccacagctttctgcgggacggcacctcgctgggcatgcttcgggaattgatggtggtcatccgcatctggggccttctgaagcccagctgcctgcccgtgtatacggccacttcggatacccaggacagcatgtccctgctcttccgcctgctcaccaagctctggatctgctgtcgcgatgagggcccagcgagcgagccggacgaggcgctggtggatgaatgctgcctgctgcccagccagctgcttatccccagcctggactggctgccagccagcgacggcctggtcagccgcctgcagcccaagcagccccttcgtctgcagtttggccgggcgcccacgctgcctggcagtgctgccaccctgcagctcgacggcctcgccagggccccaggccagcccaagatcgaccacctgcggaggctgcaccttggcgcttgccccacggaggaatgcaaggcctgcaccaggtgcggctgtgtcaccatgctcaagtcgcccaacagaaccacggcggtgaagcagtgggagcagcgctggatcaagaattgcctgtgcggtgggctctggtggcgggtgcccctcagctacccctgagcccagctgcccctcagctactcctcagctacccctcagctgctcctgagcccggctgctgcaagagccaccgctcgccctggactctcctcggcgcggttaacctcagcccgccctgcagggctgttgaaggccgtgggccggacgcctgcgtgaccagcagagcttctgaggaagcccctgcctttgtccagctgggcccgcagtccacacaccactctcccaggacccccagatccctggaccatctgcatccaaaggaccgtccgtgacggccgggggtccaggcggaccttgtggtgacccggctcgggcgtctcctcggtttccttgcctcacccacggagagcgctgaacctggacaagcagcggctgggaaggacaggtccaataaacgccctctgcgcccaggcccgcgtccctgccgtcggtgcccccgaccccacccacgacctcgatttggtgccgggagcctgtgtcctcttggcctgtctttaaattcttcagcatttatggggcacctagtggatgccgagtctgggggtatccaaagtgagcagtggggacaggacacagcaggccggtggatgggatggggcggccatcgtcagggtggcttctgtccaggcatctgcctttcagtgtgttgtctgcctgtctctatactgtctctgcgtgctctccttgtttctgcgtgtctctggtatctctgcacttctctgtgtatggtctctgtgtctctg

SEQ ID NO: 152193 - DNA, 4874 bp, Homo sapiens
  Payload ID: 9946
  Gene Symbol: MED17
  Gene Name: mediator complex subunit 17
  Uniprot ID: Q9NVC6
  ENST ID: ENST00000251871
  CDS Start-End: 288-2243
gcaccgtgattcaccggaagcgctctagggaaccctggagcttccgcgcctgcccagttttgctccgaaagacttaccgaggagggagcttgcggtgcgttctgggaaagttgctgggccagctcctttgtttccagtctgagcgttgcgttcggtttcccgagggtcttctgaggcaccgcggctgcgggcttctgagttcccggctctccgcagggaagcctcctcttcgtacctcgttttttggctcgtggggggtcctcccaccgctggccgacgcagccagcatgtccggggtgcgcgcagtgcggatcagcatcgaatcggcctgcgagaagcaggtccatgaggtgggcctggatggcaccgagacgtacctgcccccgctgtccatgtcgcagaatctggcgcgtctggcccagcggatagacttcagccagggttcgggctccgaggaggaggaggcggcggggaccgagggcgacgcgcaggagtggccgggcgccgggtccagcgcagaccaggacgacgaggaaggagtggtaaaatttcagccttccctttggccttgggactcagtgaggaacaatttgagaagtgccctgacagagatgtgtgttctctatgatgttctcagtattgttagggataaaaaatttatgactcttgatcctgtctctcaggatgcacttcctccaaaacagaatcctcagacgttgcaattgatatctaaaaagaagtcacttgctggagcagcacaaatcttattgaagggggcagaaagactgactaaatcagttaccgaaaaccaagaaaacaagctacaaagagacttcaattctgagcttttgcgattacggcaacactggaaacttcgaaaagttggagataaaattctcggagatctgagctacagaagtgcaggatctctctttcctcatcatggtacatttgaagtaataaagaatacagatctcgatctggataaaaagatacctgaagattactgtcctcttgatgtccaaattcctagtgatttagaggggtctgcatatatcaaggtttcaatacaaaaacaggctccagatataggtgacctcggcacagttaacctcttcaaacgacctttgcccaaatccaaaccaggttccccacattggcagacaaaattagaagcggcacagaatgttctcttatgtaaagaaatttttgcacagctctctcgggaagctgttcaaattaaatcacaagtccctcacattgtggtgaaaaaccagattatctctcagccctttccgagcttgcagttatctatttctttgtgccattcctcaaatgataagaaatcccaaaaatttgctactgagaagcaatgtccggaggaccacctttatgtcctagagcataatttgcatctactgattagagagtttcataaacagaccttgagttccatcatgatgcctcatccagcaagtgcaccttttggccacaagagaatgagactttcgggtcctcaagcttttgataaaaatgaaattaattcattacagtccagtgaagggcttctggaaaaaataattaaacaagcaaagcatatttttctaaggagtagagctgctgcaaccattgacagcttagcaagccgaattgaggatcctcagatacaggctcattggtcaaatatcaatgatgtttatgaatctagtgtgaaagttttaatcacatcacaaggctatgaacaaatatgcaagtccattcaactgcaattgaatattggagttgagcagattcgagttgtacatagagatggaagagtaattacactgtcttatcaggagcaggagctacaggattttcttctgtctcagatgtcacagcaccaggtacatgcagttcagcaactcgccaaggttatgggctggcaagtactgagcttcagtaatcatgtgggacttggacctatagagagcattggtaatgcatctgccatcacggtggcctccccaagtggtgactatgctatttcagttcgtaatggacctgaaagtggcagcaagattatggttcagtttcctcgtaaccaatgtaaagaccttccaaaaagtgatgttttacaagataacaaatggagtcatcttcgtgggccattcaaagaagttcagtggaataaaatggaaggtcgaaattttgtttataaaatggagctgcttatgtctgcacttagcccttgtctactatgattttttccagatgtttcctaaagaagtttccagaaactttgacttgaaatgtttgcagatcaactataagcacaaagaagagataacttccaaaagagtgctgtttttaaaaataataattaggaaatgtttatttagcactttcaaacttttcactttataaatgacaagtgctttgaaatgcagaagtttatgtacagttgtatatacagtatgacaagatgtaaaataatatgtttttcatgcagtttaaaatattactaacttaagggtttctatgtgctttttaaaatattccttctttgatgttgacatcaaataaagtatgtggtttaaaaaaatctccaaatacctttttttccccccaaatactttctaaactttttttttttgagatggtatctcactctgtagcccagtctggagtgcagtggtgtgatcatggttcactgcagtcttgacctcccaggcttaggtgatccttctgtctcagccttccgagtagctgggaccacaggcatgcacaaccacgcctggctaatttttgtattttttataaagacagggtttttccatgttgcccaggctggtttcgaactcggctcaagtgatctacctgcctctgcctcccaaagtgctaggattacaggcgtgagccaccatgcccagcctactctaaattattgataacctcttcctccagttgtctcctttaagctttcctgggtctaacctacataggtaatttaagaacatcctcagaaaggacagctgaaggcaataggaggcagattatctctttagggcgtcctcaagtttttttggtctgttctcccacttgattgacctcaccagttgagacacctagtgtatggctcatgcccagccttccacctgggattctccagcctccacccagcagccctggattgctttctccaattaaggcctttccatcagctctctgctttttcaaagcgaaaaaactaatggattagtgggttatcttttccaaggaacaggtttgcacttcttggaaaaagtgcctaaagtgtgcccattaatatgaggatagatttaggctcataagccttttggtaacactgaaagtagtatcatataggcaagctctccttataagtaaggctttcaatttttaaaacagacatcctgctttaacaatttgtaagatgactgtgcagtaataaaagtcctttgtatttctccaccgtgttttcattaaagaaaaatggagcttgtgggccacgatagaacaactttgtgcttttttccccttctgatcaagatcttgcatctttctatccatggaaattaaaataattggtatgaatttgcagttatttaaaaatcttgagtgcttcaaaaattattgttgcctgcaaaatttgccttggtcaataggctaatctgcacaattccactcacataaggagtcttttatgtgattttgaaggctcaggctagaagagtgagtctgagacttttgctgaatgaccagtttttgtttatataaacttctcccattgcagattgatactttggtaaactaataaaaatgaattcctaaaatgaaattttgaaaagatacaaaataaaagccccatttatttgattataacttgattaaattgcatcaaatactagaatttatagacagagtctcactctgttccccaggctggagtgcagcagcactgttttggctcactgcaacctctgcctcctgggttcaaatgactctcatgcctcagcctcccgagtaactgggattacaggtgtgtgccaccacgaccgtctaatttttgtaattttgataagagggttttgccatcttggccaggctggtcttgaactcctggcctcaattgatccgcccacctcggcctcccaaagtgctaggattacaggcataagccacagtgcccagcccccccaaatataaacatttctgaatgctttattttttatttctctgcttgtcatgaatcagtaacaaatcatggaccaggaccacaccttgagtagaatggctgagaatacatgtgcagatactaccgtctgttcttttaaaccccatctgagtagagtgggataactgaagactttacgttcttcatgtcttactttccctgtttggtacgtcgctgtagtgagtagccagtaccgacctaaagaattgtagaaactaaagcaaatgtgtgggaaaatggtagcttagttgctgtggtagcaattcttatgccttgtatttatttacattttctagtttaatgttttaacctgaatttcctggagtttgaaggatgtgctatggaaacttgggagacagtttgaagaaaaccaattagcccctcaacaagtattaacaggttggcaaggagctgtgtttgaatcttggctctgctactggcttgctgtatgaacttggcaaggattctctgtgaacttgtttccttatatataaatgaagatagaggtgcctcctctactaacctcagtggtgattgagaagtttcagtaacgttggtaataaatgttaaattctaaagtactacataaatataaagcattaagcaagtgtgcttctaagagtcaagccaattagaaaaa

SEQ ID NO: 152194 - DNA, 847 bp, Homo sapiens
  Payload ID: 9946
  Gene Symbol: MED17
  Gene Name: mediator complex subunit 17
  ENST ID: ENST00000533359
  CDS Start-End: 153-847
agtctgagcgttgcgttcggtttcccgagggtcttctgaggcaccgcggctgcgggcttctgagttcccggctctccgcagggaagcctcctcttcgtacctcgttttttggctcgtggggggtcctcccaccgctggccgacgcagccagcatgtccggggtgcgcgcagtgcggatcagcatcgaatcggcctgcgagaagcaggtccatgaggtgggcctggatggcaccgagacgtacctgcccccgctgtccatgtcgcagaatctggcgcgtctggcccagcggatagacttcagccagggttcgggctccgaggaggaggaggcggcggggaccgagggcgacgcgcaggagtggccgggcgccgggtccagcgcagaccaggacgacgaggaaggagtggtaaaatttcagccttccctttggccttgggactcagtgaggaacaatttgagaagtgccctgacagagatgtgtgttctctatgatgttctcagtattgttagggataaaaaatttatgactcttgatcctgtctctcaggatgcacttcctccaaaacaggatagggggctggcaatatataaggagaggaatggcagtacattaagaggggaccctaacaggctggacagagttgatgcaatgaatcctcagacgttgcaattgatatctaaaaagaagtcacttgctggagcagcacaaatcttattgaagggggcagaaagactgactaaatcagttaccgaaaaccaagaaaacaagctacaaagagacttcaattctgagcttttgcgattacggcaacactggaaacttcgaaaagttggagataaaattct

SEQ ID NO: 152195 - DNA, 2491 bp, Homo sapiens
  Payload ID: 9946
  Gene Symbol: MED17
  Gene Name: mediator complex subunit 17
  ENST ID: ENST00000533133
  CDS Start-End: 104-904
ctgcgggcttctgagttcccggctctccgcagggaagcctcctcttcgtacctcgttttttggctcgtggggggtcctcccaccgctggccgacgcagccagcatgtccggggtgcgcgcagtgcggatcagcatcgaatcggcctgcgagaagcaggtccatgaggtgggcctggatggcaccgagacgtacctgcccccgctgtccatgtcgcagaatctggcgcgtctggcccagcggatagacttcagccagggttcgggctccgaggaggaggaggcggcggggaccgagggcgacgcgcaggagtggccgggcgccgggtccagcgcagaccaggacgacgaggaaggagtggtaaaatttcagccttccctttggccttgggactcagtgaggaacaatttgagaagtgccctgacagagatgtgtgttctctatgatgttctcagtattgttagggataaaaaatttatgactcttgatcctgtctctcaggatgcacttcctccaaaacagaatcctcagacgttgcaattgatatctaaaaagaagtcacttgctggagcagcacaaatcttattgaagggggcagaaagactgactaaatcagttaccgaaaaccaagaaaacaagctacaaagagacttcaattctgagcttttgcgattacggcaacactggaaacttcgaaaagttggagataaaattctcggagatctgagctacagaagtgcaggatctctctttcctcatcatggtacatttgaagtaataaagaatacagatctcgatctggataaaaagatacctgaagattactgtcctcttgatgtccaaattcctagtgatttagaggggtctgcatatatcaaggtatttgtcaaaatatttttcaagtaatttcttacgaatagcctgaagttaatttgttaactttttttgtttttgttgtcatataggtttcaatacaaaaacaggctccagatataggtgacctcggcacagttaacctcttcaaacgacctttgcccaaatccaaaccaggttccccacattggcagacaaaattagaagcggcacagaatgttctcttatgtaaagaaatttttgcacagctctctcgggaagctgttcaaattaaatcacaagtccctcacattgtggtgaaaaaccagattatctctcagccctttccgagcttgcagttatctatttctttgtgccattcctcaaatgataagaaatcccaaaaatttgctactgagaagcaatgtccggaggaccacctttatgtcctagagcataatttgcatctactgattagagagtttcataaacagaccttgagttccatcatgatgcctcatccagcaagtgcaccttttggccacaagagaatgagactttcgggtcctcaagcttttgataaaaatgaaattaattcattacagtccagtgaagggcttctggaaaaaataattaaacaagcaaagcatatttttctaaggagtagagctgctgcaaccattgacagcttagcaagccgaattgaggatcctcagatacaggctcattggtcaaatatcaatgatgtttatgaatctagtgtgaaagttttaatcacatcacaaggctatgaacaaatatgcaagtaagttggagtgcagtgatgatcatatctgactacagccttgagctccggggttcaaggaattcttttgcctcaacctcctgagtagctgggactataggcatgtgcccccatgcccagctaattaaaaaaattttttttaagaaacatgtctatgttgcccatgctggtcttgaactcctggactccagcaatcctgctgtcttggcctcccaaagtgctgggattacaggcatgagccaccactcccggccctttgtattgatattttggtttttctccacagttcgtaatggacctgaaagtggcagcaagattatggttcagtttcctcgtaaccaatgtaaagaccttccaaaaagtgatgttttacaagataacaaatggagtcatcttcgtgggccattcaaagaagttcagtggaataaaatggaaggtcgaaattttgtttataaaatggagctgcttatgtctgcacttagcccttgtctactatgattttttccagatgtttcctaaagaagtttccagaaactttgacttgaaatgtttgcagatcaactataagcacaaagaagagataacttccaaaagagtgctgtttttaaaaataataattaggaaatgtttatttagcactttcaaacttttcactttataaatgacaagtgctttgaaatgcagaagtttatgtacagttgtatatacagtatgacaagatgtaaaataatatgtttttcatgcagtttaaaatattactaacttaagggtttctatgtgctttttaaaatattccttctttgatgttgacatcaaataaagtatgtggtttaaaa

SEQ ID NO: 152196 - DNA, 530 bp, Homo sapiens
  Payload ID: 9946
  Gene Symbol: MED17
  Gene Name: mediator complex subunit 17
  ENST ID: ENST00000528786
  CDS Start-End: 102-530
gtcatctttttgttgctgccggacaaggagtggtaaaatttcagccttccctttggccttgggactcagtgaggaacaatttgagaagtgccctgacagagatgtgtgttctctatgatgttctcagtattgttagggataaaaaatttatgactcttgatcctgtctctcaggatgcacttcctccaaaacagaatcctcagacgttgcaattgatatctaaaaagaagtcacttgctggagcagcacaaatcttattgaagggggcagaaagactgactaaatcagttaccgaaaaccaagaaaacaagctacaaagagacttcaattctgagcttttgcgattacggcaacactggaaacttcgaaaagttggagataaaattctcggagatctgagctacagaagtgcaggatctctctttcctcatcatggtacatttgaagtaataaagaatacagatctcgatctggataaaaagatacctgaagattactgtcctcttgatgtccaaattcctagtgattta

SEQ ID NO: 152197 - DNA, 2278 bp, Homo sapiens
  Payload ID: 9946
  Gene Symbol: MED17
  Gene Name: mediator complex subunit 17
  Uniprot ID: Q9NVC6
  ENST ID: ENST00000530819
  CDS Start-End: 233-670
agttttgctccgaaagacttaccgaggagggagcttgcggtgcgttctgggaaagttgctgggccagctcctttgtttccagtctgagcgttgcgttcggtttcccgagggtcttctgaggcaccgcggctgcgggcttctgagttcccggctctccgcagggaagcctcctcttcgtacctcgttttttggctcgtggggggtcctcccaccgctggccgacgcagccagcatgtccggggtgcgcgcagtgcggatcagcatcgaatcggcctgcgagaagcaggtccatgaggtgggcctggatggcaccgagacgtacctgcccccgctgtccatgtcgcagaatctggcgcgtctggcccagcggatagacttcagccagggttcgggctccgaggaggaggaggcggcggggaccgagggcgacgcgcaggagtggccgggcgccgggtccagcgcagaccaggacgacgaggaaggagtggtaaaatttcagccttccctttggccttgggactcagtgaggaacaatttgagaagtgccctgacagagatgtgtgttctctatgatgttctcagtattgttagggataaaaaatttatgactcttgatcctgtctctcaggatgcacttcctccaaaacaggtatttgtggactttaattgaataataaaattttatttattaaatcccaggacccttttttggctttgtgcctgttgttccattttcctttcttgcaaaattaagtccagatgaagatttaaagactaactggtctaaaacaaagccatacaactgcatttcctttatttttttattatatacctatgatccttggaagagttaagtttcattaagaatgtaatacctttaaggccaggcgtggtggctcacgcctgtaatcccagcactttgggaggccaaggcgggcagatcacgaggtcaggagatcgagaccatcctggctaatgctgtgaaaccttgtctctattaaaaataacaaaaataagccaggcgtggtggtgggcacctgtagtcccagctactcagaaggctgaggcaggagaattgcttgagcctgggaggcgggggttgcagtgagctgagatcgcgccactgcactccagcctgggcgacagagcgagattccatcccaaaaaaaaaaaaaaaaagaatgtaatactttaaaggttaccaaatcttaacaaattcttatagcctgggtccttggtctgtgatatattacacaaaaatgtgatgatataatggctttggaatcaggtagacctggattcgaatcctgcctctgccttcattaactgtgtgaccttaaattaagcaagttattttctcttaagtccctgtttttccatctaatccttccttccctttttttttaagggatggattagaaaagttaggcgaaattatggagcatattgagagctgggtagaattgctgctatttcataaacagtgtattcaatttttgaacatttgaagatgaaagagaagtagcaggaagatgagttggtgaatagtctgaaatcattgaggctacttgggtccttaaggaaaacaagtgtcaagaccataaccaaattagtcatggagaagaagtaatgactgttagaacccatttgtaaataaaattaattgaatagaattactcacatagtaatagtttcagaatctagaaacattgtgctgggggactaatagagttccctaaatctgcattcttcattttatagagagaaaactaaagcttaaagagatttgtaatatgttcaagttgctgtcaagccagtagttagggagccaagactagaactccagcacctaactcatagccccactgccttttctactattctgtgcttttcccagaagggagtctccaggaatttcttaatatctccaggaactcttttatttacgttccctaatacaatcaaaagattattttgatatgtttatgaagctttttatgtgatttttgactctcatacagccagaaaactgtattaaactggttagtaaaatacacaaattatggtgattgtggatatttatatatgcatatgtgatacatagatagtgacttctgatcagttttccaaaaaattaggattcagtgaagtacatttaatattaacaatggcagggcacggtggcttatgcctgtaattccaacactttggggaaccaaagcaggaagccaggagtttgagactttcccaggcaacatagcaagaccctgtctctacc

SEQ ID NO: 152198 - DNA, 1833 bp, Homo sapiens
  Payload ID: 9947
  Gene Symbol: MED18
  Gene Name: mediator complex subunit 18
  Uniprot ID: Q9BUE0
  ENST ID: ENST00000373842
  CDS Start-End: 210-836
gaagttggctggttgcaccgatctgggggcttcccgggctcgggtaaccggagtgctggtatctaatcgtcgctcaaaagctcctaggtgcgcgggtggatataattcccggcttctcgagaagacactacagcctcaaggaggtatatcccgtgccttacctgactgggggctctgagtccagttgtgttgtcttcaacttagacaccatggaggcacctccagtcaccatgatgcctgtcactgggggcaccattaacatgatggagtacctgttgcagggaagtgttttagatcacagtttggaaagcctcatccaccgccttcgtggtttgtgtgacaacatggaacctgagactttccttgaccatgagatggtattcctccttaagggccagcaagccagcccatttgttctcagggcccgacgctctatggacagggcaggggcaccctggcatctgcgctacctgggacagccagaaatgggagacaagaaccgccatgccctggtgcgaaactgcgtggacattgccacatctgagaacctcaccgacttcttgatggaaatgggcttccgcatggaccatgagtttgttgctaagggacatttgttccgtaagggcatcatgaagattatggtgtacaagattttccgcatcctggtgccagggaacacagacagcactgaggccttgtcactctcctatctcgtggaattaagtgtggtagcacccgctgggcaggacatggtctctgatgacatgaagaacttcgcagaacagctaaaacctctggttcacctagagaaaatagaccccaagaggctcatgtgactaagaggatctgtccacatttggggcctatccttacttgtttgaaaaaatatgtttgctttttttggtttttgttttgttttgtttttgagacagagtctcgctttgtttcccaggctggagtgcagtggcacgatctcggctcactgcaacctctgcctcctgggttcaagcaattctcccacctcagcctcctgagtagctgggattacaggcacatgccaccatgctcagctaatttttgtatttttagtagaaatggggattcaccatgttggtcaggctattctcgaactcctgacctcgtgatccacccaccttggcctcccaaagtgctgggattacaggcatgagccaccacgcctggccaaaaaaatatgttttaaatgtcccatttcaccattgccaggcaggcattcttccttcagggagaggatggtgagaattaattggttctttgcactgttctcctcatgtggcgatttcactttcatgacagcctttctatattaaaggctcaggatgtcacggagaatctatctaatcccactgtattaagaggggaaaccgggccaagcgcagtggctcacacctctaatcccagcactttgggaggctgaggtaggtggatcacccaaggtcaggagtttgagaccagcctggccaaatggtgaaaccccatctctacgaaaaatacaaaatttagccgggcatggtagcaggcgcttgtaatcccagctacttgggaggctgaggctggagaatcgcttgaacccaggaggtgaaggttgcagtgaccagagatgacgccattgcactccagcctgggtgagaagagcgaaactccgtctcaaaaaaaaataaaaatgaagaggggaaaccagaataaattatcttttggaaaggacaatttcttgtttggccatttgtgtataaggttggtaacattagaggctgtgagcttgtgttacatggtaataaagccaatgaagagaca

SEQ ID NO: 152199 - DNA, 1106 bp, Homo sapiens
  Payload ID: 9947
  Gene Symbol: MED18
  Gene Name: mediator complex subunit 18
  Uniprot ID: Q9BUE0
  ENST ID: ENST00000398997
  CDS Start-End: 193-819
ccgatctgggggcttcccgggctcgggtaaccggagtgctggtatctaatcgtcgctcaaaagctcctaggtgcgcgggtggatataattcccggcttctcgagaagacactacagcctcaaggaggtatatcccgtgccttacctgactgggggctctgagtccagttgtgttgtcttcaacttagacaccatggaggcacctccagtcaccatgatgcctgtcactgggggcaccattaacatgatggagtacctgttgcagggaagtgttttagatcacagtttggaaagcctcatccaccgccttcgtggtttgtgtgacaacatggaacctgagactttccttgaccatgagatggtattcctccttaagggccagcaagccagcccatttgttctcagggcccgacgctctatggacagggcaggggcaccctggcatctgcgctacctgggacagccagaaatgggagacaagaaccgccatgccctggtgcgaaactgcgtggacattgccacatctgagaacctcaccgacttcttgatggaaatgggcttccgcatggaccatgagtttgttgctaagggacatttgttccgtaagggcatcatgaagattatggtgtacaagattttccgcatcctggtgccagggaacacagacagcactgaggccttgtcactctcctatctcgtggaattaagtgtggtagcacccgctgggcaggacatggtctctgatgacatgaagaacttcgcagaacagctaaaacctctggttcacctagagaaaatagaccccaagaggctcatgtgactaagaggatctgtccacatttggggcctatccttacttgtttgaaaaaatatgtttgctttttttggtttttgttttgttttgtttttgagacagagtctcgctttgtttcccagcctgggtgagaagagcgaaactccgtctcaaaaaaaaataaaaatgaagaggggaaaccagaataaattatcttttggaaaggacaatttcttgtttggccatttgtgtataaggttggtaacattagaggctgtgagcttgtgttacatggtaataaagccaatgaagag

SEQ ID NO: 152200 - DNA, 1515 bp, Homo sapiens
  Payload ID: 9948
  Gene Symbol: MED19
  Gene Name: mediator complex subunit 19
  Uniprot ID: A0JLT2
  ENST ID: ENST00000337672
  CDS Start-End: 23-607
cagcgccggggcggagggtacgatggagaatttcacggcactgtttggggctcaggctgacccaccaccgcccccaaccgcactcggcttcggaccaggaaagcctccacccccgccaccgcctcctgcgggcgggggacccggcacggccccgcctcccaccgcggccacggctcctcctggcgcggacaagtcaggagctggctgtggccctttttacctcatgagggaactgccaggtagcacagagctgacaggcagcacgaatctgatcacacactacaacttggaacaagcctataataaattctgtgggaagaaggtgaaggagaagctaagtaacttcctgcctgacctgccagggatgattgatctgcctggttcccatgataacagcagcctccgctctctcattgagaagccccctattctcagtagctctttcaatcctatcacagggaccatgctggccggcttccgcctccacactggcccgttgccggagcagtgtcgtctgatgcatattcagcctcccaagaagaagaataagcacaagcacaaacagagccgtacccaggatcctgtccccccaggtaaacccagttaagttccgtatggagctctggactcctaaattcccctgaagaagaaaccaatgtactgtggtctcttgggacttgggacagggactctagcagcacctctgtatcctttctggccatttggacaaaagcagttgccccgacttgggattttcctgtagtcttcagtggttcataacagtagaggattttgagctttacaggtgataggtacctaatgtctcctacagaaacaccatctgattcagatcacaagaagaagaaaaagaaaaaagaagaggatcctgaacggaaaaggaagaagaaagagaagaagaaaaagaaggtagagtagaggcctattgccacaacccagtgagtttccccagatctcacccctgtcctaaataccctagagttctttgcctcaagttggacccaagattgaaaacccaaggcaggttgcaggtttctcctgtacagcctgatcaaagccaaggctagttcctagttgttcttaccctgcttctttctcccccagaatcgacatagtccagaccacccaggtatgggcagctcccaggccagcagcagcagcagcctacgctaataggaccactggactctttgccaggatggcttttcctgctgtactgaacctgctgataaaagctgccttccaggctcttggacactgccttgggagcatcctgcagctgggacagaggccagctcctgttgggctcagttgagactaagtaaattaggagagagagggacatgcttttgtaggctcatcccagttggttttctcatggacatctcttcctctcccaggaagcttacaattttcttctctctcttttgtgcaatttgtctgatttaggacttgttctgtgttttctttaaaaaaaaaaaaattacatttatcaaa

SEQ ID NO: 152201 - DNA, 1089 bp, Homo sapiens
  Payload ID: 9948
  Gene Symbol: MED19
  Gene Name: mediator complex subunit 19
  ENST ID: ENST00000431606
  CDS Start-End: 31-765
cacggagacagcgccggggcggagggtacgatggagaatttcacggcactgtttggggctcaggctgacccaccaccgcccccaaccgcactcggcttcggaccaggaaagcctccacccccgccaccgcctcctgcgggcgggggacccggcacggccccgcctcccaccgcggccacggctcctcctggcgcggacaagtcaggagctggctgtggccctttttacctcatgagggaactgccaggtagcacagagctgacaggcagcacgaatctgatcacacactacaacttggaacaagcctataataaattctgtgggaagaaggtgaaggagaagctaagtaacttcctgcctgacctgccagggatgattgatctgcctggttcccatgataacagcagcctccgctctctcattgagaagccccctattctcagtagctctttcaatcctatcacagggaccatgctggccggcttccgcctccacactggcccgttgccggagcagtgtcgtctgatgcatattcagcctcccaagaagaagaataagcacaagcacaaacagagccgtacccaggatcctgtccccccagaaacaccatctgattcagatcacaagaagaagaaaaagaaaaaagaagaggatcctgaacggaaaaggaagaagaaagagaagaagaaaaagaagaatcgacatagtccagaccacccaggtatgggcagctcccaggccagcagcagcagcagcctacgctaataggaccactggactctttgccaggatggcttttcctgctgtactgaacctgctgataaaagctgccttccaggctcttggacactgccttgggagcatcctgcagctgggacagaggccagctcctgttgggctcagttgagactaagtaaattaggagagagagggacatgcttttgtaggctcatcccagttggttttctcatggacatctcttcctctcccaggaagcttacaattttcttctctctcttttgtgcaatttgtctgatttaggacttgttctgtgttttctttaaaaaaaaaaaaattacatttatcaaa

SEQ ID NO: 152202 - DNA, 2438 bp, Homo sapiens
  Payload ID: 9949
  Gene Symbol: MED20
  Gene Name: mediator complex subunit 20
  Uniprot ID: Q9H944
  ENST ID: ENST00000265350
  CDS Start-End: 82-720
ggaactgaaggagtttctgtgggcggacagggaaccctgcgtttctactgtgtgattctgccaccttcctggcccgacgccatgggagtgacttgtgtgtcccagatgcctgtggccgagggcaagagtgttcagcaaaccgtagagctccttacccggaaattggagatgcttggggcagagaagcaaggaacattttgtgtggactgtgagacttaccatacggccgcctctacccttggcagccaaggtcagaccgggaagctgatgtatgtgatgcacaactcagagtacccattgagctgtttcgccctctttgagaatggcccttgccttattgctgacaccaactttgatgtgcttatggtgaagctcaagggctttttccagagtgctaaggccagcaagattgagacccggggcaccaggtaccagtactgtgacttcctggtgaaggtgggcacggtcacaatggggcccagtgcccggggcatctctgtggaggtggagtatggcccctgtgtggtagctagtgactgctggagtctgctgctcgagttcctacagagttttctaggcagccacacaccaggggctcccgcagtgtttgggaacagacatgatgcggtctacggcccagcagataccatggtccagtacatggaactcttcaacaagatccgcaagcagcagcaggtgccggtggctgggattcgttagtgatgagcagctgccagctgagctctgtcaccaggggtactccacaggaggagcaggtgctgactttcaggtccctggaccccagaaacccagggtagacatggactctactctccttctctggttctcagctgtggcttttgttctggggctgagtcccctccccaaccccctgactctcacacatagccccccatcagctgttttactccgtgccttactggatttggcctgtcctcaagaatggtaattatgaagagtggagaagtttggaccttgcctcctttaggggaaaggtaggacaggaatgtccctgcctggtactggtgggggaaatagtccgtatccccaactattaaggatttgtcccaggccaatggtgaacatgctgcattttatgtttggattgtgctgtaataagagcctcttccttccctcagaggatgtggctgggcttctatcctagagatggagtagaaggcacaactggtttgatagttactattttctgacctgtttgctgaagtgatttgcgaattgactttcctagggtgttgcctgagtcctttgaaatctccttctgacatctttcccttctgttgtgaaatatgttaagccacaggccaaactgctataagatcgaagtttgtttttttctcacctaataatagagaggtaatcagatggtctagggcagatttaactctacaaggttatcaggaactttgtttccttctgtcttattcagccattcccagtatgttttcttacccataagatcaaagcagactcatcagctccatatctgcattccactggggaaagagagagagaaaagagcagattttaaaaaaaagatatgactgagcattgctcagatcactgtggccacactttgctgaaagagatgctgggacatagaacctcttatctgggcagtcatgtgctgagttaaaactcagggattctgtgactacaagatgaaagacaatttggttgctgagatgcagttaatggcttctgttacatggagctcaatggacgtgcccaggaatgcttttggctgttattttgcagttaatacctcctgtaactaaagcatttgtttatgagttgacttgagagaagggctgatctcagagccgctttgagctaagttggattagtcacactaggaagttaattccacacctttcgtctaagtctcagtattgaggcctctccagttctcatgcaccctgatcttagggttagaatacttgaccctgatacctgcaccatgcttcatggttcctgagctctttctcctgtttcatttgagcctccaaactacatatttggtcatattgcctgcctaccccatgcctgctgcagaaatattcatccaggttaaccttgatatacacagagatggtcttggagaattgtgaatgtatgtactgtattgtcatcaaggatactgtcccttatttgaaggcatctaaagagaaactgttttcagatccaagtgctcagatctaaagcctctgcaacaagtcaggtggtggtcatgtttcccttctagttttggctgacaggaagctcagttcagtaccataactacagaacctgtcatctgtattttttgttctcaccccgtttttgttattttgtttctggttttttatattgaggtatgttttagatatagtttacaaaaataaaacgcacagatctta

SEQ ID NO: 152203 - DNA, 531 bp, Homo sapiens
  Payload ID: 9949
  Gene Symbol: MED20
  Gene Name: mediator complex subunit 20
  ENST ID: ENST00000394251
  CDS Start-End: 112-531
ctggtgcgagaatcctgagaactgtgctccagttcttagaggggctctcagggactgtggtcctctattccttgtctttacaatgggggactggtccaagttgtgtcccagatgcctgtggccgagggcaagagtgttcagcaaaccgtagagctccttacccggaaattggagatgcttggggcagagaagcaaggaacattttgtgtggactgtgagacttaccatacggccgcctctacccttggcagccaaggtcagaccgggaagctgatgtatgtgatgcacaactcagagtacccattgagctgtttcgccctctttgagaatggcccttgccttattgctgacaccaactttgatgtgcttatggtgaagctcaagggctttttccagagtgctaaggccagcaagattgagacccggggcaccaggtaccagtactgtgacttcctggtgaaggtgggcacggtcacaatggggcccagtgcccggggcatctctgtggaggtggagtatggcccctgtgtg

SEQ ID NO: 152204 - DNA, 815 bp, Homo sapiens
  Payload ID: 9949
  Gene Symbol: MED20
  Gene Name: mediator complex subunit 20
  ENST ID: ENST00000409060
  CDS Start-End: 76-513
gaaggagtttctgtgggcggacagggaaccctgcgtttctactgtgtgattctgccaccttcctggcccgacgccatgggagtgacttgtgtgtcccagatgcctgtggccgagggcaagagtgttcagcaaaccgtagagctccttacccggaaattggagatgcttggggcagagaagcaaggaacattttgtgtggactgtgagacttaccatacggccgcctctacccttggcagccaaggtcagaccgggaagctgatgtatgtgatgcacaactcagagtacccattgagctgtttcgccctctttgagaatggcccttgccttattgctgacaccaactttgatgtgcttatggtgaagctcaagggctttttccagagtgctaaggccagcaagattgagacccggggcaccaggtaccagtactgtgacttcctggtgaaggtgggcacggtcacaatggggcccagtgcccggggcatctctgtggaggtaagaccttggtgaaaataggagcaggatgttctgagggggctgcttagcaaagggctctgaagattttccagttcttctctttttttttttttgagacagagtcttgttctgtcacccaggctggaatgcaatggcacaatcttggcacactgtagcctcgacctccagggctcaagtgatccttccgcctcagtctcccaagtacctgggactacacccaccgaattaaatttttttttttttttagtagaaatgaggtcttactatgttgcccaggctgatctcagactcctgggctcaattgatcctcccat

SEQ ID NO: 152205 - DNA, 932 bp, Homo sapiens
  Payload ID: 9949
  Gene Symbol: MED20
  Gene Name: mediator complex subunit 20
  Uniprot ID: Q9H944
  ENST ID: ENST00000409312
  CDS Start-End: 102-473
gagacagaaggttgtgttggggaactgaaggagtttctgtgggcggacagggaaccctgcgtttctactgtgtgattctgccaccttcctggcccgacgccatgggagtgacttgtgtgtcccagatgcctgtggccgagggcaagagtgttcagcaaaccgtagagctccttacccggaaattggagatgcttggggcagagaagcaaggaacattttgtgtggactgtgagacttaccatacggccgcctctacccttggcagccaaggtcagaccgggaagctgatgtatgtgatgcacaactcagagtacccattgagctgtttcgccctctttgagaatggcccttgccttattgctgacaccaactttgatgtgcttatggtgaagctcaagggctttttccagagtgctaaggccagcaagattgagacccggggcaccaggtggagtatggcccctgtgtggtagctagtgactgctggagtctgctgctcgagttcctacagagttttctaggcagccacacaccaggggctcccgcagtgtttgggaacagacatgatgcggtctacggcccagcagataccatggtccagtacatggaactcttcaacaagatccgcaagcagcagcaggtgccggtggctgggattcgttagtgatgagcagctgccagctgagctctgtcaccaggggtactccacaggaggagcaggtgctgactttcaggtccctggaccccagaaacccagggtagacatggactctactctccttctctggttctcagctgtggcttttgttctggggctgagtcccctccccaaccccctgactctcacacatagccccccatcagctgttttactccgtgccttactggatttggcctgtcctcaagaatggtaattatgaagagtggagaag

SEQ ID NO: 152206 - DNA, 307 bp, Homo sapiens
  Payload ID: 9949
  Gene Symbol: MED20
  Gene Name: mediator complex subunit 20
  ENST ID: ENST00000434077
  CDS Start-End: 126-307
tgttggggaactgaaggagtttctgtgggcggacagggaaccctgcgtttctactgtgtgattctgccaccttcctggcccgacgccatgggagtgacttgggctgttgaatagcactttctgtgatgatggaaatgttctctaacaacagtgtccaatacactagtcccagccacctgtggctctgggctactgtgctgaacagctcaagttcacagagttgtgtgtcccagatgcctgtggccgagggcaagagtgttcagcaaaccgtagagctccttacccggaaattggagatgcttggggc

SEQ ID NO: 152207 - DNA, 805 bp, Homo sapiens
  Payload ID: 9949
  Gene Symbol: MED20
  Gene Name: mediator complex subunit 20
  ENST ID: ENST00000613074
  CDS Start-End: 82-717
ggaactgaaggagtttctgtgggcggacagggaaccctgcgtttctactgtgtgattctgccaccttcctggcccgacgccatgggagtgacttgtgtgtcccagatgcctgtggccgagggcaagagtgttcagcaaaccgtagagctccttacccggaaattggagatgcttggggcagagaagcaaggaacattttgtgtggactgtgagacttaccatacggccgcctctacccttggcagccaaggtcagaccgggaagctgatgtatgtgatgcacaactcagagtacccattgagctgtttcgccctctttgagaatggcccttgccttattgctgacaccaactttgatgtgcttatggtgaagctcaagggctttttccagagtgctaaggccagcaagattgagacccggggcaccaggtaccagtactgtgacttcctggtgaaggtgggcacggtcacaatggggccagtgcccgggatctctgtggaggtggagtatggcccctgtgtggtagctagtgactgctggagtctgctgctcgagttcctacagagttttctaggcagccacacaccaggggctcccgcagtgtttgggaacagacatgatgcggtctacggcccagcagataccatggtccagtacatggaactcttcaacaagatccgcaagcagcagcaggtgccggtggctgggattcgttagtgatgagcagctgccagctgagctctgtcaccaggggtactccacaggaggagcaggtgctgactttcaggtccctggaccccagaaa

SEQ ID NO: 152208 - DNA, 1753 bp, Homo sapiens
  Payload ID: 9950
  Gene Symbol: MED21
  Gene Name: mediator complex subunit 21
  Uniprot ID: Q13503
  ENST ID: ENST00000282892
  CDS Start-End: 31-465
gttttggcgtctgtttgctgcggtaggaacatggcggatcggctcacgcagcttcaggacgctgtgaattcgcttgcagatcagttttgtaatgccattggagtattgcagcaatgtggtcctcctgcctctttcaataatattcagacagcaattaacaaagaccagccagctaaccctacagaagagtatgcccagctttttgcagcactgattgcacgaacagcaaaagacattgatgttttgatagattccttacccagtgaagaatctacagctgctttacaggctgctagcttgtataagctagaagaagaaaaccatgaagctgctacatgtctggaggatgttgtttatcgaggagacatgcttctggagaagatacaaagcgcacttgctgatattgcacagtcacagctgaagacaagaagtggtacccatagccagtctcttccagactcatagcatcagtggataccatgtggctgagaaaagaactgtttgagtgccattaagaattctgcatcagacttagatacaagccttaccaacaattacagaaacattaaacactatgacacattacctttttagctatttttaatagtcttctattttcactcttgataagcttataaaatcatgattgaatcagctttaaagcatcataccatcattttttaactgagtgaaattattaaggcatgtaatacattaatgaacataatataaggaaacatatgtaaaattctgttatgacataatttatgtctccattttgttgtattggccagtacttttacaaatcaaaacatctctcaagccaaaggagaagacagtaagaacagacataagggacattttagtttgggctagtgtcctgcctcttagaggtggcattgtgtaaatctgagctttgagcaagaaagttttggaaattgtgttgcttttaagaaatagagttagtgtggctggataagaaagtcacatttatgcaaatgtttcttctgctagaacctcatacctgttctagttcatctccacgtttattttaccaagagatcctctgtcaagagaatttcctggctgttgtgaaagaatttttctacatcctgaactatttttcctatttcttttcaccttgctttttttcatccttaatttgcttgtcatcacaatgaagtatgttttttgaatcatcaattctttctcattctccatttatctgaaggttcttttgcccttattaacctctcaacttttattgctgtattctagtcagaccagaacatacttccactacatcagttacttggcatcatttcacctcagtttattattgccaaataataatttgtgtcagcattttcaactatggttattcatccaacccttggatctctttgagtctactgataatctccactggaaaggtggaattgaaatgtggtccacattttaactagctatttcctggggctgtatttttcagaatatgctgagctacatttgctgcaatctgttgctattcagagtttaagtttcaggagaaaacaggaacaatagaacactctgcctgttatttttgttgtaatcaagcttttccacagttcttgaaaagtactatgtttcaaatttcaggaacaccagcgttagctgtaaaagttgcagcaatttattggctagtcatagaaaatttttgaacttttaactgtattttaattgatgtttattaaaaacactttgctatcag

SEQ ID NO: 152209 - DNA, 575 bp, Homo sapiens
  Payload ID: 9950
  Gene Symbol: MED21
  Gene Name: mediator complex subunit 21
  ENST ID: ENST00000546323
  CDS Start-End: 35-514
agctgttttggcgtctgtttgctgcggtaggaacatggcggatcggctcacgcagcttcaggacgctgtgaattcgcttgcagatcagttttgtaatgccattggagtattgcagcaatgtggtcctcctgcctctttcaataatattcagacagcaattaacaaagaccagccagctaaccctacagaagagtatgcccagctttttgcagcactgattgcacgaacagcaaaagacattgatgttttgatagattccttacccagtgaagaatctacagctgctttacaggctgctagcttgtataagctagaagaagaaaaccatgaagctgctacatgtctggaggatgttgtttatcgaggagacatgcttctggagaagatacaaagcgcacttgctgatattgcacagtcacagctgaagacaagaagtggtgaagtctctgtcacccaagctgaagtgcagttctgtgatcatggctcactgcagcttcaccctgggttcaggtgatcctcccacttcagcctcttcagtaactgggactacagttctaggggcaccactatcagtt

SEQ ID NO: 152210 - DNA, 578 bp, Homo sapiens
  Payload ID: 9950
  Gene Symbol: MED21
  Gene Name: mediator complex subunit 21
  ENST ID: ENST00000536711
  CDS Start-End: 19-282
gtttgctgcggtaggaacatggcggatcggctcacgcagcttcaggacgctgtgaattcggtgaggaatttcattcgattagcctctgtctttctctttcttgaggtaaagcaagggaggaaaggggcccaagaggcaaaacttgaaagtggggagcggactgagagacagggcttcggcataaagcgctctctcgggaggcgccaccgcgaactcggaggtttgaggccggctgccgggcggtgcttgaaggtgcgggagggagcagactctttcgcttgaggagaccgggaagatcgttcttgtccggcttgcagatcagttttgtaatgccattggagtattgcagcaatgtggtcctcctgcctctttcaataatattcagacagcaattaacaaagaccagccagctaaccctacagaagagtatgcccagctttttgcagcactgattgcacgaacagcaaaagacattgatgttttgatagattccttacccagtgaagaatctacagctgctttacaggctgctagcttgtataagctagaagaagaaaaccatgaagctgctacatgtc

SEQ ID NO: 152211 - DNA, 1437 bp, Homo sapiens
  Payload ID: 9951
  Gene Symbol: MED22
  Gene Name: mediator complex subunit 22
  Uniprot ID: Q15528
  ENST ID: ENST00000343730
  CDS Start-End: 235-837
aaaaatcgaggcggggccgagaggctgcggcggctgactaggttttcggaccgcggcgcggcggggaagagagactgcggcgggagggccaggccgtgggagagacgcgggaaagtgcgggtcgcagaggcacttgaccaccccgccctaggccgacccggcggacgcggcgtctggtgtgcgggcgctggggcgggtcccaggtctccccgctgcgctgcttgaggctcggccatggcccagcagagagccctgccccagagcaaggagacgctgctgcagtcctacaacaagcggctgaaggacgacattaagtccatcatggacaacttcaccgagatcatcaagaccgccaagattgaggacgagacgcaggtgtcacgggccactcagggtgaacaggacaattacgagatgcatgtgcgagccgccaacatcgtccgagccggcgagtccctgatgaagctggtgtccgacctcaagcagttcctgatcctcaatgacttcccctccgtgaacgaggccattgaccagcgcaaccagcagctgcgcacactgcaggaggagtgcgaccggaagctcatcacgctgcgagacgagatctccattgacctctacgagctggaggaggagtattactcgtccagctcaagcctttgcgaagctaatgacctgcctctgtgcgaagcttacgggaggctggacctcgacacagactctgctgatggcctctcggcccctctgctggcgtccccggagcccagtgctggccccctacaggtggcagcccctgcccactcccatgctggtggccctggccccactgagcacgcctgagcctccggggccacgcttcgttctcaggaacaaaacctgaggcagccctttggatgccctcacagccttgcttctctcagcctaggttcccatttggggacttcaggaccccagagccactaggacttccttgggaagcccgttagcccagggtgggtcccgccaggacagtagggaaacagttgtttccctagccatttccgaatagcccatcattccgagtcatcatctctgtttgctgccttcctggccagccaggtggaagaaagtttccaagctaggtctggcccgttggggatctcagcagtggggcaggagggtgcctgatttcggggagtcctgacccgagcctgttgtcagagttgggaggggctctgagcagtgttgggcaggccgggtctcccatcccgaggccagcgttcctgtgcagagccccatccactggttcttgccctgagccacatatgtctgtgccatgggctgagtgccacgacaggcccgtgtgacagctgctgcccacgcatgtggaagctaggtgggactcattcctaattctgccgttgtaatgagacttgattaaaacaccgccacttttttgca

SEQ ID NO: 152212 - DNA, 987 bp, Homo sapiens
  Payload ID: 9951
  Gene Symbol: MED22
  Gene Name: mediator complex subunit 22
  ENST ID: ENST00000371999
  CDS Start-End: 215-619
aaaaatcgaggcggggccgagaggctgcggcggctgactaggttttcggaccgcggcgcggcggggaagagagactgcggcgggagggccaggccgtgggagagacgcgggaaagtgcgggtcgcagaggcacttgaccaccccgccctaggccgacccggcggacgcggcgtctggtcccaggtctccccgctgcgctgcttgaggctcggccatggcccagcagagagccctgccccagagcaaggagacgctgctgcagtcctacaacaagcggctgaaggacgacattaagtccatcatggacaacttcaccgagatcatcaagaccgccaagattgaggacgagacgcaggtgtcacgggccactcagggtgaacaggacaattacgagatgcatgtccgagccggcgagtccctgatgaagctggtgtccgacctcaagcagttcctgatcctcaatgacttcccctccgtgaacgaggccattgaccagcgcaaccagcagctgcgcacactgcaggaggagtgcgaccggaagctcatcacgctgcgagacgagatctccattgacctctacgagctggaggaggagtattactcgtccaggtataaatagcgctggactccccatgcagagcgggagcctgcctacctgggcctggccagcaggcagggctgccttctgctttttcaaattcttgctggtcttagcagtggagccatgcctgggtttcagagcagagctcctggccagagcgtttgaccgacagacaattcacatccatatgccagggccctgggcctttcccacagtgcaatgtgatgaaaaccacaggactcacgccagtcggataggccgagtctggagaagggaggcgcctggctgtatcccccgcaggccctcttccgagagccttcctcctcgggcagtgcgttctggggctgtgctgctcctgttaccttctgaatccatatgtagagatt

SEQ ID NO: 152213 - DNA, 560 bp, Homo sapiens
  Payload ID: 9951
  Gene Symbol: MED22
  Gene Name: mediator complex subunit 22
  ENST ID: ENST00000446777
  CDS Start-End: 148-560
gtgggagagacgcgggaaagtgcgggtcgcagaggcacttgaccaccccgccctaggccgacccggcggacgcggcgtctggtgtgcgggcgctggggcgggtatgagggtcccaggtctccccgctgcgctgcttgaggctcggccatggcccagcagagagccctgccccagagcaaggagacgctgctgcagtcctacaacaagcggctgaaggacgacattaagtccatcatggacaacttcaccgagatcatcaagaccgccaagattgaggacgagacgcaggtgtcacgggccactcagggtgaacaggacaattacgagatgcatgtgcgagccgccaacatcgtccgagccggcgagtccctgatgaagctggtgtccgacctcaagcagttcctgatcctcaatgacttcccctccgtgaacgaggccattgaccagcgcaaccagcagctgcgcacactgcaggaggagtgcgaccggaagctcatcacgctgcgagacgagatctccattgacctctacgagctggaggaggagtattactcgtccag

SEQ ID NO: 152214 - DNA, 561 bp, Homo sapiens
  Payload ID: 9951
  Gene Symbol: MED22
  Gene Name: mediator complex subunit 22
  ENST ID: ENST00000457204
  CDS Start-End: 229-561
attcctataaagctaaaaatcgaggcggggccgagaggctgcggcggctgactaggttttcggaccgcggcgcggcggggaagagagactgcggcgggagggccaggccgtgggagagacgcgggaaagtgcgggtcgcagaggcacttgaccaccccgccctaggccgacccggcggacgcggcgtctggtcccaggtctccccgctgcgctgcttgaggctcggccatggcccagcagagagccctgccccagagcaaggagacgctgctgcagtcctacaacaagcggctgaaggacgacattaagtccatcatggacaacttcaccgagatcatcaagaccgccaagattgaggacgagacgcaggtgtcacgggccactcagggtgaacaggacaattacgagatgcatgtgcgagccgccaacatcgtccgagccggcgagtccctgatgaagctggtgtccgacctcaagcagttcctgatcctcaatgacttcccctccgtgaacgaggccattgaccagcgcaaccagcagctgcgcacactgcaggaggag

SEQ ID NO: 152215 - DNA, 532 bp, Homo sapiens
  Payload ID: 9951
  Gene Symbol: MED22
  Gene Name: mediator complex subunit 22
  ENST ID: ENST00000494177
  CDS Start-End: 128-532
aaagctaaaaatcgaggcggggccgagaggctgcggcggctgactaggttttcggaccgcggcgcggcggggaagagagactgcggcgggtcccaggtctccccgctgcgctgcttgaggctcggccatggcccagcagagagccctgccccagagcaaggagacgctgctgcagtcctacaacaagcggctgaaggacgacattaagtccatcatggacaacttcaccgagatcatcaagaccgccaagattgaggacgagacgcaggtgtcacgggccactcagggtgaacaggacaattacgagatgcatgtgcgagccgccaacatcgtccgagccggcgagtccctgatgaagctggtgtccgacctcaagcagttcctgatcctcaatgacttcccctccgtgaacgaggccattgaccagcgcaaccagcagctgcgcacactgcaggaggagtgcgaccggaagctcatcacgctgcgagacgagatctccattgacctctacgagctggaggaggagtattac

SEQ ID NO: 152216 - DNA, 3867 bp, Homo sapiens
  Payload ID: 9951
  Gene Symbol: MED22
  Gene Name: mediator complex subunit 22
  Uniprot ID: Q15528
  ENST ID: ENST00000610888
  CDS Start-End: 235-657
aaaaatcgaggcggggccgagaggctgcggcggctgactaggttttcggaccgcggcgcggcggggaagagagactgcggcgggagggccaggccgtgggagagacgcgggaaagtgcgggtcgcagaggcacttgaccaccccgccctaggccgacccggcggacgcggcgtctggtgtgcgggcgctggggcgggtcccaggtctccccgctgcgctgcttgaggctcggccatggcccagcagagagccctgccccagagcaaggagacgctgctgcagtcctacaacaagcggctgaaggacgacattaagtccatcatggacaacttcaccgagatcatcaagaccgccaagattgaggacgagacgcaggtgtcacgggccactcagggtgaacaggacaattacgagatgcatgtgcgagccgccaacatcgtccgagccggcgagtccctgatgaagctggtgtccgacctcaagcagttcctgatcctcaatgacttcccctccgtgaacgaggccattgaccagcgcaaccagcagctgcgcacactgcaggaggagtgcgaccggaagctcatcacgctgcgagacgagatctccattgacctctacgagctggaggaggagtattactcgtccaggtataaatagcgctggactccccatgcagagcgggagcctgcctacctgggcctggccagcaggcagggctgccttctgctttttcaaattcttgctggtcttagcagtggagccatgcctgggtttcagagcagagctcctggccagagcgtttgaccgacagacaattcacatccatatgccagggccctgggcctttcccacagtgcaatgtgatgaaaaccacaggactcacgccagtcggataggccgagtctggagaagggaggcgcctggctgtatcccccgcaggccctcttccgagagccttcctcctcgggcagtgcgttctggggctgtgctgctcctgttaccttctgaatccatatgtagagatttcagccaaggctgggccagccttttttgggcagtcaggtccacacctatgtccagggcaccagggatgcaattccatgtggatgtcaccaaaccccagtgtggaggcagggacagtcatgggaatgtgggggatgaagcccaggcagggaatggccttgaaagccattggagctccaattcgtgacccactcagccttatccacggagctggagccaacctacgtgccaggccccgtgctgggtcccagggatgcagaagggtcaaaacccatcatcctgacccttgtggggctccgtaagaagctgaaaccttcgaccgtttgagctggaggggccctgagaaatcagagtctacgtatcatttacttagggggaaacttaggctggagacagggaggccttccactctgccccattagcttagaaaatcaagattcagtccagcagatgcagagtccatgtccatcttgtgccttctcctggacaaacctttccttcctggtggtggatttaaaatactcctttctgcccattggccatgctgggagccacagatatccagagccagcatgacctggggcttggtttccctgccctgggctcagtggcactgctgagctgcagcagtcctagagttttccagggggttctgagggaatctttggtccccagtactcattaactcagcagacatgaggcagcatttcctccacactagggtggctgagaggggtcctggggtgtttcagacccttctgggcatctccttccacagctgttcagtttgtcggtctctttgaggcagccaccgtccctgagggcccctgcacagagcagctgtgggcctgtaattcagcctgcctgccttgccttggggcagggagagagggaacctgctcacggccctgcagcagagcagggcgcaaacccaggacatctgtgccaggcttcccatgccctcccccaacagtccctcagcttcacccagcggggcttccaggccagcctgtgtcccctcccgcaggcctcctgtccacaccagcgccccctggggggcctcacacagcccctgtggcagaagcagttgccctcctctgtacattgcctttaagcgaccaggtcctggccgagtttcctctgccccttcttgctggtcccccaaagggcgctccgctccctgccctgccctgccctgttccgcatgagctgcgcctctgtgctcgcctgccccctctctgcttgttagttgctctttctggctctgcctctcctttgcgttcctcgggatgccactctgtgcccaggacggttctgagactgaacactgagggcaggagcaagggaggaagccaggggcgaggcaggccgcgggaaagccagggcccctgcctgcaggttagaaagaggcgagcgtggattgtcacagctgcgggcatgggaagggctagctgagctcttcacctgcatcctggctgccgtgaggattccccgtgttagaggtggggacgcctgctggaggccgcctggctgatgtagggctatcgggaagtgccagggcctgtgttcccaactgtcgcccccttcaggctaagtctcaggcagggacagacccagaaagaacacagtctgccctcagagagctctttgcagtgtagtgacactggggtttctgcagtcagggaggagggagggtggccaggctgacagctttttgcaagaggagggggaccagcaccagctgggaggcataggctaggacaggcccacgtggaggctgggcaggaagggcctgctgaggtcacacagctgttggtggttgggccagggcggcttcctcctttcagaatgctagggtggctctcaccactggccgcctctccttgccaggcctgccaactcaggggacagatggagcaggagtggagaaagggaaaggcaggtctggggtgtggtcgtgttttcttaactctgcttctgtcttgctctcccctcccctggctttcctctctgcctgctcctgtctctccctggggtttctggtggtggaaaagctcaagcctttgcgaagctaatgacctgcctctgtgcgaagcttacgggaggctggacctcgacacagactctgctgatggcctctcggcccctctgctggcgtccccggagcccagtgctggccccctacaggtggcagcccctgcccactcccatgctggtggccctggccccactgagcacgcctgagcctccggggccacgcttcgttctcaggaacaaaacctgaggcagccctttggatgccctcacagccttgcttctctcagcctaggttcccatttggggacttcaggaccccagagccactaggacttccttgggaagcccgttagcccagggtgggtcccgccaggacagtagggaaacagttgtttccctagccatttccgaatagcccatcattccgagtcatcatctctgtttgctgccttcctggccagccaggtggaagaaagtttccaagctaggtctggcccgttggggatctcagcagtggggcaggagggtgcctgatttcggggagtcctgacccgagcctgttgtcagagttgggaggggctctgagcagtgttgggcaggccgggtctcccatcccgaggccagcgttcctgtgcagagccccatccactggttcttgccctgagccacatatgtctgtgccatgggctgagtgccacgacaggcccgtgtgacagctgctgcccacgcatgtggaagctaggtgggactcattcctaattctgccgttgtaatgagacttgattaaaacaccgccacttttttgca

SEQ ID NO: 152217 - DNA, 3886 bp, Homo sapiens
  Payload ID: 9951
  Gene Symbol: MED22
  Gene Name: mediator complex subunit 22
  Uniprot ID: Q15528
  ENST ID: ENST00000614493
  CDS Start-End: 255-677
acaaacaatgcgagtgcgtccaggagtccgctcggtcgtgcgccagactccgaacctagggggccccgggccctccctgagcaccgcgcgcaaaggcccggccccagggccaggcaactccagcgccgaggccgtccagtgcggctggagggcagaggccgagaggcgcggcgcggaacttgagccccttgtcccggcgcaccggggaaccatgaggtcccaggtctccccgctgcgctgcttgaggctcggccatggcccagcagagagccctgccccagagcaaggagacgctgctgcagtcctacaacaagcggctgaaggacgacattaagtccatcatggacaacttcaccgagatcatcaagaccgccaagattgaggacgagacgcaggtgtcacgggccactcagggtgaacaggacaattacgagatgcatgtgcgagccgccaacatcgtccgagccggcgagtccctgatgaagctggtgtccgacctcaagcagttcctgatcctcaatgacttcccctccgtgaacgaggccattgaccagcgcaaccagcagctgcgcacactgcaggaggagtgcgaccggaagctcatcacgctgcgagacgagatctccattgacctctacgagctggaggaggagtattactcgtccaggtataaatagcgctggactccccatgcagagcgggagcctgcctacctgggcctggccagcaggcagggctgccttctgctttttcaaattcttgctggtcttagcagtggagccatgcctgggtttcagagcagagctcctggccagagcgtttgaccgacagacaattcacatccatatgccagggccctgggcctttcccacagtgcaatgtgatgaaaaccacaggactcacgccagtcggataggccgagtctggagaagggaggcgcctggctgtatcccccgcaggccctcttccgagagccttcctcctcgggcagtgcgttctggggctgtgctgctcctgttaccttctgaatccatatgtagagatttcagccaaggctgggccagccttttttgggcagtcaggtccacacctatgtccagggcaccagggatgcaattccatgtggatgtcaccaaaccccagtgtggaggcagggacagtcatgggaatgtgggggatgaagcccaggcagggaatggccttgaaagccattggagctccaattcgtgacccactcagccttatccacggagctggagccaacctacgtgccaggccccgtgctgggtcccagggatgcagaagggtcaaaacccatcatcctgacccttgtggggctccgtaagaagctgaaaccttcgaccgtttgagctggaggggccctgagaaatcagagtctacgtatcatttacttagggggaaacttaggctggagacagggaggccttccactctgccccattagcttagaaaatcaagattcagtccagcagatgcagagtccatgtccatcttgtgccttctcctggacaaacctttccttcctggtggtggatttaaaatactcctttctgcccattggccatgctgggagccacagatatccagagccagcatgacctggggcttggtttccctgccctgggctcagtggcactgctgagctgcagcagtcctagagttttccagggggttctgagggaatctttggtccccagtactcattaactcagcagacatgaggcagcatttcctccacactagggtggctgagaggggtcctggggtgtttcagacccttctgggcatctccttccacagctgttcagtttgtcggtctctttgaggcagccaccgtccctgagggcccctgcacagagcagctgtgggcctgtaattcagcctgcctgccttgccttggggcagggagagagggaacctgctcacggccctgcagcagagcagggcgcaaacccaggacatctgtgccaggcttcccatgccctcccccaacagtccctcagcttcacccagcggggcttccaggccagcctgtgtcccctcccgcaggcctcctgtccacaccagcgccccctggggggcctcacacagcccctgtggcagaagcagttgccctcctctgtacattgcctttaagcgaccaggtcctggccgagtttcctctgccccttcttgctggtcccccaaagggcgctccgctccctgccctgccctgccctgttccgcatgagctgcgcctctgtgctcgcctgccccctctctgcttgttagttgctctttctggctctgcctctcctttgcgttcctcgggatgccactctgtgcccaggacggttctgagactgaacactgagggcaggagcaagggaggaagccaggggcgaggcaggccgcgggaaagccagggcccctgcctgcaggttagaaagaggcgagcgtggattgtcacagctgcgggcatgggaagggctagctgagctcttcacctgcatcctggctgccgtgaggattccccgtgttagaggtggggacgcctgctggaggccgcctggctgatgtagggctatcgggaagtgccagggcctgtgttcccaactgtcgcccccttcaggctaagtctcaggcagggacagacccagaaagaacacagtctgccctcagagagctctttgcagtgtagtgacactggggtttctgcagtcagggaggagggagggtggccaggctgacagctttttgcaagaggagggggaccagcaccagctgggaggcataggctaggacaggcccacgtggaggctgggcaggaagggcctgctgaggtcacacagctgttggtggttgggccagggcggcttcctcctttcagaatgctagggtggctctcaccactggccgcctctccttgccaggcctgccaactcaggggacagatggagcaggagtggagaaagggaaaggcaggtctggggtgtggtcgtgttttcttaactctgcttctgtcttgctctcccctcccctggctttcctctctgcctgctcctgtctctccctggggtttctggtggtggaaaagctcaagcctttgcgaagctaatgacctgcctctgtgcgaagcttacgggaggctggacctcgacacagactctgctgatggcctctcggcccctctgctggcgtccccggagcccagtgctggccccctacaggtggcagcccctgcccactcccatgctggtggccctggccccactgagcacgcctgagcctccggggccacgcttcgttctcaggaacaaaacctgaggcagccctttggatgccctcacagccttgcttctctcagcctaggttcccatttggggacttcaggaccccagagccactaggacttccttgggaagcccgttagcccagggtgggtcccgccaggacagtagggaaacagttgtttccctagccatttccgaatagcccatcattccgagtcatcatctctgtttgctgccttcctggccagccaggtggaagaaagtttccaagctaggtctggcccgttggggatctcagcagtggggcaggagggtgcctgatttcggggagtcctgacccgagcctgttgtcagagttgggaggggctctgagcagtgttgggcaggccgggtctcccatcccgaggccagcgttcctgtgcagagccccatccactggttcttgccctgagccacatatgtctgtgccatgggctgagtgccacgacaggcccgtgtgacagctgctgcccacgcatgtggaagctaggtgggactcattcctaattctgccgttgtaatgagacttgattaaaacaccgccacttttttgc

SEQ ID NO: 152218 - DNA, 4367 bp, Homo sapiens
  Payload ID: 9951
  Gene Symbol: MED22
  Gene Name: mediator complex subunit 22
  Uniprot ID: Q15528
  ENST ID: ENST00000610672
  CDS Start-End: 583-1185
ctgagcaccgcgcgcaaaggcccggccccagggccaggcaactccagcgccgaggccgtccagtgcggctggagggcagaggccgagaggcgcggcgcggaacttgagccccttgtcccggcgcaccggggaaccatgagggatgttaagcgagggagtggaattaccccccttttttttttcttttggagacgtagtctccccctgtcgcccaggctggagtgcagtggcgcgatctcggctcactgcgacctgtgcttcccgggttcaagcgattctcctgcctcagcctcccgagtagctgggattacaggcgcctgccatcacgcccggctaatttttgtatttttagtagagttggggtttcaccatgttggtcaggctagtctcaaactcctgacctcaggtgatccctgcctcggcctcccaaagtgctgggattacaggcgtgagccaccgcgcccggttggaatgaccactttttaggacctcttccctgccgcgcagagactggagggagcggggcccgcagtgcagggatgaggtcccaggtctccccgctgcgctgcttgaggctcggccatggcccagcagagagccctgccccagagcaaggagacgctgctgcagtcctacaacaagcggctgaaggacgacattaagtccatcatggacaacttcaccgagatcatcaagaccgccaagattgaggacgagacgcaggtgtcacgggccactcagggtgaacaggacaattacgagatgcatgtgcgagccgccaacatcgtccgagccggcgagtccctgatgaagctggtgtccgacctcaagcagttcctgatcctcaatgacttcccctccgtgaacgaggccattgaccagcgcaaccagcagctgcgcacactgcaggaggagtgcgaccggaagctcatcacgctgcgagacgagatctccattgacctctacgagctggaggaggagtattactcgtccagctcaagcctttgcgaagctaatgacctgcctctgtgcgaagcttacgggaggctggacctcgacacagactctgctgatggcctctcggcccctctgctggcgtccccggagcccagtgctggccccctacaggtggcagcccctgcccactcccatgctggtggccctggccccactgagcacgcctgagcctccggggccacgcttcgttctcaggaacaaaacctgaggcagccctttggatgccctcacagccttgcttctctcagcctaggttcccatttggggacttcaggaccccagagccactaggacttccttgggaagcccgttagcccagggtgggtcccgccaggacagtagggaaacagttgtttccctagccatttccgaatagcccatcattccgagtcatcatctctgtttgctgccttcctggccagccaggtggaagaaagtttccaagctaggtctggcccgttggggatctcagcagtggggcaggagggtgcctgatttcggggagtcctgacccgagcctgttgtcagagttgggaggggctctgagcagtgttgggcaggccgggtctcccatcccgaggccagcgttcctgtgcagagccccatccactggttcttgccctgagccacatatgtctgtgccatgggctgagtgccacgacaggcccgtgtgacagctgctgcccacgcatgtggaagctaggtgggactcattcctaattctgccgttgtaatgagacttgattaaaacaccgccacttttttgcattgctgctctttcttcctcattccttgtcagtccaggaccatccttggtctcccagcagttgtccgagcagcagctcctcagctctgcctggacagcctggcccaaggtcactctctcctcattggcacctggtaggtccccagtattcagtgaatggacctgctgccatcattgcacatccaggcacctgtgcctctgctggcatctcatcctcactgctaccagagccggtgctcctagtgccggtattttagagaggagaggatgtggacttagaaggggtgaggtgtaccacggccacagagctaggaagtgaagtggcaggaatcagaacttgaacctgatggaagtctagacccagtgtcttttggtgccaggctcaccttagaaatgcagaagtcacaacactgggcaggaagtgtggggggagcacagttcgtccacaggaagtgtgggggagcaccccaccccagttcctccagcaccatccatgtgcttcatcttctcatgggggaggccatcatctttcccgatgtatgaatgaggtgacagcccaggatccagccttggggacaggtaagaacacagctgacccatcaccacctgaaccagagaaccccacagccaagcagaaggcaccagacagacaggagcttgaggcccagtcctggctctggacctggcttctggggtggcctagggaagttgcttcccctctgagggagaatttccccattgatacgtgtggtgatctgttcccgcactattttagctgtggaaatgccttgtacttaaccactgaggaagaaaaagattacaaccagatggaagcatatatgaagcgagagcccggaaggaactggccagactttgtggtgggatcccacttaccctgttcctaaaatcctgagcgataagacctgccatcagcttcattttctgcttggccaggaccatcattcccatgtgaaaatcaagttatttctccttcttaaagccaagccgctctgctgaccttttttcctctccagctcatggccttggcagcagagctccacggggaagcagctgataaccatttgcagttctctcttgggcctacgtcagacaggttttgtctccatgactctagcaaaactacacctattaaggtcaccagtggcctccacattgctaagccccggcccattctcagtccatgtaactcttttatcccaagctttttattttgagggcagtggaactcatggaagtacttgtcagtttgcctctctgagcacattctccttcgtccatcaccacaaccagaatggatgatgattgcatatcctctggtatctagctgtattcagatttcttcagttgttccccaaatagtttttttaatgcctattttttttctttctagtccagaggtcttttatttttttaacacccacgatgccatgaattcatagggaagaggttccagcagctcaggctccttcccattggttctcacagtgtgctgctctgggtggagcaggctggcgcttcagttgaatccaggtacctttctctttggcttccctctttttctgatcattttccttcacgcgtttcaggaagctctctcggctcttagagtgcttagtgtgctgaatatgcacattcattctcttggcaagaatcttgcccttacttgtttacaacagtgccaacagcatgctggggaacactgtagactctcccagtctagccatggtgacatttgtggggcattcctttttgaacagtacccattcccttgatatctacaatatcacctttctcatcaatttgcatatacttggccaaaggaacaactgcatgttttctgaaaggcctagagaacatatattgggtgcctctcctctttccctttgtgttcgtcattttggcgaattactggaaggtggcggttccagctgaaaggcttttatgcctgtttttattgtgtgttgcatttggttgttattttggagtcttaaaatctaaaacaggaccaggtcaggcccagtggctcctgctgtaatcccagcactttgagaagccaaagcgggtggatcacttgtggtcagaagttttgagaccagcctgggcaacatggagaaaccccgtctctactaaaaagtatagaaatcggccgggcgcggtggcttacgcctgcaaccccagcactttgggaggccaaggcgggcggatcacctgaggtcgggatttccagaccagcctgaccaacatggagaaaccctgtctctactaaaaagtatagaaattggccgggcgcggtggctcacgcctgtaatcccagcactttgggaggccgaggcgggcagatcacctgaggtcgggagttccagaccagcctgaccaacatggagaaaccctgtctctactaaaaatacaaaaattagccgggcgtgctggtccatgcctataatcccagctacttggtaggcggaggcaggagaatcgcttgaacccgggaggcggaggttgcagtgagccgagatcgggccactgcactccagcttgggcaacaagagcgaaactccacctc

SEQ ID NO: 152219 - DNA, 561 bp, Homo sapiens; identical to SEQ ID NO: 152214
  Payload ID: 9951
  Gene Symbol: MED22
  Gene Name: Mediator complex subunit 22
  ENST ID: ENST00000630604
  CDS Start-End: 229-561

SEQ ID NO: 152220 - DNA, 3867 bp, Homo sapiens; identical to SEQ ID NO: 152216
  Payload ID: 9951
  Gene Symbol: MED22
  Gene Name: Mediator complex subunit 22
  ENST ID: ENST00000626118
  CDS Start-End: 235-657

SEQ ID NO: 152221 - DNA, 4367 bp, Homo sapiens; identical to SEQ ID NO: 152218
  Payload ID: 9951
  Gene Symbol: MED22
  Gene Name: Mediator complex subunit 22
  ENST ID: ENST00000629522
  CDS Start-End: 583-1185

SEQ ID NO: 152222 - DNA, 532 bp, Homo sapiens; identical to SEQ ID NO: 152215
  Payload ID: 9951
  Gene Symbol: MED22
  Gene Name: Mediator complex subunit 22
  ENST ID: ENST00000629994
  CDS Start-End: 128-532

SEQ ID NO: 152223 - DNA, 3886 bp, Homo sapiens; identical to SEQ ID NO: 152217
  Payload ID: 9951
  Gene Symbol: MED22
  Gene Name: Mediator complex subunit 22
  ENST ID: ENST00000629975
  CDS Start-End: 255-677

SEQ ID NO: 152224 - DNA, 987 bp, Homo sapiens; identical to SEQ ID NO: 152212
  Payload ID: 9951
  Gene Symbol: MED22
  Gene Name: Mediator complex subunit 22
  ENST ID: ENST00000629701
  CDS Start-End: 215-619

SEQ ID NO: 152225 - DNA, 560 bp, Homo sapiens; identical to SEQ ID NO: 152213
  Payload ID: 9951
  Gene Symbol: MED22
  Gene Name: Mediator complex subunit 22
  ENST ID: ENST00000629491
  CDS Start-End: 148-560

SEQ ID NO: 152226 - DNA, 1437 bp, Homo sapiens; identical to SEQ ID NO: 152211
  Payload ID: 9951
  Gene Symbol: MED22
  Gene Name: Mediator complex subunit 22
  ENST ID: ENST00000631196
  CDS Start-End: 235-837

SEQ ID NO: 152227 - DNA, 4581 bp, Homo sapiens
  Payload ID: 9952
  Gene Symbol: MED23
  Gene Name: mediator complex subunit 23
  Uniprot ID: Q9ULK4
  ENST ID: ENST00000354577
  CDS Start-End: 157-4254
gagggaacgctccaggtaaagcgctgggggaggaagcgacgccgaggagctacggtttcctccagaggtctccgcccctctgcccctatattcccagagctcgagtctgatccgggccttgccgggcaccctggaaaggcgggggtgatagtacagatggagacgcaactgcagagcattttcgaagaggtggtgaaaacggaagttatagaagaggcttttcctggcatgtttatggatactcctgaagatgagaaaacaaaactaattagctgtttgggggccttcagacagttttggggtggtctttctcaggagtctcatgaacagtgtatccagtggattgttaagtttattcatggtcagcatagtcctaaaagaatttcttttctttatgactgcttagcaatggcagttgagactggtctccttccacccaggctggtttgtgaatccctgataaactctgacactcttgagtgggaaagaacacagctttgggccttaacatttaaactggttcggaaaataattgggggagtggattacaagggtgttcgagatctcttaaaagtgattttggagaagattttgacaattcctaatacagtgagctctgctgttgtacagcagcttctggcagcaagagaggttatagcatatatcttggaaagaaatgcctgcttattaccagcctattttgcagtcactgagatcaggaaactgtatcctgaaggcaaacttccacactggttacttggaaacctagtatcagactttgtggataccttcaggcccacagcaaggataaactccatttgtggtcgctgtagtcttctgccagttgtaaataattcgggtgccatttgtaattcatggaaactggatcctgctactcttcgttttcctttgaaaggccttttgccatatgataaggatctgtttgaaccacagactgctttgttgagatatgtattggagcagccttattccagggatatggtctgcaatatgctaggtttaaataagcagaccttgaacattgctcagcacaagcagcgctgccctgtgctggaggaccagttggtggatctggttgtttatgccatggagcgatctgagaccgaggagaagtttgacgatgggggaacaagccaactcctgtggcagcatctctcaagtcagctcattttctttgtgcttttccagtttgcaagttttccacatatggtgctttctcttcatcagaagttagcagggcgaggactgattaaaggcagagatcatcttatgtgggttctcctgcaattcatttctggaagtattcagaaaaatgcactagctgattttctccctgtgatgaagctcttcgacttgctatacccagaaaaagaatatatcccagttcctgatattaacaaaccccagtcaacccatgcctttgcaatgacctgtatttggattcatctcaatagaaaagctcaaaatgacaactccaagctacagattccaatacctcattccctaagacttcaccatgagttcctgcagcagagtctaagaaataaaagtttacagatgaatgactataagattgctctattgtgtaatgcatactctacaaattcagaatgttttacattacccatgggagctctggtagaaactatttatggaaatggaattatgaggatacctctccctggaacaaactgtatggcttcaggatctattacccccttacctatgaacctcctggattcactgacagttcatgccaaaatgagccttattcacagcattgcaaccagggtgataaaacttgctcatgcaaagtccagtgtggccttggctccagccctagtggaaacttacagtcgtttattggtctatatggaaatagagtctttgggcatcaaaggatttatcagtcagcttttgccaactgttttcaaatcacatgcatgggggatcttacacacactccttgagatgtttagctaccggatgcatcatattcagcctcattacagagttcagctcctgagtcatcttcatactttggctgcagttgcacaaacaaaccagaaccagctccatctttgtgtcgagagcactgctctcaggcttataacagcattaggtagctcagaggtacaaccgcagtttacacgcttccttagtgatcccaaaacagtgctctcagcagaatctgaagaactgaaccgagccttgatattgaccttggctagagcaactcatgtaacagatttttttacaggctctgattcaattcagggaacttggtgtaaagacatacttcagaccatcatgagtttcactcctcataattgggcttcacacaccctgagctgttttccaggcccactacaggcattcttcaaacaaaataatgtgcctcaggaaagccgttttaatctgaaaaaaaatgtggaggaggagtataggaagtggaagtcaatgagcaacgaaaacgacattattacccacttctctatgcagggctcccctcctctctttctttgtcttctctggaaaatgctcttggaaacagatcatattaatcagattggctatagagtattagagagaattggagccagggccttggtagcccatgtgaggacatttgcagatttcctggtatatgagttttctacatcagcagggggtcagcaactcaataaatgcattgaaattcttaatgacatggtatggaagtataacattgttacactggacagattaattctctgcctggccatgcgtagtcacgaaggaaatgaagcccaggtttgttatttcataattcagttgctgttactcaaaccaaacgattttagaaatcgagtaagtgactttgtgaaggaaaattccccagagcactggttacagaatgactggcacaccaagcacatgaattatcacaagaaatatccagagaagttgtattttgagggcctcgcggaacaggtggatcctcctgtacagatccagtctccctatctgcccatctattttgggaatgtgtgtcttcgattccttccagtatttgatatagtaatccacagatttttagagttgcttccggtatccaaatcactggagactctactggatcatctaggaggcttatataaatttcatgatcgtccagtgacttatctgtataacactctgcactattatgaaatgcacctgagagaccgcgcatttctcaaacgaaaactcgtccatgcgatcattggctctctgaaggataatcgaccgcagggctggtgtctaagtgacacttacctgaaatgcgctatgaatgcacgagaggaaaatccttgggttccagatgacacctactattgcagattgattggcagactagtcgatacgatggctggcaaatctcctggtccctttccaaactgtgactggagattcaatgagtttcccaacccagctgcccatgctctccatgttacttgtgtggagctcatggccttggcagtttcaggcaaagaagttgggaatgcccttctaaatgttgtcctaaaaagtcagcctttagtgccaagagagaacattacagcatggatgaatgcaattggtttgatcatcactgccctaccagagccatattggattgttcttcatgatcgaattgtgagtgtcatcagcagccccagcttgacgtctgaaacagagtgggttggctatccattccgcctctttgatttcactgcctgtcatcagtcctactctgagatgagttgtagctatacgttagctcttgcacatgctgtgtggcaccattctagcatcggacaactttctctcattccaaagtttcttactgaagtacttcttcctatagtgaagaccgaattccagttgctttatgtataccatcttgttggaccatttttacaaagatttcagcaagagagaactcgttgtatgatagagattggtgtggcgttttatgacatgctgctgaatgttgaccagtgtagcacccatttaaattacatggatcccatctgtgacttcctctatcacatgaagtatatgtttactggtgacagcgtgaaagagcaagtagagaagattatctgtaacttaaaaccagctttaaaacttcgtcttcgattcatcacacacattagcaagatggagccagctgcagtgcctccacaagccatgaacagtgggtctccagcacctcagtctaatcagtaaaaagtcagagtacacagcaagggttccaaattaagaggaagcaaaacgctgcccagatcctgagaaacctggagaaaatcaaccttagtagtttcaactcatacattgtcttgtttgattttgttctttgttttttatcctctttaagcacagatgcgtgttgaagtctaaggtgttctgtcatcacactctctttactagaataagtgtgcccaggcagaaaaaaaagtgtattcaatgttgctggcatgtgtggattcacagctcgtggctgtaaggaaatctgggggtttcataaatccattaaaatccttttagagttgccaa

SEQ ID NO: 152228 - DNA, 2811 bp, Homo sapiens
  Payload ID: 9952
  Gene Symbol: MED23
  Gene Name: mediator complex subunit 23
  Uniprot ID: Q9ULK4
  ENST ID: ENST00000368053
  CDS Start-End: 151-2811
acgctccaggtaaagcgctgggggaggaagcgacgccgaggagctacggtttcctccagaggtctccgcccctctgcccctatattcccagagctcgagtctgatccgggccttgccgggcaccctggaaaggcgggggtgatagtacagatggagacgcaactgcagagcattttcgaagaggtggtgaaaacggaagttatagaagaggcttttcctggcatgtttatggatactcctgaagatgagaaaacaaaactaattagctgtttgggggccttcagacagttttggggtggtctttctcaggagtctcatgaacagtgtatccagtggattgttaagtttattcatggtcagcatagtcctaaaagaatttcttttctttatgactgcttagcaatggcagttgagactggtctccttccacccaggctggtttgtgaatccctgataaactctgacactcttgagtgggaaagaacacagctttgggccttaacatttaaactggttcggaaaataattgggggagtggattacaagggtgttcgagatctcttaaaagtgattttggagaagattttgacaattcctaatacagtgagctctgctgttgtacagcagcttctggcagcaagagaggttatagcatatatcttggaaagaaatgcctgcttattaccagcctattttgcagtcactgagatcaggaaactgtatcctgaaggcaaacttccacactggttacttggaaacctagtatcagactttgtggataccttcaggcccacagcaaggataaactccatttgtggtcgctgtagtcttctgccagttgtaaataattcgggtgccatttgtaattcatggaaactggatcctgctactcttcgttttcctttgaaaggccttttgccatatgataaggatctgtttgaaccacagactgctttgttgagatatgtattggagcagccttattccagggatatggtctgcaatatgctaggtttaaataagcagaccttgaacattgctcagcacaagcagcgctgccctgtgctggaggaccagttggtggatctggttgtttatgccatggagcgatctgagaccgaggagaagtttgacgatgggggaacaagccaactcctgtggcagcatctctcaagtcagctcattttctttgtgcttttccagtttgcaagttttccacatatggtgctttctcttcatcagaagttagcagggcgaggactgattaaaggcagagatcatcttatgtgggttctcctgcaattcatttctggaagtattcagaaaaatgcactagctgattttctccctgtgatgaagctcttcgacttgctatacccagaaaaagaatatatcccagttcctgatattaacaaaccccagtcaacccatgcctttgcaatgacctgtatttggattcatctcaatagaaaagctcaaaatgacaactccaagctacagattccaatacctcattccctaagacttcaccatgagttcctgcagcagagtctaagaaataaaagtttacagatgaatgactataagattgctctattgtgtaatgcatactctacaaattcagaatgttttacattacccatgggagctctggtagaaactatttatggaaatggaattatgaggatacctctccctggaacaaactgtatggcttcaggatctattacccccttacctatgaacctcctggattcactgacagttcatgccaaaatgagccttattcacagcattgcaaccagggtgataaaacttgctcatgcaaagtccagtgtggccttggctccagccctagtggaaacttacagtcgtttattggtctatatggaaatagagtctttgggcatcaaaggatttatcagtcagcttttgccaactgttttcaaatcacatgcatgggggatcttacacacactccttgagatgtttagctaccggatgcatcatattcagcctcattacagagttcagctcctgagtcatcttcatactttggctgcagttgcacaaacaaaccagaaccagctccatctttgtgtcgagagcactgctctcaggcttataacagcattaggtagctcagaggtacaaccgcagtttacacgcttccttagtgatcccaaaacagtgctctcagcagaatctgaagaactgaaccgagccttgatattgaccttggctagagcaactcatgtaacagatttttttacaggctctgattcaattcagggaacttggtgtaaagacatacttcagaccatcatgagtttcactcctcataattgggcttcacacaccctgagctgttttccaggcccactacaggcattcttcaaacaaaataatgtgcctcaggaaagccgttttaatctgaaaaaaaatgtggaggaggagtataggaagtggaagtcaatgagcaacgaaaacgacattattacccacttctctatgcagggctcccctcctctctttctttgtcttctctggaaaatgctcttggaaacagatcatattaatcagattggctatagagtattagagagaattggagccagggccttggtagcccatgtgaggacatttgcagatttcctggtatatgagttttctacatcagcagggggtcagcaactcaataaatgcattgaaattcttaatgacatggtatggaagtataacattgttacactggacagattaattctctgcctggtaagaataaatacatttctaagcttattctcttag

SEQ ID NO: 152229 - DNA, 4576 bp, Homo sapiens
  Payload ID: 9952
  Gene Symbol: MED23
  Gene Name: mediator complex subunit 23
  ENST ID: ENST00000368058
  CDS Start-End: 18-4142
cgggggtgatagtacagatggagacgcaactgcagagcattttcgaagaggtggtgaaaacggaagttatagaagaggcttttcctggcatgtttatggatactcctgaagatgagaaaacaaaactaattagctgtttgggggccttcagacagttttggggtggtctttctcaggagtctcatgaacagtgtatccagtggattgttaagtttattcatggtcagcatagtcctaaaagaatttcttttctttatgactgcttagcaatggcagttgagactggtctccttccacccaggctggtttgtgaatccctgataaactctgacactcttgagtgggaaagaacacagctttgggccttaacatttaaactggttcggaaaataattgggggagtggattacaagggtgttcgagatctcttaaaagtgattttggagaagattttgacaattcctaatacagtgagctctgctgttgtacagcagcttctggcagcaagagaggttatagcatatatcttggaaagaaatgcctgcttattaccagcctattttgcagtcactgagatcaggaaactgtatcctgaaggcaaacttccacactggttacttggaaacctagtatcagactttgtggataccttcaggcccacagcaaggataaactccatttgtggtcgctgtagtcttctgccagttgtaaataattcgggtgccatttgtaattcatggaaactggatcctgctactcttcgttttcctttgaaaggccttttgccatatgataaggatctgtttgaaccacagactgctttgttgagatatgtattggagcagccttattccagggatatggtctgcaatatgctaggtttaaataagcagaccttgaacattgctcagcacaagcagcgctgccctgtgctggaggaccagttggtggatctggttgtttatgccatggagcgatctgagaccgaggagaagtttgacgatgggggaacaagccaactcctgtggcagcatctctcaagtcagctcattttctttgtgcttttccagtttgcaagttttccacatatggtgctttctcttcatcagaagttagcagggcgaggactgattaaaggcagagatcatcttatgtgggttctcctgcaattcatttctggaagtattcagaaaaatgcactagctgattttctccctgtgatgaagctcttcgacttgctatacccagaaaaagaatatatcccagttcctgatattaacaaaccccagtcaacccatgcctttgcaatgacctgtatttggattcatctcaatagaaaagctcaaaatgacaactccaagctacagattccaatacctcattccctaagacttcaccatgagttcctgcagcagagtctaagaaataaaagtttacagatgaatgactataagattgctctattgtgtaatgcatactctacaaattcagaatgttttacattacccatgggagctctggtagaaactatttatggaaatggaattatgaggatacctctccctggaacaaactgtatggcttcaggatctattacccccttacctatgaacctcctggattcactgacagttcatgccaaaatgagccttattcacagcattgcaaccagggtgataaaacttgctcatgcaaagtccagtgtggccttggctccagccctagtggaaacttacagtcgtttattggtctatatggaaatagagtctttgggcatcaaaggatttatcagtcagcttttgccaactgttttcaaatcacatgcatgggggatcttacacacactccttgagatgtttagctaccggatgcatcatattcagcctcattacagagttcagctcctgagtcatcttcatactttggctgcagttgcacaaacaaaccagaaccagctccatctttgtgtcgagagcactgctctcaggcttataacagcattaggtagctcagaggtacaaccgcagtttacacgcttccttagtgatcccaaaacagtgctctcagcagaatctgaagaactgaaccgagccttgatattgaccttggctagagcaactcatgtaacagatttttttacaggctctgattcaattcagggaacttggtgtaaagacatacttcagaccatcatgagtttcactcctcataattgggcttcacacaccctgagctgttttccaggcccactacaggcattcttcaaacaaaataatgtgcctcaggaaagccgttttaatctgaaaaaaaatgtggaggaggagtataggaagtggaagtcaatgagcaacgaaaacgacattattacccacttctctatgcagggctcccctcctctctttctttgtcttctctggaaaatgctcttggaaacagatcatattaatcagattggctatagagtattagagagaattggagccagggccttggtagcccatgtgaggacatttgcagatttcctggtatatgagttttctacatcagcagggggtcagcaactcaataaatgcattgaaattcttaatgacatggtatggaagtataacattgttacactggacagattaattctctgcctggccatgcgtagtcacgaaggaaatgaagcccaggtttgttatttcataattcagttgctgttactcaaaccaaacgattttagaaatcgagtaagtgactttgtgaaggaaaattccccagagcactggttacagaatgactggcacaccaagcacatgaattatcacaagaaatatccagagaagttgtattttgagggcctcgcggaacaggtggatcctcctgtacagatccagtctccctatctgcccatctattttgggaatgtgtgtcttcgattccttccagtatttgatatagtaatccacagatttttagagttgcttccggtatccaaatcactggagactctactggatcatctaggaggcttatataaatttcatgatcgtccagtgacttatctgtataacactctgcactattatgaaatgcacctgagagaccgcgcatttctcaaacgaaaactcgtccatgcgatcattggctctctgaaggataatcgaccgcagggctggtgtctaagtgacacttacctgaaatgcgctatgaatgcacgagaggaaaatccttgggttccagatgacacctactattgcagattgattggcagactagtcgatacgatggctggcaaatctcctggtccctttccaaactgtgactggagattcaatgagtttcccaacccagctgcccatgctctccatgttacttgtgtggagctcatggccttggcagtttcaggcaaagaagttgggaatgcccttctaaatgttgtcctaaaaagtcagcctttagtgccaagagagaacattacagcatggatgaatgcaattggtttgatcatcactgccctaccagagccatattggattgttcttcatgatcgaattgtgagtgtcatcagcagccccagcttgacgtctgaaacagagtgggttggctatccattccgcctctttgatttcactgcctgtcatcagtcctactctgagatgagttgtagctatacgttagctcttgcacatgctgtgtggcaccattctagcatcggacaactttctctcattccaaagtttcttactgaagtacttcttcctatagtgaagaccgaattccagttgctttatgtataccatcttgttggaccatttttacaaagatttcagcaagagagaactcgttgtatgatagagattggtgtggcgttttatgacatgctgctgaatgttgaccagtgtagcacccatttaaattacatggatcccatctgtgacttcctctatcacatgaagtatatgtttactggtgacagcgtgaaagagcaagtaaagaagattatctgtaacttaaaaccagctttaaaacttcgtcttcgattcatcacacacattagcaagatggagccagctgcagtgcctccacaagccatgaacagtgggtctccagcacctcagtctaatcaggtgcccgtgtctttaccagtaactcagtgaagccagactgtactgtggagaaagtagaaatatatccgtctttgagagtggactcaaaccttttaaatctgaatgcgatcacactgtagtgatatagtagaagcagtgatgatattcagattgttttattttgattcaaatgatgaatctgttgacaccttataactcccatctccctatctatatttttgtctctaagagatcaagtaagatacatgttgttcatattcataacaacttattagagctatgtaggaacatagaggtatctgtgatcaaatgacttgtcattggcactttcagtctttcctattctagccgttgtttttgtttgtattttttattattaatgacatatttagtcttcagatatattattttaaaggcaccacacatgtaaaacagttattacaaatattttatacataaatctc

SEQ ID NO: 152230 - DNA, 4446 bp, Homo sapiens
  Payload ID: 9952
  Gene Symbol: MED23
  Gene Name: mediator complex subunit 23
  Uniprot ID: Q9ULK4
  ENST ID: ENST00000368060
  CDS Start-End: 181-4275
gttcctgctgttggctgggctcgggagggaacgctccaggtaaagcgctgggggaggaagcgacgccgaggagctacggtttcctccagaggtctccgcccctctgcccctatattcccagagctcgagtctgatccgggccttgccgggcaccctggaaaggcgggggtgatagtacagatggagacgcaactgcagagcattttcgaagaggtggtgaaaacggaagttatagaagaggcttttcctggcatgtttatggatactcctgaagatgagaaaacaaaactaattagctgtttgggggccttcagacagttttggggtggtctttctcaggagtctcatgaacagtgtatccagtggattgttaagtttattcatggtcagcatagtcctaaaagaatttcttttctttatgactgcttagcaatggcagttgagactggtctccttccacccaggctggtttgtgaatccctgataaactctgacactcttgagtgggaaagaacacagctttgggccttaacatttaaactggttcggaaaataattgggggagtggattacaagggtgttcgagatctcttaaaagtgattttggagaagattttgacaattcctaatacagtgagctctgctgttgtacagcagcttctggcagcaagagaggttatagcatatatcttggaaagaaatgcctgcttattaccagcctattttgcagtcactgagatcaggaaactgtatcctgaaggcaaacttccacactggttacttggaaacctagtatcagactttgtggataccttcaggcccacagcaaggataaactccatttgtggtcgctgtagtcttctgccagttgtaaataattcgggtgccatttgtaattcatggaaactggatcctgctactcttcgttttcctttgaaaggccttttgccatatgataaggatctgtttgaaccacagactgctttgttgagatatgtattggagcagccttattccagggatatggtctgcaatatgctaggtttaaataagcagcacaagcagcgctgccctgtgctggaggaccagttggtggatctggttgtttatgccatggagcgatctgagaccgaggagaagtttgacgatgggggaacaagccaactcctgtggcagcatctctcaagtcagctcattttctttgtgcttttccagtttgcaagttttccacatatggtgctttctcttcatcagaagttagcagggcgaggactgattaaaggcagagatcatcttatgtgggttctcctgcaattcatttctggaagtattcagaaaaatgcactagctgattttctccctgtgatgaagctcttcgacttgctatacccagaaaaagaatatatcccagttcctgatattaacaaaccccagtcaacccatgcctttgcaatgacctgtatttggattcatctcaatagaaaagctcaaaatgacaactccaagctacagattccaatacctcattccctaagacttcaccatgagttcctgcagcagagtctaagaaataaaagtttacagatgaatgactataagattgctctattgtgtaatgcatactctacaaattcagaatgttttacattacccatgggagctctggtagaaactatttatggaaatggaattatgaggatacctctccctggaacaaactgtatggcttcaggatctattacccccttacctatgaacctcctggattcactgacagttcatgccaaaatgagccttattcacagcattgcaaccagggtgataaaacttgctcatgcaaagtccagtgtggccttggctccagccctagtggaaacttacagtcgtttattggtctatatggaaatagagtctttgggcatcaaaggatttatcagtcagcttttgccaactgttttcaaatcacatgcatgggggatcttacacacactccttgagatgtttagctaccggatgcatcatattcagcctcattacagagttcagctcctgagtcatcttcatactttggctgcagttgcacaaacaaaccagaaccagctccatctttgtgtcgagagcactgctctcaggcttataacagcattaggtagctcagaggtacaaccgcagtttacacgcttccttagtgatcccaaaacagtgctctcagcagaatctgaagaactgaaccgagccttgatattgaccttggctagagcaactcatgtaacagatttttttacaggctctgattcaattcagggaacttggtgtaaagacatacttcagaccatcatgagtttcactcctcataattgggcttcacacaccctgagctgttttccaggcccactacaggcattcttcaaacaaaataatgtgcctcaggaaagccgttttaatctgaaaaaaaatgtggaggaggagtataggaagtggaagtcaatgagcaacgaaaacgacattattacccacttctctatgcagggctcccctcctctctttctttgtcttctctggaaaatgctcttggaaacagatcatattaatcagattggctatagagtattagagagaattggagccagggccttggtagcccatgtgaggacatttgcagatttcctggtatatgagttttctacatcagcagggggtcagcaactcaataaatgcattgaaattcttaatgacatggtatggaagtataacattgttacactggacagattaattctctgcctggccatgcgtagtcacgaaggaaatgaagcccaggtttgttatttcataattcagttgctgttactcaaaccaaacgattttagaaatcgagtaagtgactttgtgaaggaaaattccccagagcactggttacagaatgactggcacaccaagcacatgaattatcacaagaaatatccagagaagttgtattttgagggcctcgcggaacaggtggatcctcctgtacagatccagtctccctatctgcccatctattttgggaatgtgtgtcttcgattccttccagtatttgatatagtaatccacagatttttagagttgcttccggtatccaaatcactggagactctactggatcatctaggaggcttatataaatttcatgatcgtccagtgacttatctgtataacactctgcactattatgaaatgcacctgagagaccgcgcatttctcaaacgaaaactcgtccatgcgatcattggctctctgaaggataatcgaccgcagggctggtgtctaagtgacacttacctgaaatgcgctatgaatgcacgagaggaaaatccttgggttccagatgacacctactattgcagattgattggcagactagtcgatacgatggctggcaaatctcctggtccctttccaaactgtgactggagattcaatgagtttcccaacccagctgcccatgctctccatgttacttgtgtggagctcatggccttggcagtttcaggcaaagaagttgggaatgcccttctaaatgttgtcctaaaaagtcagcctttagtgccaagagagaacattacagcatggatgaatgcaattggtttgatcatcactgccctaccagagccatattggattgttcttcatgatcgaattgtgagtgtcatcagcagccccagcttgacgtctgaaacagagtgggttggctatccattccgcctctttgatttcactgcctgtcatcagtcctactctgagatgagttgtagctatacgttagctcttgcacatgctgtgtggcaccattctagcatcggacaactttctctcattccaaagtttcttactgaagtacttcttcctatagtgaagaccgaattccagttgctttatgtataccatcttgttggaccatttttacaaagatttcagcaagagagaactcgttgtatgatagagattggtgtggcgttttatgacatgctgctgaatgttgaccagtgtagcacccatttaaattacatggatcccatctgtgacttcctctatcacatgaagtatatgtttactggtgacagcgtgaaagagcaagtagagaagattatctgtaacttaaaaccagctttaaaacttcgtcttcgattcatcacacacattagcaagatggagccagctgcagtgcctccacaagccatgaacagtgggtctccagcacctcagtctaatcaggttgacactctcacctgacagatgatgtaattcttcaatttttataatcttaaaatttttaaattttatatttgtaaatacagtacacattttatttcttggattttgagagacattgttaattttgggggaattggcattgcgaaagacttgaaaactaatgagtaaagtctgctgaatgaataaacc

SEQ ID NO: 152231 - DNA, 5233 bp, Homo sapiens
  Payload ID: 9952
  Gene Symbol: MED23
  Gene Name: mediator complex subunit 23
  Uniprot ID: Q9ULK4
  ENST ID: ENST00000368068
  CDS Start-End: 181-4287
gttcctgctgttggctgggctcgggagggaacgctccaggtaaagcgctgggggaggaagcgacgccgaggagctacggtttcctccagaggtctccgcccctctgcccctatattcccagagctcgagtctgatccgggccttgccgggcaccctggaaaggcgggggtgatagtacagatggagacgcaactgcagagcattttcgaagaggtggtgaaaacggaagttatagaagaggcttttcctggcatgtttatggatactcctgaagatgagaaaacaaaactaattagctgtttgggggccttcagacagttttggggtggtctttctcaggagtctcatgaacagtgtatccagtggattgttaagtttattcatggtcagcatagtcctaaaagaatttcttttctttatgactgcttagcaatggcagttgagactggtctccttccacccaggctggtttgtgaatccctgataaactctgacactcttgagtgggaaagaacacagctttgggccttaacatttaaactggttcggaaaataattgggggagtggattacaagggtgttcgagatctcttaaaagtgattttggagaagattttgacaattcctaatacagtgagctctgctgttgtacagcagcttctggcagcaagagaggttatagcatatatcttggaaagaaatgcctgcttattaccagcctattttgcagtcactgagatcaggaaactgtatcctgaaggcaaacttccacactggttacttggaaacctagtatcagactttgtggataccttcaggcccacagcaaggataaactccatttgtggtcgctgtagtcttctgccagttgtaaataattcgggtgccatttgtaattcatggaaactggatcctgctactcttcgttttcctttgaaaggccttttgccatatgataaggatctgtttgaaccacagactgctttgttgagatatgtattggagcagccttattccagggatatggtctgcaatatgctaggtttaaataagcagcacaagcagcgctgccctgtgctggaggaccagttggtggatctggttgtttatgccatggagcgatctgagaccgaggagaagtttgacgatgggggaacaagccaactcctgtggcagcatctctcaagtcagctcattttctttgtgcttttccagtttgcaagttttccacatatggtgctttctcttcatcagaagttagcagggcgaggactgattaaaggcagagatcatcttatgtgggttctcctgcaattcatttctggaagtattcagaaaaatgcactagctgattttctccctgtgatgaagctcttcgacttgctatacccagaaaaagaatatatcccagttcctgatattaacaaaccccagtcaacccatgcctttgcaatgacctgtatttggattcatctcaatagaaaagctcaaaatgacaactccaagctacagattccaatacctcattccctaagacttcaccatgagttcctgcagcagagtctaagaaataaaagtttacagatgaatgactataagattgctctattgtgtaatgcatactctacaaattcagaatgttttacattacccatgggagctctggtagaaactatttatggaaatggaattatgaggatacctctccctggaacaaactgtatggcttcaggatctattacccccttacctatgaacctcctggattcactgacagttcatgccaaaatgagccttattcacagcattgcaaccagggtgataaaacttgctcatgcaaagtccagtgtggccttggctccagccctagtggaaacttacagtcgtttattggtctatatggaaatagagtctttgggcatcaaaggatttatcagtcagcttttgccaactgttttcaaatcacatgcatgggggatcttacacacactccttgagatgtttagctaccggatgcatcatattcagcctcattacagagttcagctcctgagtcatcttcatactttggctgcagttgcacaaacaaaccagaaccagctccatctttgtgtcgagagcactgctctcaggcttataacagcattaggtagctcagaggtacaaccgcagtttacacgcttccttagtgatcccaaaacagtgctctcagcagaatctgaagaactgaaccgagccttgatattgaccttggctagagcaactcatgtaacagatttttttacaggctctgattcaattcagggaacttggtgtaaagacatacttcagaccatcatgagtttcactcctcataattgggcttcacacaccctgagctgttttccaggcccactacaggcattcttcaaacaaaataatgtgcctcaggaaagccgttttaatctgaaaaaaaatgtggaggaggagtataggaagtggaagtcaatgagcaacgaaaacgacattattacccacttctctatgcagggctcccctcctctctttctttgtcttctctggaaaatgctcttggaaacagatcatattaatcagattggctatagagtattagagagaattggagccagggccttggtagcccatgtgaggacatttgcagatttcctggtatatgagttttctacatcagcagggggtcagcaactcaataaatgcattgaaattcttaatgacatggtatggaagtataacattgttacactggacagattaattctctgcctggccatgcgtagtcacgaaggaaatgaagcccaggtttgttatttcataattcagttgctgttactcaaaccaaacgattttagaaatcgagtaagtgactttgtgaaggaaaattccccagagcactggttacagaatgactggcacaccaagcacatgaattatcacaagaaatatccagagaagttgtattttgagggcctcgcggaacaggtggatcctcctgtacagatccagtctccctatctgcccatctattttgggaatgtgtgtcttcgattccttccagtatttgatatagtaatccacagatttttagagttgcttccggtatccaaatcactggagactctactggatcatctaggaggcttatataaatttcatgatcgtccagtgacttatctgtataacactctgcactattatgaaatgcacctgagagaccgcgcatttctcaaacgaaaactcgtccatgcgatcattggctctctgaaggataatcgaccgcagggctggtgtctaagtgacacttacctgaaatgcgctatgaatgcacgagaggaaaatccttgggttccagatgacacctactattgcagattgattggcagactagtcgatacgatggctggcaaatctcctggtccctttccaaactgtgactggagattcaatgagtttcccaacccagctgcccatgctctccatgttacttgtgtggagctcatggccttggcagtttcaggcaaagaagttgggaatgcccttctaaatgttgtcctaaaaagtcagcctttagtgccaagagagaacattacagcatggatgaatgcaattggtttgatcatcactgccctaccagagccatattggattgttcttcatgatcgaattgtgagtgtcatcagcagccccagcttgacgtctgaaacagagtgggttggctatccattccgcctctttgatttcactgcctgtcatcagtcctactctgagatgagttgtagctatacgttagctcttgcacatgctgtgtggcaccattctagcatcggacaactttctctcattccaaagtttcttactgaagtacttcttcctatagtgaagaccgaattccagttgctttatgtataccatcttgttggaccatttttacaaagatttcagcaagagagaactcgttgtatgatagagattggtgtggcgttttatgacatgctgctgaatgttgaccagtgtagcacccatttaaattacatggatcccatctgtgacttcctctatcacatgaagtatatgtttactggtgacagcgtgaaagagcaagtagagaagattatctgtaacttaaaaccagctttaaaacttcgtcttcgattcatcacacacattagcaagatggagccagctgcagtgcctccacaagccatgaacagtgggtctccagcacctcagtctaatcaggtgcccgtgtctttaccagtaactcagtgaagccagactgtactgtggagaaagtagaaatatatccgtctttgagagtggactcaaaccttttaaatctgaatgcgatcacactgtagtgatatagtagaagcagtgatgatattcagattgttttattttgattcaaatgatgaatctgttgacaccttataactcccatctccctatctatatttttgtctctaagagatcaagtaagatacatgttgttcatattcataacaacttattagagctatgtaggaacatagaggtatctgtgatcaaatgacttgtcattggcactttcagtctttcctattctagccgttgtttttgtttgtattttttattattaatgacatatttagtcttcagatatattattttaaaggcaccacacatgtaaaacagttattacaaatattttatacataaatctcttggtagattttcagaataatagagatttatatcaagaaaaggaatctagattttgttgcattgtaggagcaaacaaggcttcatattctttttaaaatgacttgaaattttattataaatttccatagtttctatcaaggtcaactggcagttttattacctttgctatggacttgaacttactgtataaaattagttggaagccatgtaagaaaataacatctgaaaattcttgaacttaaaatcatgcttaaatggttgattctccaatttctttttttaaaaataagttaattgcttttgcaggttgacactctcacctgacagatgatgtaattcttcaatttttataatcttaaaatttttaaattttatatttgtaaatacagtacacattttatttcttggattttgagagacattgttaattttgggggaattggcattgcgaaagacttgaaaactaatgagtaaagtctgctgaatgaataaaccgtgtgattgtttcccg

SEQ ID NO: 152232 - DNA, 1636 bp, Homo sapiens
  Payload ID: 9952
  Gene Symbol: MED23
  Gene Name: mediator complex subunit 23
  Uniprot ID: Q9ULK4
  ENST ID: ENST00000539158
  CDS Start-End: 12-1439
tgatagtacagatggagacgcaactgcagagcattttcgaagaggtggtgaaaacggaagttatagaagaggcttttcctggcatgtttatggatactcctgaagatgagaaaacaaaactaattagctgtttgggggccttcagacagttttggggtggtctttctcaggagtctcatgaacagtgtatccagtggattgttaagtttattcatggtcagcatagtcctaaaagaatttcttttctttatgactgcttagcaatggcagttgagactggtctccttccacccaggctggtttgtgaatccctgataaactctgacactcttgagtgggaaagaacacagctttgggccttaacatttaaactggttcggaaaataattgggggagtggattacaagggtgttcgagatctcttaaaagtgattttggagaagattttgacaattcctaatacagtgagctctgctgttgtacagcagcttctggcagcaagagaggttatagcatatatcttggaaagaaatgcctgcttattaccagcctattttgcagtcactgagatcaggaaactgtatcctgaaggcaaacttccacactggttacttggaaacctagtatcagactttgtggataccttcaggcccacagcaaggataaactccatttgtggtcgctgtagtcttctgccagttgtaaataattcgggtgccatttgtaattcatggaaactggatcctgctactcttcgttttcctttgaaaggccttttgccatatgataaggatctgtttgaaccacagactgctttgttgagatatgtattggagcagccttattccagggatatggtctgcaatatgctaggtttaaataagcagcacaagcagcgctgccctgtgctggaggaccagttggtggatctggttgtttatgccatggagcgatctgagaccgaggagaagtttgacgatgggggaacaagccaactcctgtggcagcatctctcaagtcagctcattttctttgtgcttttccagtttgcaagttttccacatatggtgctttctcttcatcagaagttagcagggcgaggactgattaaaggcagagatcatcttatgtgggttctcctgcaattcatttctggaagtattcagaaaaatgcactagctgattttctccctgtgatgaagctcttcgacttgctatacccagaaaaagaatatatcccagttcctgatattaacaaaccccagtcaacccatgcctttgcaatgacctgtatttggattcatctcaatagaaaagctcaaaatgacaactccaagctacagattccaatacctcattccctaagacttcaccatgagtcagcttttgccaactgttttcaaatcacatgcatgggggatcttacacacactccttgagatgtttagctaccggatgcatcatattcagcctcattacagagttcagctcctgagtcatcttcatactttggctgcagttgcacaaacaaaccagaaccagctccatctttgtgtcgagagcactgctctcaggcttataacagcattaggtagctcagaggtacaaccgcagtttacacgcttccttagtgatc

SEQ ID NO: 152233 - DNA, 3446 bp, Homo sapiens
  Payload ID: 9953
  Gene Symbol: MED24
  Gene Name: mediator complex subunit 24
  Uniprot ID: O75448
  ENST ID: ENST00000356271
  CDS Start-End: 85-3015
acaagtgccaaaatggcgatgcctaccacctagaactggattgtgcgctggccgccaccgctgccacctgctcagagtgaaataatgaaggtggtcaacctgaagcaagccattttgcaagcctggaaggagcgctggagtgactaccaatgggcaatcaacatgaagaaattctttcctaaaggagccacctgggatattctcaacctggcagatgcgttactagagcaggccatgattggaccatcccccaatcctctcatcttgtcctacctgaagtatgccattagttcccagtttgatgacttttctcgggacctgtgtgtccaggcattgctggacatcatggacatgttttgtgaccgtctgagctgtcacggcaaagcagaggaatgcatcggactgtgccgagcccttcttagcgccctccactggctgctgcgctgcacggcagcctctgcagagcggctgcgggaggggctggaggccggcactccagccgctggggagaagcagcttgccatgtgccttcagcgcctggagaaaaccctcagcagcaccaagaaccgggccctgctgcacatcgccaaactagaggaggcctcttcttggactgccatcgagcattctctcttgaaacttggagagatcctggccaatctcagcaacccgcagctccggagtcaggccgagcagtgtggcaccctcattaggagcatccccacgatgctgtctgtgcatgcggagcagatgcacaagaccggcttccccactgtccacgccgtgatcctgctcgagggcaccatgaacctgacaggcgagacgcagtccctggtggagcagctgacgatggtgaagcgcatgcagcatatccccaccccactttttgtcctggagatctggaaagcttgcttcgtggggctcattgagtctcccgagggtacggaggagctcaagtggacagctttcactttcctcaagattccacaggttttggtgaagttgaagaagtactctcatggagacaaggacttcactgaggatgtcaactgtgcttttgagttcctgctgaagctcacccccttgttggacaaagctgaccagcgctgcaactgtgactgtacaaacttcctgctccaagaatgtggcaagcaggggcttctgtctgaggccagcgtcaacaaccttatggctaagcgcaaagcggaccgagagcacgcaccccagcagaaatcgggagagaatgccaacatccagcccaacatccagctgatcctccgggcggagcccactgtcacaaacatcctcaagacgatggatgcagaccactctaagtcaccggagggactgctgggagtcctgggccacatgctgtccgggaagagtctggacttgctgctggctgccgccgccgccactggaaagctgaaatccttcgcccggaaattcatcaatttgaatgaattcacaacctatggcagcgaagaaagcaccaaaccggcctccgtccgggccctgctgtttgacatctccttcctcatgctgtgccatgtggcccagacctatggttcagaggtgattctgtccgagtcgcgcacaggagctgaggtgcccttcttcgagacctggatgcagacctgcatgcctgaggagggcaagatcctgaaccctgaccacccctgcttccgccccgactccaccaaagtggagtccctggtggccctgctcaacaactcctcggagatgaagctagtgcagatgaagtggcatgaggcctgtctcagcatctcagccgccatcttggaaatcctcaatgcctgggagaatggggtcctggccttcgagtccatccagaaaatcactgataacatcaaagggaaggtatgcagtctggcggtgtgtgctgtggcttggcttgtggcccacgtccggatgctggggctggatgagcgtgagaagtcgctgcagatgatccgccagctggcagggccactgtttagtgagaacaccctgcagttctacaatgagagggtggtgatcatgaactcgatcctggagcgcatgtgtgccgacgtgctgcagcagacagccacgcagatcaagtttccctccaccggggtggacacaatgccctactggaacctgctgccccccaagcggcccatcaaagaggtgctgacggacatttttgccaaggtgctggagaagggctgggtggacagccgctccatccacatctttgacaccctgctgcacatgggcggcgtctactggttctgcaacaacctgattaaggagctgctgaaggagacgcggaaggagcacacgctgcgggcagtggagctgctctactccatcttctgcctggacatgcagcaagtgaccctggtcctgctgggccacatcctacctggcctgctcactgactcctccaagtggcacagcctcatggaccccccgggcactgctcttgccaagctggccgtgtggtgtgccctcagttcctactcctcccacaagggacaggcgtccacccgccagaagaagagacaccgcgaagacattgaggattatatcagcctcttccccctggacgatgtgcagccttcgaagttgatgcgactgctgagctctaatgaggacgatgccaacatcctttcgagccccacagaccgatccatgagcagctccctctcagcctctcagctccacacggtcaacatgcgggaccctctgaaccgagtcctggccaacctgttcctgctcatctcctccatcctggggtctcgcaccgctggcccccacacccagttcgtgcagtggttcatggaggagtgtgtggactgcctggagcagggtggccgtggcagcgtcctgcagttcatgcccttcaccaccgtgtcggaactggtgaaggtgtcagccatgtccagccccaaggtggttctggccatcacggacctcagcctgcccctgggccgccaggtggctgctaaagccattgctgcactctgaggggcttggcatggccgcagtgggggctggggactggcgcagccccaggcgcctccaagggaagcagtgaggaaagatgaggcatcgtgcctcacatccgctccacatggtgcaagagcctctagcggcttccagttccccgctcctgactcctgacctccaggatgtctcccggtttcttctttcaaaatttcctctccatctgctggcacctgaggagagtgagcagcctggaccacaagcccagtggtcacccctgtgtgcgcccgccccagcccaggagtagtcttacctctgaggaactttctagatgcaaagtgtgtatgtgtgtgtgtgtgtgtgtgtgtgtgtgtttgtgtgtattttgtaatatgtgagggaaatctaccttcgttcatgtataaataaagctcctcgtggctccctttgtg

SEQ ID NO: 152234 - DNA, 3896 bp, Homo sapiens
  Payload ID: 9953
  Gene Symbol: MED24
  Gene Name: mediator complex subunit 24
  ENST ID: ENST00000394126
  CDS Start-End: 420-3464
ggtgcgatctcggctcaccccaacaacctccgcctcccgggttcaagcgattctactgcctcagcctcccgagtagctgggattacaggcatgcaccaccaagcccggctaattttgtatttttagtggagacgaggtttctccatgttggtcaggctagtctcgaactcctgacctccggtgattcgcccgcctctgcctcccgaagtgctgggattacaggtgcgagccactgcgctcggccgatactttcttagtgccccagtttaaggaagggcggttcaggaggagagagtctgacaggatcttactttatccctttagctctttttctttcaaattcctctgtctcgcttaaatcttcccgcatcttctcctttctatttaattctgccttccccggttctccttagaacctcatgtccttttctttagctccatttctttcacctcaaagctggccgccaccgctgccacctgctcagagtgaaataatgaaggtggtcaacctgaagcaagccattttgcaagcctggaaggagcgctggagtgactaccaatgggcaatcaacatgaagaaattctttcctaaaggagccacctgggatattctcaacctggcagatgcgttactagagcaggccatgattggaccatcccccaatcctctcatcttgtcctacctgaagtatgccattagttcccagatggtgtcctactcttctgtcctcacagccatcagtaagtttgatgacttttctcgggacctgtgtgtccaggcattgctggacatcatggacatgttttgtgaccgtctgagctgtcacggcaaagcagaggaatgcatcggactgtgccgagcccttcttagcgccctccactggctgctgcgctgcacggcagcctctgcagagcggctgcgggaggggctggaggccggcactccagccgctggggagaagcagcttgccatgtgccttcagcgcctggagaaaaccctcagcagcaccaagaaccgggccctgctgcacatcgccaaactagaggaggcctcttcttggactgccatcgagcattctctcttgaaacttggagagatcctggccaatctcagcaacccgcagctccggagtcaggccgagcagtgtggcaccctcattaggagcatccccacgatgctgtctgtgcatgcggagcagatgcacaagaccggcttccccactgtccacgccgtgatcctgctcgagggcaccatgaacctgacaggcgagacgcagtccctggtggagcagctgacgatggtgaagcgcatgcagcatatccccaccccactttttgtcctggagatctggaaagcttgcttcgtggggctcattgagtctcccgagggtacggaggagctcaagtggacagctttcactttcctcaagattccacaggttttggtgaagttgaagaagtactctcatggagacaaggacttcactgaggatgtcaactgtgcttttgagttcctgctgaagctcacccccttgttggacaaagctgaccagcgctgcaactgtgactgtacaaacttcctgctccaagaatgtggcaagcaggggcttctgtctgaggccagcgtcaacaaccttatggctaagcgcaaagcggaccgagagcacgcaccccagcagaaatcgggagagaatgccaacatccagcccaacatccagctgatcctccgggcggagcccactgtcacaaacatcctcaagacgatggatgcagaccactctaagtcaccggagggactgctgggagtcctgggccacatgctgtccgggaagagtctggacttgctgctggctgccgccgccgccactggaaagctgaaatccttcgcccggaaattcatcaatttgaatgaattcacaacctatggcagcgaagaaagcaccaaaccggcctccgtccgggccctgctgtttgacatctccttcctcatgctgtgccatgtggcccagacctatggttcagaggtgattctgtccgagtcgcgcacaggagctgaggtgcccttcttcgagacctggatgcagacctgcatgcctgaggagggcaagatcctgaaccctgaccacccctgcttccgccccgactccaccaaagtggagtccctggtggccctgctcaacaactcctcggagatgaagctagtgcagatgaagtggcatgaggcctgtctcagcatctcagccgccatcttggaaatcctcaatgcctgggagaatggggtcctggccttcgagtccatccagaaaatcactgataacatcaaagggaaggtatgcagtctggcggtgtgtgctgtggcttggcttgtggcccacgtccggatgctggggctggatgagcgtgagaagtcgctgcagatgatccgccagctggcagggccactgtttagtgagaacaccctgcagttctacaatgagagggtggtgatcatgaactcgatcctggagcgcatgtgtgccgacgtgctgcagcagacagccacgcagatcaagtttccctccaccggggtggacacaatgccctactggaacctgctgccccccaagcggcccatcaaagaggtgctgacggacatttttgccaaggtgctggagaagggctgggtggacagccgctccatccacatctttgacaccctgctgcacatgggcggcgtctactggttctgcaacaacctgattaaggagctgctgaaggagacgcggaaggagcacacgctgcgggcagtggagctgctctactccatcttctgcctggacatgcagcaagtgaccctggtcctgctgggccacatcctacctggcctgctcactgactcctccaagtggcacagcctcatggaccccccgggcactgctcttgccaagctggccgtgtggtgtgccctcagttcctactcctcccacaagggacaggcgtccacccgccagaagaagagacaccgcgaagacattgaggattatatcagcctcttccccctggacgatgtgcagccttcgaagttgatgcgactgctgagctctaatgaggacgatgccaacatcctttcgagccccacagaccgatccatgagcagctccctctcagcctctcagctccacacggtcaacatgcgggaccctctgaaccgagtcctggccaacctgttcctgctcatctcctccatcctggggtctcgcaccgctggcccccacacccagttcgtgcagtggttcatggaggagtgtgtggactgcctggagcagggtggccgtggcagcgtcctgcagttcatgcccttcaccaccgtgtcggaactggtgaaggtgtcagccatgtccagccccaaggtggttctggccatcacggacctcagcctgcccctgggccgccaggtggctgctaaagccattgctgcactctgaggggcttggcatggccgcagtgggggctggggactggcgcagccccaggcgcctccaagggaagcagtgaggaaagatgaggcatcgtgcctcacatccgctccacatggtgcaagagcctctagcggcttccagttccccgctcctgactcctgacctccaggatgtctcccggtttcttctttcaaaatttcctctccatctgctggcacctgaggagagtgagcagcctggaccacaagcccagtggtcacccctgtgtgcgcccgccccagcccaggagtagtcttacctctgaggaactttctagatgcaaagtgtgtatgtgtgtgtgtgtgtgtgtgtgtgtgtgtttgtgtgtattttgtaatatgtgagggaaatctaccttcgttcatgtataaataaagctcctcgtggctccctttgtga

SEQ ID NO: 152235 - DNA, 3456 bp, Homo sapiens
  Payload ID: 9953
  Gene Symbol: MED24
  Gene Name: mediator complex subunit 24
  Uniprot ID: O75448
  ENST ID: ENST00000394127
  CDS Start-End: 105-3035
aagtgccaaaatggcgatgcctaccacctagaactggattgtgcgctccatttctttcacctcaaagctggccgccaccgctgccacctgctcagagtgaaataatgaaggtggtcaacctgaagcaagccattttgcaagcctggaaggagcgctggagtgactaccaatgggcaatcaacatgaagaaattctttcctaaaggagccacctgggatattctcaacctggcagatgcgttactagagcaggccatgattggaccatcccccaatcctctcatcttgtcctacctgaagtatgccattagttcccagtttgatgacttttctcgggacctgtgtgtccaggcattgctggacatcatggacatgttttgtgaccgtctgagctgtcacggcaaagcagaggaatgcatcggactgtgccgagcccttcttagcgccctccactggctgctgcgctgcacggcagcctctgcagagcggctgcgggaggggctggaggccggcactccagccgctggggagaagcagcttgccatgtgccttcagcgcctggagaaaaccctcagcagcaccaagaaccgggccctgctgcacatcgccaaactagaggaggcctcttcttggactgccatcgagcattctctcttgaaacttggagagatcctggccaatctcagcaacccgcagctccggagtcaggccgagcagtgtggcaccctcattaggagcatccccacgatgctgtctgtgcatgcggagcagatgcacaagaccggcttccccactgtccacgccgtgatcctgctcgagggcaccatgaacctgacaggcgagacgcagtccctggtggagcagctgacgatggtgaagcgcatgcagcatatccccaccccactttttgtcctggagatctggaaagcttgcttcgtggggctcattgagtctcccgagggtacggaggagctcaagtggacagctttcactttcctcaagattccacaggttttggtgaagttgaagaagtactctcatggagacaaggacttcactgaggatgtcaactgtgcttttgagttcctgctgaagctcacccccttgttggacaaagctgaccagcgctgcaactgtgactgtacaaacttcctgctccaagaatgtggcaagcaggggcttctgtctgaggccagcgtcaacaaccttatggctaagcgcaaagcggaccgagagcacgcaccccagcagaaatcgggagagaatgccaacatccagcccaacatccagctgatcctccgggcggagcccactgtcacaaacatcctcaagacgatggatgcagaccactctaagtcaccggagggactgctgggagtcctgggccacatgctgtccgggaagagtctggacttgctgctggctgccgccgccgccactggaaagctgaaatccttcgcccggaaattcatcaatttgaatgaattcacaacctatggcagcgaagaaagcaccaaaccggcctccgtccgggccctgctgtttgacatctccttcctcatgctgtgccatgtggcccagacctatggttcagaggtgattctgtccgagtcgcgcacaggagctgaggtgcccttcttcgagacctggatgcagacctgcatgcctgaggagggcaagatcctgaaccctgaccacccctgcttccgccccgactccaccaaagtggagtccctggtggccctgctcaacaactcctcggagatgaagctagtgcagatgaagtggcatgaggcctgtctcagcatctcagccgccatcttggaaatcctcaatgcctgggagaatggggtcctggccttcgagtccatccagaaaatcactgataacatcaaagggaaggtatgcagtctggcggtgtgtgctgtggcttggcttgtggcccacgtccggatgctggggctggatgagcgtgagaagtcgctgcagatgatccgccagctggcagggccactgtttagtgagaacaccctgcagttctacaatgagagggtggtgatcatgaactcgatcctggagcgcatgtgtgccgacgtgctgcagcagacagccacgcagatcaagtttccctccaccggggtggacacaatgccctactggaacctgctgccccccaagcggcccatcaaagaggtgctgacggacatttttgccaaggtgctggagaagggctgggtggacagccgctccatccacatctttgacaccctgctgcacatgggcggcgtctactggttctgcaacaacctgattaaggagctgctgaaggagacgcggaaggagcacacgctgcgggcagtggagctgctctactccatcttctgcctggacatgcagcaagtgaccctggtcctgctgggccacatcctacctggcctgctcactgactcctccaagtggcacagcctcatggaccccccgggcactgctcttgccaagctggccgtgtggtgtgccctcagttcctactcctcccacaagggacaggcgtccacccgccagaagaagagacaccgcgaagacattgaggattatatcagcctcttccccctggacgatgtgcagccttcgaagttgatgcgactgctgagctctaatgaggacgatgccaacatcctttcgagccccacagaccgatccatgagcagctccctctcagcctctcagctccacacggtcaacatgcgggaccctctgaaccgagtcctggccaacctgttcctgctcatctcctccatcctggggtctcgcaccgctggcccccacacccagttcgtgcagtggttcatggaggagtgtgtggactgcctggagcagggtggccgtggcagcgtcctgcagttcatgcccttcaccaccgtgtcggaactggtgaaggtgtcagccatgtccagccccaaggtggttctggccatcacggacctcagcctgcccctgggccgccaggtggctgctaaagccattgctgcactctgaggggcttggcatggccgcagtgggggctggggactggcgcagccccaggcgcctccaagggaagcagtgaggaaagatgaggcatcgtgcctcacatccgctccacatggtgcaagagcctctagcggcttccagttccccgctcctgactcctgacctccaggatgtctcccggtttcttctttcaaaatttcctctccatctgctggcacctgaggagagtgagcagcctggaccacaagcccagtggtcacccctgtgtgcgcccgccccagcccaggagtagtcttacctctgaggaactttctagatgcaaagtgtgtatgtgtgtgtgtgtgtgtgtgtgtgtgtgtttgtgtgtattttgtaatatgtgagggaaatctaccttcgttcatgtataaataaagctcctcgtggc

SEQ ID NO: 152236 - DNA, 3479 bp, Homo sapiens
  Payload ID: 9953
  Gene Symbol: MED24
  Gene Name: mediator complex subunit 24
  Uniprot ID: O75448
  ENST ID: ENST00000394128
  CDS Start-End: 83-3052
aagtgccaaaatggcgatgcctaccacctagaactggattgtgcgctggccgccaccgctgccacctgctcagagtgaaataatgaaggtggtcaacctgaagcaagccattttgcaagcctggaaggagcgctggagtgactaccaatgggcaatcaacatgaagaaattctttcctaaaggagccacctgggatattctcaacctggcagatgcgttactagagcaggccatgattggaccatcccccaatcctctcatcttgtcctacctgaagtatgccattagttcccagatggtgtcctactcttctgtcctcacagccatcagtaagtttgatgacttttctcgggacctgtgtgtccaggcattgctggacatcatggacatgttttgtgaccgtctgagctgtcacggcaaagcagaggaatgcatcggactgtgccgagcccttcttagcgccctccactggctgctgcgctgcacggcagcctctgcagagcggctgcgggaggggctggaggccggcactccagccgctggggagaagcagcttgccatgtgccttcagcgcctggagaaaaccctcagcagcaccaagaaccgggccctgctgcacatcgccaaactagaggaggcctcttcttggactgccatcgagcattctctcttgaaacttggagagatcctggccaatctcagcaacccgcagctccggagtcaggccgagcagtgtggcaccctcattaggagcatccccacgatgctgtctgtgcatgcggagcagatgcacaagaccggcttccccactgtccacgccgtgatcctgctcgagggcaccatgaacctgacaggcgagacgcagtccctggtggagcagctgacgatggtgaagcgcatgcagcatatccccaccccactttttgtcctggagatctggaaagcttgcttcgtggggctcattgagtctcccgagggtacggaggagctcaagtggacagctttcactttcctcaagattccacaggttttggtgaagttgaagaagtactctcatggagacaaggacttcactgaggatgtcaactgtgcttttgagttcctgctgaagctcacccccttgttggacaaagctgaccagcgctgcaactgtgactgtacaaacttcctgctccaagaatgtggcaagcaggggcttctgtctgaggccagcgtcaacaaccttatggctaagcgcaaagcggaccgagagcacgcaccccagcagaaatcgggagagaatgccaacatccagcccaacatccagctgatcctccgggcggagcccactgtcacaaacatcctcaagacgatggatgcagaccactctaagtcaccggagggactgctgggagtcctgggccacatgctgtccgggaagagtctggacttgctgctggctgccgccgccgccactggaaagctgaaatccttcgcccggaaattcatcaatttgaatgaattcacaacctatggcagcgaagaaagcaccaaaccggcctccgtccgggccctgctgtttgacatctccttcctcatgctgtgccatgtggcccagacctatggttcagaggtgattctgtccgagtcgcgcacaggagctgaggtgcccttcttcgagacctggatgcagacctgcatgcctgaggagggcaagatcctgaaccctgaccacccctgcttccgccccgactccaccaaagtggagtccctggtggccctgctcaacaactcctcggagatgaagctagtgcagatgaagtggcatgaggcctgtctcagcatctcagccgccatcttggaaatcctcaatgcctgggagaatggggtcctggccttcgagtccatccagaaaatcactgataacatcaaagggaaggtatgcagtctggcggtgtgtgctgtggcttggcttgtggcccacgtccggatgctggggctggatgagcgtgagaagtcgctgcagatgatccgccagctggcagggccactgtttagtgagaacaccctgcagttctacaatgagagggtggtgatcatgaactcgatcctggagcgcatgtgtgccgacgtgctgcagcagacagccacgcagatcaagtttccctccaccggggtggacacaatgccctactggaacctgctgccccccaagcggcccatcaaagaggtgctgacggacatttttgccaaggtgctggagaagggctgggtggacagccgctccatccacatctttgacaccctgctgcacatgggcggcgtctactggttctgcaacaacctgattaaggagctgctgaaggagacgcggaaggagcacacgctgcgggcagtggagctgctctactccatcttctgcctggacatgcagcaagtgaccctggtcctgctgggccacatcctacctggcctgctcactgactcctccaagtggcacagcctcatggaccccccgggcactgctcttgccaagctggccgtgtggtgtgccctcagttcctactcctcccacaagggacaggcgtccacccgccagaagaagagacaccgcgaagacattgaggattatatcagcctcttccccctggacgatgtgcagccttcgaagttgatgcgactgctgagctctaatgaggacgatgccaacatcctttcgagccccacagaccgatccatgagcagctccctctcagcctctcagctccacacggtcaacatgcgggaccctctgaaccgagtcctggccaacctgttcctgctcatctcctccatcctggggtctcgcaccgctggcccccacacccagttcgtgcagtggttcatggaggagtgtgtggactgcctggagcagggtggccgtggcagcgtcctgcagttcatgcccttcaccaccgtgtcggaactggtgaaggtgtcagccatgtccagccccaaggtggttctggccatcacggacctcagcctgcccctgggccgccaggtggctgctaaagccattgctgcactctgaggggcttggcatggccgcagtgggggctggggactggcgcagccccaggcgcctccaagggaagcagtgaggaaagatgaggcatcgtgcctcacatccgctccacatggtgcaagagcctctagcggcttccagttccccgctcctgactcctgacctccaggatgtctcccggtttcttctttcaaaatttcctctccatctgctggcacctgaggagagtgagcagcctggaccacaagcccagtggtcacccctgtgtgcgcccgccccagcccaggagtagtcttacctctgaggaactttctagatgcaaagtgtgtatgtgtgtgtgtgtgtgtgtgtgtgtgtgtttgtgtgtattttgtaatatgtgagggaaatctaccttcgttcatgtataaataaagctcctcgtggctccctt

SEQ ID NO: 152237 - DNA, 1105 bp, Homo sapiens
  Payload ID: 9953
  Gene Symbol: MED24
  Gene Name: mediator complex subunit 24
  ENST ID: ENST00000428757
  CDS Start-End: 201-1105
caggtgcgagccactgcgctcggccgatactttcttagtgccccagtttaaggaagggcggttcaggaggagagagtctgacaggatcttactttatccctttagctctttttctttcaaattcctctgtctcgcttaaatcttcccgcatcttctcctttctatttaattctgccttccccggttctccttagaacctcatgtccttttctttagctccatttctttcacctcaaagctggccgccaccgctgccacctgctcagagtgaaataatgaaggtggtcaacctgaagcaagccattttgcaagcctggaaggagcgctggagtgactaccaatgggcaatcaacatgaagaaattctttcctaaaggagccacctgggatattctcaacctggcagatgcgttactagagcaggccatgattggaccatcccccaatcctctcatcttgtcctacctgaagtatgccattagttcccagtttgatgacttttctcgggacctgtgtgtccaggcattgctggacatcatggacatgttttgtgaccgtctgagctgtcacggcaaagcagaggaatgcatcggactgtgccgagcccttcttagcgccctccactggctgctgcgctgcacggcagcctctgcagagcggctgcgggaggggctggaggccggcactccagccgctggggagaagcagcttgccatgtgccttcagcgcctggagaaaaccctcagcagcaccaagaaccgggccctgctgcacatcgccaaactagaggaggcctcttcttggactgccatcgagcattctctcttgaaacttggagagatcctggccaatctcagcaacccgcagctccggagtcaggccgagcagtgtggcaccctcattaggagcatccccacgatgctgtctgtgcatgcggagcagatgcacaagaccggcttccccactgtccacgccgtgatcctgctcgagggcaccatgaacctgacaggcgagacgcagtccctggtggagcagctgacgatggtgaagcgcatgcagcatatccccaccccactttttgtcctggagatctggaaagcttgctt

SEQ ID NO: 152238 - DNA, 905 bp, Homo sapiens
  Payload ID: 9953
  Gene Symbol: MED24
  Gene Name: mediator complex subunit 24
  ENST ID: ENST00000422942
  CDS Start-End: 1-879
gtctactggttctgcaacaacctgattaaggagctgctgaaggagacgcggaaggagcacacgctgcgggcagtggagctgctctactccatcttctgcctggacatgcagcaagtgaccctggtcctgctgggccacatcctacctggcctgctcactgactcctccaagtggcacagcctcatggaccccccgggcactgctcttgccaagctggccgtgtggtgtgccctcagttcctactcctcccacaagggacaggcgtccacccgccagaagaagagacaccgcgaagacattgaggattatatcagcctcttccccctggacgatgtgcagccttcgaagttgatgcgactgctgagctctaatgaggacgatgccaacatcctttcgagccccaggtcttctctgggctctccatgtaccagttacctccgatgggtgaaggtcgggttggggcatccccggggagcaccacttttgcactcggcaggctgtttcccagcgctccatctgctccgtcccacagcagaccgatccatgagcagctccctctcagcctctcagctccacacggtcaacatgcgggaccctctgaaccgagtcctggccaacctgttcctgctcatctcctccatcctggggtctcgcaccgctggcccccacacccagttcgtgcagtggttcatggaggagtgtgtggactgcctggagcagggtggccgtggcagcgtcctgcagttcatgcccttcaccaccgtgtcggaactggtgaaggtgtcagccatgtccagccccaaggtggttctggccatcacggacctcagcctgcccctgggccgccaggtggctgctaaagccattgctgcactctgaggggcttggcatggccgcagtggggg

SEQ ID NO: 152239 - DNA, 957 bp, Homo sapiens
  Payload ID: 9953
  Gene Symbol: MED24
  Gene Name: mediator complex subunit 24
  ENST ID: ENST00000491466
  CDS Start-End: 1-253
gggacaggcgtccacccgccagaagaagagacaccgcgaagacattgaggattatatcagcctcttccccctggacgatgtgcagccttcgaagttgatgcgactgctgagctctaatgaggacgatgccaacatcctttcgagccccacagaccgatccatgagcagctccctctcagcctctcagctccacacggtcaacatgcgggaccctctgaaccgagtcctggtcccaccttctcccagagtgtgacctcacccactctcatggaactccctcctgtcactctccccccactctctacagccaacctgttcctgctcatctcctccatcctggggtctcgcaccgctggcccccacacccagttcgtgcagtggttcatggaggagtgtgtggactgcctggagcagggtggccgtggcagcgtcctgcagttcatgcccttcaccaccgtgtcggaactggtgaaggtgtcagccatgtccagccccaaggtggttctggccatcacggacctcagcctgcccctgggccgccaggtggctgctaaagccattgctgcactctgaggggcttggcatggccgcagtgggggctggggactggcgcagccccaggcgcctccaagggaagcagtgaggaaagatgaggcatcgtgcctcacatccgctccacatggtgcaagagcctctagcggcttccagttccccgctcctgactcctgacctccaggatgtctcccggtttcttctttcaaaatttcctctccatctgctggcacctgaggagagtgagcagcctggaccacaagcccagtggtcacccctgtgtgcgcccgccccagcccaggagtagtcttacctctgaggaactttctagatgcaaagtgtgtatgtgtgtgtgtgtgtgtgtgtgtgtgtgtttgtgtgtattttgtaatatgtgagggaaat

SEQ ID NO: 152240 - DNA, 628 bp, Homo sapiens
  Payload ID: 9953
  Gene Symbol: MED24
  Gene Name: mediator complex subunit 24
  ENST ID: ENST00000543759
  CDS Start-End: 60-628
ttcttgacaagtgccaaaatggcgatgcctaccacctagaactggattgtgcgaacctcatgtccttttctttagctccatttctttcacctcaaagctggccgccaccgctgccacctgctcagagtgaaataatgaaggtggtcaacctgaagcaagccattttgcaagcctggaaggagcgctggagtgactaccaatgggcaatcaacatgaagaaattctttcctaaaggagccacctgggatattctcaacctggcagatgcgttactagagcaggccatgattggaccatcccccaatcctctcatcttgtcctacctgaagtatgccattagttcccagtttgatgacttttctcgggacctgtgtgtccaggcattgctggacatcatggacatgttttgtgaccgtctgagctgtcacggcaaagcagaggaatgcatcggactgtgccgagcccttcttagcgccctccactggctgctgcgctgcacggcagcctctgcagagcggctgcgggaggggctggaggccggcactccagccgctggggagaagcagcttgccatgtgccttcagcgcctggagaaaaccctcagcagcaccaagaaccgggccctgct

SEQ ID NO: 152241 - DNA, 548 bp, Homo sapiens
  Payload ID: 9953
  Gene Symbol: MED24
  Gene Name: mediator complex subunit 24
  ENST ID: ENST00000537674
  CDS Start-End: 60-548
ttcttgacaagtgccaaaatggcgatgcctaccacctagaactggattgtgcgaacctcatgtccttttctttagctccatttctttcacctcaaagctggccgccaccgctgccacctgctcagagtgaaataatgaaggtggtcaacctgaagcaagccattttgcaagcctggaaggagcgctggagtgactaccaatgggcaatcaacatgaagaaattctttcctaaaggagccacctgggatattctcaacctggcagatgcgttactagagcaggccatgattggaccatcccccaatcctctcatcttgtcctacctgaagtatgccattagttcccagatggtgtcctactcttctgtcctcacagccatcagtaagtttgatgacttttctcgggacctgtgtgtccaggcattgctggacatcatggacatgttttgtgaccgtctgagctgtcacggcaaagcagaggaatgcatcggactgtgccgagcccttcttagcgccctccactggctgctgcgctgcacggcagcctct

SEQ ID NO: 152242 - DNA, 3334 bp, Homo sapiens
  Payload ID: 9953
  Gene Symbol: MED24
  Gene Name: mediator complex subunit 24
  ENST ID: ENST00000535508
  CDS Start-End: 83-385
aagtgccaaaatggcgatgcctaccacctagaactggattgtgcgctggccgccaccgctgccacctgctcagagtgaaataatgaaggtggtcaacctgaagcaagccattttgcaagcctggaaggagcgctggagtgactaccaatgggcaatcaacatgaagaaattctttcctaaaggagccacctgggatattctcaacctggcagatgcgttactagagcaggccatgattggaccatcccccaatcctctcatcttgtcctacctgaagtatgccattagttcccagatggtgtcctactcttctgtcctcacagccatcagtaagctgtcacggcaaagcagaggaatgcatcggactgtgccgagcccttcttagcgccctccactggctgctgcgctgcacggcagcctctgcagagcggctgcgggaggggctggaggccggcactccagccgctggggagaagcagcttgccatgtgccttcagcgcctggagaaaaccctcagcagcaccaagaaccgggccctgctgcacatcgccaaactagaggaggcctcttcttggactgccatcgagcattctctcttgaaacttggagagatcctggccaatctcagcaacccgcagctccggagtcaggccgagcagtgtggcaccctcattaggagcatccccacgatgctgtctgtgcatgcggagcagatgcacaagaccggcttccccactgtccacgccgtgatcctgctcgagggcaccatgaacctgacaggcgagacgcagtccctggtggagcagctgacgatggtgaagcgcatgcagcatatccccaccccactttttgtcctggagatctggaaagcttgcttcgtggggctcattgagtctcccgagggtacggaggagctcaagtggacagctttcactttcctcaagattccacaggttttggtgaagttgaagaagtactctcatggagacaaggacttcactgaggatgtcaactgtgcttttgagttcctgctgaagctcacccccttgttggacaaagctgaccagcgctgcaactgtgactgtacaaacttcctgctccaagaatgtggcaagcaggggcttctgtctgaggccagcgtcaacaaccttatggctaagcgcaaagcggaccgagagcacgcaccccagcagaaatcgggagagaatgccaacatccagcccaacatccagctgatcctccgggcggagcccactgtcacaaacatcctcaagacgatggatgcagaccactctaagtcaccggagggactgctgggagtcctgggccacatgctgtccgggaagagtctggacttgctgctggctgccgccgccgccactggaaagctgaaatccttcgcccggaaattcatcaatttgaatgaattcacaacctatggcagcgaagaaagcaccaaaccggcctccgtccgggccctgctgtttgacatctccttcctcatgctgtgccatgtggcccagacctatggttcagaggtgattctgtccgagtcgcgcacaggagctgaggtgcccttcttcgagacctggatgcagacctgcatgcctgaggagggcaagatcctgaaccctgaccacccctgcttccgccccgactccaccaaagtggagtccctggtggccctgctcaacaactcctcggagatgaagctagtgcagatgaagtggcatgaggcctgtctcagcatctcagccgccatcttggaaatcctcaatgcctgggagaatggggtcctggccttcgagtccatccagaaaatcactgataacatcaaagggaaggtatgcagtctggcggtgtgtgctgtggcttggcttgtggcccacgtccggatgctggggctggatgagcgtgagaagtcgctgcagatgatccgccagctggcagggccactgtttagtgagaacaccctgcagttctacaatgagagggtggtgatcatgaactcgatcctggagcgcatgtgtgccgacgtgctgcagcagacagccacgcagatcaagtttccctccaccggggtggacacaatgccctactggaacctgctgccccccaagcggcccatcaaagaggtgctgacggacatttttgccaaggtgctggagaagggctgggtggacagccgctccatccacatctttgacaccctgctgcacatgggcggcgtctactggttctgcaacaacctgattaaggagctgctgaaggagacgcggaaggagcacacgctgcgggcagtggagctgctctactccatcttctgcctggacatgcagcaagtgaccctggtcctgctgggccacatcctacctggcctgctcactgactcctccaagtggcacagcctcatggaccccccgggcactgctcttgccaagctggccgtgtggtgtgccctcagttcctactcctcccacaagggacaggcgtccacccgccagaagaagagacaccgcgaagacattgaggattatatcagcctcttccccctggacgatgtgcagccttcgaagttgatgcgactgctgagctctaatgaggacgatgccaacatcctttcgagccccacagaccgatccatgagcagctccctctcagcctctcagctccacacggtcaacatgcgggaccctctgaaccgagtcctggccaacctgttcctgctcatctcctccatcctggggtctcgcaccgctggcccccacacccagttcgtgcagtggttcatggaggagtgtgtggactgcctggagcagggtggccgtggcagcgtcctgcagttcatgcccttcaccaccgtgtcggaactggtgaaggtgtcagccatgtccagccccaaggtggttctggccatcacggacctcagcctgcccctgggccgccaggtggctgctaaagccattgctgcactctgaggggcttggcatggccgcagtgggggctggggactggcgcagccccaggcgcctccaagggaagcagtgaggaaagatgaggcatcgtgcctcacatccgctccacatggtgcaagagcctctagcggcttccagttccccgctcctgactcctgacctccaggatgtctcccggtttcttctttcaaaatttcctctccatctgctggcacctgaggagagtgagcagcctggaccacaagcccagtggtcacccctgtgtgcgcccgccccagcccaggagtagtcttacctctgaggaactttctagatgcaaagtgtgtatgtgtgtgtgtgtgtgtgtgtgtgtgtgtttg

SEQ ID NO: 152243 - DNA, 3037 bp, Homo sapiens
  Payload ID: 9953
  Gene Symbol: MED24
  Gene Name: mediator complex subunit 24
  ENST ID: ENST00000501516
  CDS Start-End: 11-3037
gagtgaaataatgaaggtggtcaacctgaagcaagccattttgcaagcctggaaggagcgctggagtgactaccaatgggcaatcaacatgaagaaattctttcctaaaggagccacctgggatattctcaacctggcagatgcgttactagagcaggccatgattggaccatcccccaatcctctcatcttgtcctacctgaagtatgccattagttcccagatggtgtcctactcttctgtcctcacagccatcagtaagtttgatgacttttctcgggacctgtgtgtccaggcattgctggacatcatggacatgttttgtgaccgtctgagctgtcacggcaaagcagaggaatgcatcggactgtgccgagcccttcttagcgccctccactggctgctgcgctgcacggcagcctctgcagagcggctgcgggaggggctggaggccggcactccagccgctggggagaagcagcttgccatgtgccttcagcgcctggagaaaaccctcagcagcaccaagaaccgggccctgctgcacatcgccaaactagaggaggcctcattgcacacatcccagggacttgggcagggtggcacccgagccaatcaaccaacagcttcttggactgccatcgagcattctctcttgaaacttggagagatcctggccaatctcagcaacccgcagctccggagtcaggccgagcagtgtggcaccctcattaggagcatccccacgatgctgtctgtgcatgcggagcagatgcacaagaccggcttccccactgtccacgccgtgatcctgctcgagggcaccatgaacctgacaggcgagacgcagtccctggtggagcagctgacgatggtgaagcgcatgcagcatatccccaccccactttttgtcctggagatctggaaagcttgcttcgtggggctcattgagtctcccgagggtacggaggagctcaagtggacagctttcactttcctcaagattccacaggttttggtgaagttgaagaagtactctcatggagacaaggacttcactgaggatgtcaactgtgcttttgagttcctgctgaagctcacccccttgttggacaaagctgaccagcgctgcaactgtgactgtacaaacttcctgctccaagaatgtggcaagcaggggcttctgtctgaggccagcgtcaacaaccttatggctaagcgcaaagcggaccgagagcacgcaccccagcagaaatcgggagagaatgccaacatccagcccaacatccagctgatcctccgggcggagcccactgtcacaaacatcctcaagacgatggatgcagaccactctaagtcaccggagggactgctgggagtcctgggccacatgctgtccgggaagagtctggacttgctgctggctgccgccgccgccactggaaagctgaaatccttcgcccggaaattcatcaatttgaatgaattcacaacctatggcagcgaagaaagcaccaaaccggcctccgtccgggccctgctgtttgacatctccttcctcatgctgtgccatgtggcccagacctatggttcagaggtgattctgtccgagtcgcgcacaggagctgaggtgcccttcttcgagacctggatgcagacctgcatgcctgaggagggcaagatcctgaaccctgaccacccctgcttccgccccgactccaccaaagtggagtccctggtggccctgctcaacaactcctcggagatgaagctagtgcagatgaagtggcatgaggcctgtctcagcatctcagccgccatcttggaaatcctcaatgcctgggagaatggggtcctggccttcgagtccatccagaaaatcactgataacatcaaagggaaggtatgcagtctggcggtgtgtgctgtggcttggcttgtggcccacgtccggatgctggggctggatgagcgtgagaagtcgctgcagatgatccgccagctggcagggccactgtttagtgagaacaccctgcagttctacaatgagagggtggtgatcatgaactcgatcctggagcgcatgtgtgccgacgtgctgcagcagacagccacgcagatcaagtttccctccaccggggtggacacaatgccctactggaacctgctgccccccaagcggcccatcaaagaggtgctgacggacatttttgccaaggtgctggagaagggctgggtggacagccgctccatccacatctttgacaccctgctgcacatgggcggcgtctactggttctgcaacaacctgattaaggagctgctgaaggagacgcggaaggagcacacgctgcgggcagtggagctgctctactccatcttctgcctggacatgcagcaagtgaccctggtcctgctgggccacatcctacctggcctgctcactgactcctccaagtggcacagcctcatggaccccccgggcactgctcttgccaagctggccgtgtggtgtgccctcagttcctactcctcccacaagggacaggcgtccacccgccagaagaagagacaccgcgaagacattgaggattatatcagcctcttccccctggacgatgtgcagccttcgaagttgatgcgactgctgagctctaatgaggacgatgccaacatcctttcgagccccacagaccgatccatgagcagctccctctcagcctctcagctccacacggtcaacatgcgggaccctctgaaccgagtcctggccaacctgttcctgctcatctcctccatcctggggtctcgcaccgctggcccccacacccagttcgtgcagtggttcatggaggagtgtgtggactgcctggagcagggtggccgtggcagcgtcctgcagttcatgcccttcaccaccgtgtcggaactggtgaaggtgtcagccatgtccagccccaaggtggttctggccatcacggacctcagcctgcccctgggccgccaggtggctgctaaagccattgctgcactctga

SEQ ID NO: 152244 - DNA, 2441 bp, Homo sapiens
  Payload ID: 9953
  Gene Symbol: MED24
  Gene Name: mediator complex subunit 24
  ENST ID: ENST00000535071
  CDS Start-End: 69-2441
gacaagtgccaaaatggcgatgcctaccacctagaactggattgtgcgatgcgttactagagcaggccatgattggaccatcccccaatcctctcatcttgtcctacctgaagtatgccattagttcccagatggtgtcctactcttctgtcctcacagccatcagtaagtttgatgacttttctcgggacctgtgtgtccaggcattgctggacatcatggacatgttttgtgaccgtctgagctgtcacggcaaagcagaggaatgcatcggactgtgccgagcccttcttagcgccctccactggctgctgcgctgcacggcagcctctgcagagcggctgcgggaggggctggaggccggcactccagccgctggggagaagcagcttgccatgtgccttcagcgcctggagaaaaccctcagcagcaccaagaaccgggccctgctgcacatcgccaaactagaggaggcctcttcttggactgccatcgagcattctctcttgaaacttggagagatcctggccaatctcagcaacccgcagctccggagtcaggccgagcagtgtggcaccctcattaggagcatccccacgatgctgtctgtgcatgcggagcagatgcacaagaccggcttccccactgtccacgccgtgatcctgctcgagggcaccatgaacctgacaggcgagacgcagtccctggtggagcagctgacgatggtgaagcgcatgcagcatatccccaccccactttttgtcctggagatctggaaagcttgcttcgtggggctcattgagtctcccgagggtacggaggagctcaagtggacagctttcactttcctcaagattccacaggttttggtgaagttgaagaagtactctcatggagacaaggacttcactgaggatgtcaactgtgcttttgagttcctgctgaagctcacccccttgttggacaaagctgaccagcgctgcaactgtgactgtacaaacttcctgctccaagaatgtggcaagcaggggcttctgtctgaggccagcgtcaacaaccttatggctaagcgcaaagcggaccgagagcacgcaccccagcagaaatcgggagagaatgccaacatccagcccaacatccagctgatcctccgggcggagcccactgtcacaaacatcctcaagacgatggatgcagaccactctaagtcaccggagggactgctgggagtcctgggccacatgctgtccgggaagagtctggacttgctgctggctgccgccgccgccactggaaagctgaaatccttcgcccggaaattcatcaatttgaatgaattcacaacctatggcagcgaagaaagcaccaaaccggcctccgtccgggccctgctgtttgacatctccttcctcatgctgtgccatgtggcccagacctatggttcagaggtgattctgtccgagtcgcgcacaggagctgaggtgcccttcttcgagacctggatgcagacctgcatgcctgaggagggcaagatcctgaaccctgaccacccctgcttccgccccgactccaccaaagtggagtccctggtggccctgctcaacaactcctcggagatgaagctagtgcagatgaagtggcatgaggcctgtctcagcatctcagccgccatcttggaaatcctcaatgcctgggagaatggggtcctggccttcgagtccatccagaaaatcactgataacatcaaagggaaggtatgcagtctggcggtgtgtgctgtggcttggcttgtggcccacgtccggatgctggggctggatgagcgtgagaagtcgctgcagatgatccgccagctggcagggccactgtttagtgagaacaccctgcagttctacaatgagagggtggtgatcatgaactcgatcctggagcgcatgtgtgccgacgtgctgcagcagacagccacgcagatcaagtttccctccaccggggtggacacaatgccctactggaacctgctgccccccaagcggcccatcaaagaggtgctgacggacatttttgccaaggtgctggagaagggctgggtggacagccgctccatccacatctttgacaccctgctgcacatgggcggcgtctactggttctgcaacaacctgattaaggagctgctgaaggagacgcggaaggagcacacgctgcgggcagtggagctgctctactccatcttctgcctggacatgcagcaagtgaccctggtcctgctgggccacatcctacctggcctgctcactgactcctccaagtggcacagcctcatggaccccccgggcactgctcttgccaagctggccgtgtggtgtgccctcagttcctactcctcccacaagggacaggcgtccacccgccagaagaagagacaccgcgaagacattgag

SEQ ID NO: 152245 - DNA, 592 bp, Homo sapiens
  Payload ID: 9953
  Gene Symbol: MED24
  Gene Name: mediator complex subunit 24
  ENST ID: ENST00000582023
  CDS Start-End: 64-592
agttgacagcttctctccaagagaggcagtttgggctctgaggtatgcgacaggggctccaggatgatccaggaatggctccaggtggagggccttaggctgtggctacaggcacagaatgacagcaggggagcaggcaaagctccatttctttcacctcaaagctggccgccaccgctgccacctgctcagagtgaaataatgaaggtggtcaacctgaagcaagccattttgcaagcctggaaggagcgctggagtgactaccaatgggcaatcaacatgaagaaattctttcctaaaggagccacctgggatattctcaacctggcagatgcgttactagagcaggccatgattggaccatcccccaatcctctcatcttgtcctacctgaagtatgccattagttcccagatggtgtcctactcttctgtcctcacagccatcagtaagtttgatgacttttctcgggacctgtgtgtccaggcattgctggacatcatggacatgttttgtgaccgtctgagctgtcacggcaaagcagaggaatgcatcggactgtgccgagcccttcttagcgccctccactggc

SEQ ID NO: 152246 - DNA, 597 bp, Homo sapiens
  Payload ID: 9953
  Gene Symbol: MED24
  Gene Name: mediator complex subunit 24
  ENST ID: ENST00000585306
  CDS Start-End: 120-597
gtctgccagtcgatgccacctcctcggtgatcaggtttggccggaaccctggggagcaaggctgcagtatgtagtgctcaggctggccgccaccgctgccacctgctcagagtgaaataatgaaggtggtcaacctgaagcaagccattttgcaagcctggaaggagcgctggagtgactaccaatgggcaatcaacatgaagaaattctttcctaaaggagccacctgggatattctcaacctggcagatgcgttactagagcaggccatgattggaccatcccccaatcctctcatcttgtcctacctgaagtatgccattagttcccagatggtgtcctactcttctgtcctcacagccatcagtaagtttgatgacttttctcgggacctgtgtgtccaggcattgctggacatcatggacatgttttgtgaccgtctgagctgtcacggcaaagcagaggaatgcatcggactgtgccgagcccttcttagcgccctccactggctgctgcgctgcacggcagcctctgcagagcggctgcgggaggggctggaggccggcactccagccgctggggagaagcagcttgcca

SEQ ID NO: 152247 - DNA, 957 bp, Homo sapiens
  Payload ID: 9953
  Gene Symbol: MED24
  Gene Name: mediator complex subunit 24
  ENST ID: ENST00000580008
  CDS Start-End: 1-417
gccattagttcccagtttgatgacttttctcgggacctgtgtgtccaggcattgctggacatcatggacatgttttgtgaccgtctgagctgtcacggcaaagcagaggaatgcatcggactgtgccgagcccttcttagcgccctccactggctgctgcgctgcacggcagcctctgcagagcggctgcgggaggggctggaggccggcactccagccgctggggagaagcagcttgccatgtgccttcagcgcctggagaaaaccctcagcagcaccaagaaccgggccctgctgcacatcgccaaactagaggaggcctcattgcacacatcccagggacttgggcagggtggcacccgagccaatcaaccaacagccactggattctggcctccctctgcctctctctcctgagcctgtgtgatgccataccttctgaagtcagctggctgtgtcccctggaaatcaggcttttgggaatggtctctggggtttccagctctaggtgcccaccccccttctggaaacagtgcatgctgccctcaggcccctccctccctgttgtcctcaggggaagccttcctgtgtggtttcgtgtgccggagggagtgccaaaatcgaggagttcagggccaggtgctccttctctcctgtttcccatcatgtttctgtacttccttccctctgccagcttcttggactgccatcgagcattctctcttgaaacttggagagatcctggccaatctcagcaacccgcagctccggagtcaggccgagcagtgtggcaccctcattaggagcatccccacgatgctgtctgtgcatgcggagcagatgcacaagaccggcttccccactgtccacgccgtgatcctgctcgagggcaccatgaacctgacaggcgagacgcagtccctggtggagcagctgacgatggtgaagcgcatgcag

SEQ ID NO: 152248 - DNA, 580 bp, Homo sapiens
  Payload ID: 9953
  Gene Symbol: MED24
  Gene Name: mediator complex subunit 24
  ENST ID: ENST00000578161
  CDS Start-End: 152-580
agcttcttgacaagtgccaaaatggcgatgcctaccacctagaactggattgtgcgctctttttctttcaaattcctctgtctcgcttaaatcttcccgcatcttctcctttctatttaattctgccttccccggttctccttagaacctcatgtccttttctttagctccatttctttcacctcaaagctggccgccaccgctgccacctgctcagagtgaaataatgaaggtggtcaacctgaagcaagccattttgcaagcctggaaggagcgctggagtgactaccaatgggcaatcaacatgaagaaattctttcctaaaggagccacctgggatattctcaacctggcagatgcgttactagagcaggccatgattggaccatcccccaatcctctcatcttgtcctacctgaagtatgccattagttcccagatggtgtcctactcttctgtcctcacagccatcagtaagtttgatgacttttctcgggacctgtgtgtccaggcattgctggacatcatggacatgttttgtgaccgtctgagctgtcacggcaaagcagaggaatgcatc

SEQ ID NO: 152249 - DNA, 728 bp, Homo sapiens
  Payload ID: 9953
  Gene Symbol: MED24
  Gene Name: mediator complex subunit 24
  ENST ID: ENST00000578901
  CDS Start-End: 1-173
cgttactagagcaggccatgattggaccatcccccaatcctctcatcttgtcctacctgaagtatgccattagttcccagatggtgtcctactcttctgtcctcacagccatcaattccacaggttttggtgaagttgaagaagtactctcatggagacaaggacttcactgaggatgtcaactgtgcttttgagttcctgctgaagctcacccccttgttggacaaagctgaccagcgctgcaactgtgactgtacaaacttcctgctccaagaatgtggcaagcaggggcttctgtctgaggccagcgtcaacaaccttatggctaagcgcaaagcggaccgagagcacgcaccccagcagaaatcgggagagaatgccaacatccagcccaacatccagctgatcctccgggcggagcccactgtcacaaacatcctcaagacgatggatgcagaccactctaagtcaccggagggactgctgggagtcctgggccacatgctgtccgggaagagtctggacttgctgctggctgccgccgccgccactggaaagctgaaatccttcgcccggaaattcatcaatttgaatgaattcacaacctatggcagcgaagaaagcaccaaaccggcctccgtccgggccctgctgtttgacatctccttcctcatgctgtgccatgtggcccagacctatggttcagaggtgattctgtccgagtcgcg

SEQ ID NO: 152250 - DNA, 567 bp, Homo sapiens
  Payload ID: 9953
  Gene Symbol: MED24
  Gene Name: mediator complex subunit 24
  ENST ID: ENST00000580517
  CDS Start-End: 152-567
agcttcttgacaagtgccaaaatggcgatgcctaccacctagaactggattgtgcgctctttttctttcaaattcctctgtctcgcttaaatcttcccgcatcttctcctttctatttaattctgccttccccggttctccttagaacctcatgtccttttctttagctccatttctttcacctcaaagctggccgccaccgctgccacctgctcagagtgaaataatgaaggtggtcaacctgaagcaagccattttgcaagcctggaaggagcgctggagtgactaccaatgggcaatcaacatgaagaaattctttcctaaaggagccacctgggatattctcaacctggcagatgcgttactagagcaggccatgattggaccatcccccaatcctctcatcttgtcctacctgaagtatgccattagttcccagtttgatgacttttctcgggacctgtgtgtccaggcattgctggacatcatggacatgttttgtgaccgtctgagctgtcacggcaaagcagaggaatgcatcggactgtgccgagcccttcttagcgc

SEQ ID NO: 152251 - DNA, 524 bp, Homo sapiens
  Payload ID: 9953
  Gene Symbol: MED24
  Gene Name: mediator complex subunit 24
  ENST ID: ENST00000581058
  CDS Start-End: 1-70
tttgaatgaattcacaacctatggcagcgaagaaagcagtgattctgtccgagtcgcgcacaggagctgaggtgcccttcttcgagacctggatgcagacctgcatgcctgaggagggcaagatcctgaaccctgaccacccctgcttccgccccgactccaccaaagtggagtccctggtggccctgctcaacaactcctcggagatgaagctagtgcagatgaagtggcatgaggcctgtctcagcatctcagccgccatcttggaaatcctcaatgcctgggagaatggggtcctggccttcgagtccatccagaaaatcactgataacatcaaagggaaggtatgcagtctggcggtgtgtgctgtggcttggcttgtggcccacgtccggatgctggggctggatgagcgtgagaagtcgctgcagatgatccgccagctggcagggccactgtttagtgagaacaccctgcagttctacaatgagagggtggtgatcatgaactcgatcctggagcgc

SEQ ID NO: 152252 - DNA, 1963 bp, Homo sapiens
  Payload ID: 9953
  Gene Symbol: MED24
  Gene Name: mediator complex subunit 24
  ENST ID: ENST00000580885
  CDS Start-End: 49-1963
gacaagtgccaaaatggcgatgcctaccacctagaactggattgtgcgatggtgtcctactcttctgtcctcacagccatcagtaagtttgatgacttttctcgggacctgtgtgtccaggcattgctggacatcatggacatgttttgtgaccgtctgagctgtcacggcaaagcagaggaatgcatcggactgtgccgagcccttcttagcgccctccactggctgctgcgctgcacggcagcctctgcagagcggctgcgggaggggctggaggccggcactccagccgctggggagaagcagcttgccatgtgccttcagcgcctggagaaaaccctcagcagcaccaagaaccgggccctgctgcacatcgccaaactagaggaggcctcttcttggactgccatcgagcattctctcttgaaacttggagagatcctggccaatctcagcaacccgcagctccggagtcaggccgagcagtgtggcaccctcattaggagcatccccacgatgctgtctgtgcatgcggagcagatgcacaagaccggcttccccactgtccacgccgtgatcctgctcgagggcaccatgaacctgacaggcgagacgcagtccctggtggagcagctgacgatggtgaagcgcatgcagcatatccccaccccactttttgtcctggagatctggaaagcttgcttcgtggggctcattgagtctcccgagggtacggaggagctcaagtggacagctttcactttcctcaagattccacaggttttggtgaagttgaagaagtactctcatggagacaaggacttcactgaggatgtcaactgtgcttttgagttcctgctgaagctcacccccttgttggacaaagctgaccagcgctgcaactgtgactgtacaaacttcctgctccaagaatgtggcaagcaggggcttctgtctgaggccagcgtcaacaaccttatggctaagcgcaaagcggaccgagagcacgcaccccagcagaaatcgggagagaatgccaacatccagcccaacatccagctgatcctccgggcggagcccactgtcacaaacatcctcaagtgttcttcaggacttgatttcctgtcctgtccccagacgatggatgcagaccactctaagtcaccggagggactgctgggagtcctgggccacatgctgtccgggaagagtctggacttgctgctggctgccgccgccgccactggaaagctgaaatccttcgcccggaaattcatcaatttgaatgaattcacaacctatggcagcgaagaaagcaccaaaccggcctccgtccgggccctgctgtttgacatctccttcctcatgctgtgccatgtggcccagacctatggttcagaggtgattctgtccgagtcgcgcacaggagctgaggtgcccttcttcgagacctggatgcagacctgcatgcctgaggagggcaagatcctgaaccctgaccacccctgcttccgccccgactccaccaaagtggagtccctggtggccctgctcaacaactcctcggagatgaagctagtgcagatgaagtggcatgaggcctgtctcagcatctcagccgccatcttggaaatcctcaatgcctgggagaatggggtcctggccttcgagtccatccagaaaatcactgataacatcaaagggaaggtatgcagtctggcggtgtgtgctgtggcttggcttgtggcccacgtccggatgctggggctggatgagcgtgagaagtcgctgcagatgatccgccagctggcagggccactgtttagtgagaacaccctgcagttctacaatgagagggtggtgatcatgaactcgatcctggagcgcatgtgtgccgacgtgctgcagcagacagccacgcagatcaagtttccctccaccggggtggacacaatgccctact

SEQ ID NO: 152253 - DNA, 604 bp, Homo sapiens
  Payload ID: 9953
  Gene Symbol: MED24
  Gene Name: mediator complex subunit 24
  ENST ID: ENST00000580302
  CDS Start-End: 442-604
acctactaactaggggctaacgaatgaaagggtgtcggaatatgatggagaagcccggtcgacagtgacgtcgtgggcgacgccgggttgtgagcggcctttcgagctccctcgagtccctgagtctctgtagtgcctcagctcctggatgtcctcccttaaaggagaagaacaatgcgggccgactagacgagtcccttagtttcctcgccggcgcagacaaatacggtttcagtccaaggaactaccattcccagaagacagcggggcgttccttgctgcatttctattggttggcgtttgttactcccagccaatagaaagtgagcttcttgacaagtgccaaaatggcgatgcctaccacctagaactggattgtgcgctccatttctttcacctcaaagctggccgccaccgctgccacctgctcagagtgaaataatgaaggtggtcaacctgaagcaagccattttgcaagcctggaaggagcgctggagtgactaccaatgggcaatcaacatgaagaaattctttcctaaaggagccacctgggatattctcaacctggcagatgcgttactagagcaggccatgattggaccat

SEQ ID NO: 152254 - DNA, 454 bp, Homo sapiens
  Payload ID: 9953
  Gene Symbol: MED24
  Gene Name: mediator complex subunit 24
  ENST ID: ENST00000614384
  CDS Start-End: 18-431
ctgctcagagtgaaataatgaaggtggtcaacctgaagcaagccattttgcaagcctggaaggagcgctggagtgactaccaatgggcaatcaacatgaagaaattctttcctaaaggagccacctgggatattctcaacctggcagatgcgttactagagcaggccatgattggaccatcccccaatcctctcatcttgtcctacctgaagtatgccattagttcccagatggtgtcctactcttctgtcctcacagccatcagtaagtttgatgacttttctcgggaccacaagcccagtggtcacccctgtgtgcgcccgccccagcccaggagtagtcttacctctgaggaactttctagatgcaaagtgtgtatgtgtgtgtgtgtgtgtgtgtgtgtgtgtttgtgtgtattttgtaatatgtgagggaaatctaccttcgttcatgt

SEQ ID NO: 152255 - DNA, 2332 bp, Homo sapiens
  Payload ID: 9954
  Gene Symbol: MED25
  Gene Name: mediator complex subunit 25
  Uniprot ID: Q71SY5
  ENST ID: ENST00000312865
  CDS Start-End: 54-2297
attccgcggcgtcggctgcggctgcagtggtggtggcgggtaccgcacggggtatggtccccgggtccgagggcccggcccgcgccgggagcgtggtggccgacgtggtgtttgtgattgagggtacggccaacctgggaccctacttcgaggggctccgcaagcactacctgctcccggccatcgagtattttaatggtggtcctcctgctgagacggacttcgggggagactatggggggacccagtacagcctcgtggtgttcaacacagtggactgcgctcccgagtcctacgtacaatgtcacgctcccaccagcagcgcctatgagtttgtcacctggctcgatggcattaagttcatgggcgggggtggtgagagctgcagcctcatcgcggaaggactcagcacagccttgcagctgtttgatgacttcaagaagatgcgcgagcagattggccagacgcaccgggtctgcctcctcatctgcaactcacccccatacttgttgcctgctgttgagagcaccacgtactctggatgcacaactgagaatcttgtgcagcagattggggagcgggggatccacttctccattgtgtctccccggaagctgcctgcgcttcggcttctgtttgagaaggcagcccccccggccttgctggagccgctgcagcctccgacagatgtgagccaggacccgaggcacatggtgctggttcggggactcgtgctgcctgttgggggtggctcagccccaggccccctccagtcaaagcagccagtccccctgcctcccgccgcaccctcaggtgccactctctcagcagccccccagcagcctctgccccccgtccccccgcagtaccaggttcccgggaacctgagtgcagctcaggtggccgcgcagaatgcagtggaggctgccaagaaccagaaggctgggctgggccctcgcttctcgcccatcacccctctccaacaagctgctcccggagtgggtccccccttcagccaggccccagctccccaactacccccaggaccccctggcgcccccaagccaccacctgcttcccagcccagtctggtctccactgtggcccctggctccggcctggctcccacggcacagcccggggcaccgtccatggcaggcactgtggccccaggaggggtgagcggcccttccccagcccagctgggagccccagccctcggtgggcagcagtcagtctccaataagcttctggcctggagcggggtcctggagtggcaagagaaacccaaacctgcctcagtggatgccaacaccaagctgacgcggtcactgccctgccaggtctacgtgaatcatggcgagaacctgaagacggagcagtggccccagaagctgatcatgcagctcatcccccagcagctgctgaccaccctgggccctttgttccggaactcaaggatggtccagttccatttcaccaacaaggacctggagtctctcaaaggcctctaccgcatcatgggcaacggcttcgcgggctgcgtgcacttcccccacacggcgccctgtgaggtgcgcgtgctcatgctcctgtactcgtccaagaagaagatcttcatgggcctcatcccctacgaccagagcggcttcgtcaacggcatccggcaggtcatcaccaaccacaagcaggtccagcagcagaagctggagcagcagcagcgaggaatggggggacagcaggcacccccagggctggggcccattctggaggaccaagccaggccctcacagaatctgctccagctccgcccaccgcagccccagcctcagggtaccgtaggggcctctggggccacggggcagccccagccccaaggtactgcccagcccccgccaggtgcccctcaaggccctcctggagcagcttctggcccaccccctcctggacccatccttcggccccagaaccctggggccaaccctcagctgcgaagcctcctcctcaacccaccaccgccgcagactggggtgcccccaccccaggcctccctccaccacctccagccaccaggggctcctgcgctgctgcctccgccgcaccagggcctggggcagccccagttggggcccccactcctgcatccaccacctgcccagtcctggcccgcacaacttccccctcgggctccactgccaggtcagatgctgctgagcgggggtccccggggcccggtcccccagccgggcctgcagcccagcgtcatggaggacgacatcctcatggatctcatctgaatccccaacacccaataaagttcctttttaacaca

SEQ ID NO: 152256 - DNA, 1623 bp, Homo sapiens
  Payload ID: 9954
  Gene Symbol: MED25
  Gene Name: mediator complex subunit 25
  Uniprot ID: Q71SY5
  ENST ID: ENST00000538643
  CDS Start-End: 1-1605
atggtccccgggtccgagggcccggcccgcgccgggagcgtggtggccgacgtggtgtttgtgattgagggtacggccaacctgggaccctacttcgaggggctccgcaagcactacctgctcccggccatcgagtattttaatggtggtcctcctgctgagacggacttcgggggagacgttcccgggaacctgagtgcagctcaggtggccgcgcagaatgcagtggaggctgccaagaaccagaaggctgggctgggccctcgcttctcgcccatcacccctctccaacaagctgctcccggagtgggtccccccttcagccaggccccagctccccaactacccccaggaccccctggcgcccccaagccaccacctgcttcccagcccagtctggtctccactgtggcccctggctccggcctggctcccacggcacagcccggggcaccgtccatggcaggcactgtggccccaggaggggtgagcggcccttccccagcccagctgggagccccagccctcggtgggcagcagtcagtctccaataagcttctggcctggagcggggtcctggagtggcaagagaaacccaaacctgcctcagtggatgccaacaccaagctgacgcggtcactgccctgccaggtctacgtgaatcatggcgagaacctgaagacggagcagtggccccagaagctgatcatgcagctcatcccccagcagctgctgaccaccctgggccctttgttccggaactcaaggatggtccagttccatttcaccaacaaggacctggagtctctcaaaggcctctaccgcatcatgggcaacggcttcgcgggctgcgtgcacttcccccacacggcgccctgtgaggtgcgcgtgctcatgctcctgtactcgtccaagaagaagatcttcatgggcctcatcccctacgaccagagcggcttcgtcaacggcatccggcaggtcatcaccaaccacaagcaggtccagcagcagaagctggagcagcagcagcgaggaatggggggacagcaggcacccccagggctggggcccattctggaggaccaagccaggccctcacagaatctgctccagctccgcccaccgcagccccagcctcagggtaccgtaggggcctctggggccacggggcagccccagccccaaggtactgcccagcccccgccaggtgcccctcaaggccctcctggagcagcttctggcccaccccctcctggacccatccttcggccccagaaccctggggccaaccctcagctgcgaagcctcctcctcaacccaccaccgccgcagactggggtgcccccaccccaggcctccctccaccacctccagccaccaggggctcctgcgctgctgcctccgccgcaccagggcctggggcagccccagttggggcccccactcctgcatccaccacctgcccagtcctggcccgcacaacttccccctcgggctccactgccaggtcagatgctgctgagcgggggtccccggggcccggtcccccagccgggcctgcagcccagcgtcatggaggacgacatcctcatggatctcatctgaatccccaacacccaataa

SEQ ID NO: 152257 - DNA, 760 bp, Homo sapiens
  Payload ID: 9954
  Gene Symbol: MED25
  Gene Name: mediator complex subunit 25
  ENST ID: ENST00000595185
  CDS Start-End: 1-760
atggtccccgggtccgagggcccggcccgcgccgggagcgtggtggccgacgtggtgtttgtgattgagggtacggccaacctgggaccctacttcgaggggctccgcaagcactacctgctcccggccatcgagtattttaatggtggtcctcctgctgagacggacttcgggggagactatggggggacccagtacagcctcgtggtgttcaacacagtggactgcgctcccgagtcctacgtacaatgtcacgctcccaccagcagcgcctatgagtttgtcacctggctcgatggcattaagttcatgggcgggggtggtgagagctgcagcctcatcgcggaaggactcagcacagccttgcagctgtttgatgacttcaagaagatgcgcgagcagattggccagacgcaccgggtctgcctcctcatctgcaactcacccccatacttgttgcctgctgttgagagcaccacgtactctggatgcacaactgagaatcttgtgcagcagattggggagcgggggatccacttctccattgtgtctccccggaagctgcctgcgcttcggcttctgtttgagaaggcagcccccccggccttgctggagccgctgcagcctccgacagatgtgagccaggacccgaggcacatggtgctggttcggggactcgtgctgcctgccgggcctgcagcccagcgtcatggaggacgacatcctcatggatctcatctgaatccccaacacccaataa

SEQ ID NO: 152258 - DNA, 829 bp, Homo sapiens
  Payload ID: 9954
  Gene Symbol: MED25
  Gene Name: mediator complex subunit 25
  ENST ID: ENST00000593767
  CDS Start-End: 1-746
aagaagatcttcatgggcctcatcccctacgaccagagcggcttcgtcaacggcatccggcaggtcatcaccaaccacaagcaggtccagcagcagaagctggagcagcagcagcgaggaatggggggacagcaggcacccccagggctggggcccattctggaggaccaagccaggccctcacagaatctgctccagctccgcccaccgcagccccagcctcagggtaccgtaggggcctctggggccacggggcagccccagccccaaggtactgcccagcccccgccaggtgcccctcaaggccctcctggagcagcttctggcccaccccctcctggacccatccttcggccccagaaccctggggccaaccctcagctgcgaagcctcctcctcaacccaccaccgccgcagactggggtgcccccaccccaggcctccctccaccacctccagccaccaggggctcctgcgctgctgcctccgccgcaccagggcctggggcagccccagttggggcccccactcctgcatccaccacctgcccagtcctggcccgcacaacttccccctcgggctccactgccagcggcaaaacgaaagagagaaggagagggccgtgtgtttcgagaaaaatgggagcgagcctatttctttgtggaagtgaagagcatgcctatgtgtttaatatgcaaacaaatcgtgtctgtgttgaaagaatacaacctgaaacgccactatgaatcaaagcatagtaagagctacgaccagtacacagaacagactcgagatgccatcctcaacgaactgaaaaagggactcaaat

SEQ ID NO: 152259 - DNA, 642 bp, Homo sapiens
  Payload ID: 9954
  Gene Symbol: MED25
  Gene Name: mediator complex subunit 25
  ENST ID: ENST00000622402
  CDS Start-End: 64-606
atttctgctcattccgcggcgtcggctgcggctgcagtggtggtggcgggtaccgcacggggtatggtccccgggtccgagggcccggcccgcgccgggagcgtggtggccgacgtggtgtttgtgattgagggtacggccaacctgggaccctacttcgaggggctccgcaagcactacctgctcccggccatcgagtattttaatggtgcccctcaaggccctcctggagcagcttctggcccaccccctcctggacccatccttcggccccagaaccctggggccaaccctcagctgcgaagcctcctcctcaacccaccaccgccgcagactggggtgcccccaccccaggcctccctccaccacctccagccaccaggggctcctgcgctgctgcctccgccgcaccagggcctggggcagccccagttggggcccccactcctgcatccaccacctgcccagtcctggcccgcacaacttccccctcgggctccactgccaggtcagatgctgctgagcgggggtccccggggcccggtcccccagccgggcctgcagcccagcgtcatggaggacgacatcctcatggatctcatctgaatccccaacacccaataaagttcctttttaacacac

SEQ ID NO: 152260 - DNA, 881 bp, Homo sapiens
  Payload ID: 9954
  Gene Symbol: MED25
  Gene Name: mediator complex subunit 25
  ENST ID: ENST00000612791
  CDS Start-End: 1-780
atggtccccgggtccgagggcccggcccgcgccgggagcgtggtggccgacgtggtgtttgtgattgagggtacggccaacctgggaccctacttcgaggggctccgcaagcactacctgctcccggccatcgagtattttaatggtggtcctcctgctgagacggacttcgggggagactatggggggacccagtacagcctcgtggtgttcaacacagtggactgcgctcccgagtcctacgtacaatgtcacgctcccaccagcagcgcctatgagtttgtcacctggctcgatggcattaagttcatgggcgggggtggtgagagctgcagcctcatcgcggaaggactcagcacagccttgcagctgtttgatgacttcaagaagatgcgcgagcagattggccagacgcaccgggtctgcctcctcatctgcaactcacccccatacttgttgcctgctgttgagagcaccacgtactctggatgcacaactgagaatcttgtgcagcagattggggagcgggggatccacttctccattgtgtctccccggaagctgcctgcgcttcggcttctgtttgagaaggcagcccccggccttgctggagccgctgcagcctccgacagatgtgagccaggacccgaggcacatggtgctggttcggggactcgtgctgcctgttgggggtggctcagccccaggccccctccagtcaaagcagccagtccccctgcctcccgccgcaccctcaggtgccaggtcagatgctgctgagcgggggtccccggggcccggtcccccagccgggcctgcagcccagcgtcatggaggacgacatcctcatggatctcatctgaatccccaacacccaataa

SEQ ID NO: 152261 - DNA, 1467 bp, Homo sapiens
  Payload ID: 9954
  Gene Symbol: MED25
  Gene Name: mediator complex subunit 25
  ENST ID: ENST00000618715
  CDS Start-End: 1-1449
atggtccccgggtccgagggcccggcccgcgccgggagcgtggtggccgacgtggtgtttgtgattgagggtacggccaacctgggaccctacttcgaggggctccgcaagcactacctgctcccggccatcgagtattttaatggtggtcctcctgcccccttcagccaggccccagctccccaactacccccaggaccccctggcgcccccaagccaccacctgcttcccagcccagtctggtctccactgtggcccctggctccggcctggctcccacggcacagcccggggcaccgtccatggcaggcactgtggccccaggaggggtgagcggcccttccccagcccagctgggagccccagccctcggtgggcagcagtcagtctccaataagcttctggcctggagcggggtcctggagtggcaagagaaacccaaacctgcctcagtggatgccaacaccaagctgacgcggtcactgccctgccaggtctacgtgaatcatggcgagaacctgaagacggagcagtggccccagaagctgatcatgcagctcatcccccagcagctgctgaccaccctgggccctttgttccggaactcaaggatggtccagttccatttcaccaacaaggacctggagtctctcaaaggcctctaccgcatcatgggcaacggcttcgcgggctgcgtgcacttcccccacacggcgccctgtgaggtgcgcgtgctcatgctcctgtactcgtccaagaagaagatcttcatgggcctcatcccctacgaccagagcggcttcgtcaacggcatccggcaggtcatcaccaaccacaagcaggtccagcagcagaagctggagcagcagcagcgaggaatggggggacagcaggcacccccagggctggggcccattctggaggaccaagccaggccctcacagaatctgctccagctccgcccaccgcagccccagcctcagggtaccgtaggggcctctggggccacggggcagccccagccccaaggtactgcccagcccccgccaggtgcccctcaaggccctcctggagcagcttctggcccaccccctcctggacccatccttcggccccagaaccctggggccaaccctcagctgcgaagcctcctcctcaacccaccaccgccgcagactggggtgcccccaccccaggcctccctccaccacctccagccaccaggggctcctgcgctgctgcctccgccgcaccagggcctggggcagccccagttggggcccccactcctgcatccaccacctgcccagtcctggcccgcacaacttccccctcgggctccactgccaggtcagatgctgctgagcgggggtccccggggcccggtcccccagccgggcctgcagcccagcgtcatggaggacgacatcctcatggatctcatctgaatccccaacacccaataa

SEQ ID NO: 152262 - DNA, 801 bp, Homo sapiens
  Payload ID: 9954
  Gene Symbol: MED25
  Gene Name: mediator complex subunit 25
  ENST ID: ENST00000612854
  CDS Start-End: 64-765
atttctgctcattccgcggcgtcggctgcggctgcagtggtggtggcgggtaccgcacggggtatggtccccgggtccgagggcccggcccgcgccgggagcgtggtggccgacgtggtgtttgtgattgagggtacggccaacctgggaccctacttcgaggggctccgcaagcactacctgctcccggccatcgagtattttaatggtggtcctcctgctgagacggacttcgggggagactatggggggacccagtacagcctcgtggtgttcaacacagtggactgcgctcccgagtcctacgtacaatgtcacgctcccaccagcagcgcctatgagtttgtcacctggctcgatggcattaagttcatgggcgggggtggtgagagctgcagcctcatcgcggaaggactcagcacagccttgcagctgtttgatgacttcaagaagatgcgcgagcagattggccagacgcaccgggtctgcctcctcatctgcaactcacccccagcctccctccaccacctccagccaccaggggctcctgcgctgctgcctccgccgcaccagggcctggggcagccccagttggggcccccactcctgcatccaccacctgcccagtcctggcccgcacaacttccccctcgggctccactgccaggtcagatgctgctgagcgggggtccccggggcccggtcccccagccgggcctgcagcccagcgtcatggaggacgacatcctcatggatctcatctgaatccccaacacccaataaagttcctttttaacacac

SEQ ID NO: 152263 - DNA, 1293 bp, Homo sapiens
  Payload ID: 9954
  Gene Symbol: MED25
  Gene Name: mediator complex subunit 25
  ENST ID: ENST00000620467
  CDS Start-End: 64-1257
atttctgctcattccgcggcgtcggctgcggctgcagtggtggtggcgggtaccgcacggggtatggtccccgggtccgagggcccggcccgcgccgggagcgtggtggccgacgtggtgtttgtgattgagggtacggccaacctgggaccctacttcgaggggctccgcaagcactacctgctcccggccatcgagtattttaatggtggtcctcctgctgagacggacttcgggggagactatggggggacccagtacagcctcgtggtgttcaacacagtggactgcgctcccgagtcctacgtacaatgtcacgctcccaccagcagcgcctatgagtttgtcacctggctcgatggcattaagttcatgggcgggggtggtgagagctgcagcctcatcgcggaaggactcagcacagccttgcagctgtttgatgacttcaagaagatgcgcgagcagattggccagacgcaccgggtctgcctcctcatctgcaactcacccccatacttgttgcctgctgttgagagcaccacgtactctggatgcacaactgagaatcttgtgcagcagattggggagcgggggatccacttctccattgtgtctccccggaagctgcctgcgcttcggcttctgtttgagaaggcagcccccccggccttgctggagccgctgcagcctccgacagatgtgagccaggacccgaggcacatggtgctggttcggggactcgtgctgcctgttgggggtggctcagccccaggccccctccagtcaaagcagccagtccccctgcctcccgccgcaccctcaggtgccactctctcagcagccccccagcagcctctgccccccgtccccccgcagtaccaggttcccgggaacctgagtgcagctcaggtggccgcgcagaatgcagtggaggctgccaagaaccagaaggctgggctgggccctcgcttctcgcccatcacccctctccaacaagctgctcccggagtgggtccccccttcagccaggccccagctcctgcgctgctgcctccgccgcaccagggcctggggcagccccagttggggcccccactcctgcatccaccacctgcccagtcctggcccgcacaacttccccctcgggctccactgccaggtcagatgctgctgagcgggggtccccggggcccggtcccccagccgggcctgcagcccagcgtcatggaggacgacatcctcatggatctcatctgaatccccaacacccaataaagttcctttttaacacac

SEQ ID NO: 152264 - DNA, 3332 bp, Homo sapiens
  Payload ID: 9954
  Gene Symbol: MED25
  Gene Name: mediator complex subunit 25
  ENST ID: ENST00000622046
  CDS Start-End: 2154-2906
ggtggcatcgctccagggtcttcctccatcccgcagctgtcttccctctgtgtgtgtctccacatggcattctctctgtatctttgtgtctgtgcttataaggacatcagtaattttggattaggccccattttcctgacctcatcttactacaattgcaaagaccctctttccagatagagtcaccttcacaggtgctggggactggaacctcagcttagctttctggttttgttttttgagacagagtttcactgttgtcagccaggctggagtgcagtggtgcaatcttggctcacagcaacttccgtctcctgggttcaagcgattctcctgcctcagcctcccaagtagctgggattacaggcatgtgccactatgcccagctaatttctgtattttttagtagagacagggtttcaccatgttggccaggttggtctcgaacttctgacctcaagtgatctgcctgcctcggcctcccaaagtgctaggattaccggtgtgagccaccgcgcccagcctcagcatagctttctgggagtcacagttcacactttgtaactcggggaaggagcagatcagttacttccgtgcaccaggcactcctgcaggaaagagaaccttagggggatcacctcacgagaccctcacagaaccttgtgaagaaggcattcctgagagttagtacttccggctgcaaatcacgtagtttcccaaacacatagataattgggggcactcggaaaaaatgttctcttatgattctgtgggtcacctgggctcagtgggccatctcgcttggcgactctcacggggttgccatcagatggcagctgagactctggtcatctgaaacctttactgggctggatgttcaaaacagctcctcacacagccctggctgttggctggggcttggctaggaccggccatcccagtgtctgcacatggcctgtccacgtggccacactgtggcagctgggttctgagagggcaggcgttgtaggagcaggcatttatattttgcacaggacaggacatctagagggggccagctattgggattggtttcataggtctgtgacatcagggacagggccctgtggttctcttggcctctcctttatagtcacaaggtagctctcatggctccacgcatcctgtgtgctttcatgaaggaggggaagggggctgtgtgtttccctttcttcaagacagcagaaactttctcagattccagagcaggcattcctttcacctcctatcccggacctaggccactgggcagcccctagttgatgggaggctgctgggagcaggtatccgtgactgtctggggctgggacatgttacagccccagacagcattgggaatgcaggggaggaggacacttggatatggaataggcagctagcagggtctgtctcaggcaggaaaccgaggctcagagaagtcaattcacttggccaaggtcagcctcgcctccctcaggagcccctgccctgaatgctccatgtgttacccccctgatgaccagtgatgtttcctgggtgcttcctgtgggctgagcctcaggcagggctcttgctgtggatcagacatcgcatagtcacagcgaccctgtgatgtgggagcactccccgtggtgtacactggccggtgctgagggctggaggatctcttggatacccggggtccgacccaccgttgatcacaggcctgtgggtaccacgctgtgcatctaggccgctctcccggccgtgaccctcagccgccctctgaggaggccgccgtggcattttatgcccaagaaactgggtccatgaggagcaggtggtggctgaaggttgaagagctgggctccagcactttctctccgctttccctctcagtgggcagctggaaccctagcttgccctgagcgcctcagtttctgtctccagagcaacccatagcacacctgttctccttaaccttctatagcagaaacctcacctcaccttgcctgtggggcctctagagccttctggaatggggagggggtcagggctgcctctttcagggcctgaatggttctgaagagctgttgtccacccaggcgggctgcgtgcacttcccccacacggcgccctgtgaggtgcgcgtgctcatgctcctgtactcgtccaagaagaagatcttcatgggcctcatcccctacgaccagagcggcttcgtcaacggcatccggcaggtcatcaccaaccacaagcaggtccagcagcagaagctggagcagcagcagcgaggaatggggggacagcaggcacccccagggctggggcccattctggaggaccaagccaggccctcacagaatctgctccagctccgcccaccgcagccccagcctcagggtaccgtaggggcctctggggccacggggcagccccagccccaaggtactgcccagcccccgccaggtgcccctcaaggccctcctggagcagcttctggcccaccccctcctggacccatcttcggccccagaaccctggggccaaccctcagctgcgaagcctcctcctcaacccaccaccgccgcagactggggtgcccccaccccaggcctccctccaccacctccagccaccaggggctcctgcgctgctgcctccgccgccagggcctggggcagccccagttggggccccactcctgcatccaccacctgcccagtcctggcccgcacaacttccccctcgggctccactgccaggtaaggggacccgggggagggcagaggtctggactgagtgtcccagcagctcctgggctagagcaccaagaccgagtgctcctgggaagtaaagacataggatccaagaatgagggttcccccatggcctttgcggagctctgagggctccgggaaagtacagcccatgggtccaaggacctagtgggttaagagcgtttcccatgatcctcctgtgtgtgctcctgggattgctgggaaatgtggtcttagggccagagaagtagttttggagaagggcccccaaaggctcatgggaaacagcatatttgtaactagatggggccagaaggtgcttctgttgggtcccccaagggctgcctagaaaacttagtgcctctgggccctcctgggcccaagggcctactgggagatgcagtcccttccccactgcccctcaggtcagatgctgctgagcgggggtccccggggcccggtcccccagccgggcctgcagcccagcgtcatggaggacgacatcctcatggatctcatctgaatccccaacacccaataaagttcctttttaac

SEQ ID NO: 152265 - DNA, 1548 bp, Homo sapiens
  Payload ID: 9954
  Gene Symbol: MED25
  Gene Name: mediator complex subunit 25
  ENST ID: ENST00000617849
  CDS Start-End: 64-1512
atttctgctcattccgcggcgtcggctgcggctgcagtggtggtggcgggtaccgcacggggtatggtccccgggtccgagggcccggcccgcgccgggagcgtggtggccgacgtggtgtttgtgattgagggtacggccaacctgggaccctacttcgaggggctccgcaagcactacctgctcccggccatcgagtattttaatggtggtcctcctgcccccttcagccaggccccagctccccaactacccccaggaccccctggcgcccccaagccaccacctgcttcccagcccagtctggtctccactgtggcccctggctccggcctggctcccacggcacagcccggggcaccgtccatggcaggcactgtggccccaggaggggtgagcggcccttccccagcccagctgggagccccagccctcggtgggcagcagtcagtctccaataagcttctggcctggagcggggtcctggagtggcaagagaaacccaaacctgcctcagtggatgccaacaccaagctgacgcggtcactgccctgccaggtctacgtgaatcatggcgagaacctgaagacggagcagtggccccagaagctgatcatgcagctcatcccccagcagctgctgaccaccctgggccctttgttccggaactcaaggatggtccagttccatttcaccaacaaggacctggagtctctcaaaggcctctaccgcatcatgggcaacggcttcgcgggctgcgtgcacttcccccacacggcgccctgtgaggtgcgcgtgctcatgctcctgtactcgtccaagaagaagatcttcatgggcctcatcccctacgaccagagcggcttcgtcaacggcatccggcaggtcatcaccaaccacaagcaggtccagcagcagaagctggagcagcagcagcgaggaatggggggacagcaggcacccccagggctggggcccattctggaggaccaagccaggccctcacagaatctgctccagctccgcccaccgcagccccagcctcagggtaccgtaggggcctctggggccacggggcagccccagccccaaggtactgcccagcccccgccaggtgcccctcaaggccctcctggagcagcttctggcccaccccctcctggacccatccttcggccccagaaccctggggccaaccctcagctgcgaagcctcctcctcaacccaccaccgccgcagactggggtgcccccaccccaggcctccctccaccacctccagccaccaggggctcctgcgctgctgcctccgccgcaccagggcctggggcagccccagttggggcccccactcctgcatccaccacctgcccagtcctggcccgcacaacttccccctcgggctccactgccaggtcagatgctgctgagcgggggtccccggggcccggtcccccagccgggcctgcagcccagcgtcatggaggacgacatcctcatggatctcatctgaatccccaacacccaataaagttcctttttaacacac

SEQ ID NO: 152266 - DNA, 3174 bp, Homo sapiens
  Payload ID: 9955
  Gene Symbol: MED26
  Gene Name: mediator complex subunit 26
  Uniprot ID: O95402
  ENST ID: ENST00000263390
  CDS Start-End: 264-2066
tcactggagtttggttctcgaggcggcggcagcgagcggcggcggctccggcggctcctcctcctcctttggtggcggcggcggcccgggaccgagacccggccccggctcccctctccgccaccccgcgcgcccccaaccccccggcgccgcggggaacatgcggctccggctcccggaggccggcgagtgagtgacccccgtcccccgcctcagcccgcccgcccgctggcccggccgcaaccccccgcctcgcccaggcaatgacagcggctccggcgtctccgcagcagatcagggaccggctgctgcaggccatcgacccccagagcaacatccggaacatggtggcggtgctggaagtcatctccagcctggagaaataccctattaccaaagaggcacttgaggaaacacgacttgggaagctcatcaacgacgtccgcaagaaaaccaagaacgaggagctcgccaagcgggccaagaagctgctgcggagctggcagaagctcatcgagccggcacaccagcatgaggcggcgctgcgggggctggcgggggccaccggctctgccaacgggggcgcacacaactgccggccggaggtgggggcggctggcccacccaggagcatccatgacctgaagagccgcaatgacctccagaggctgcccgggcagcggctggacaggctgggcagccgcaagcgccggggtgaccagcgtgacctcggccacccagggccgccacccaaggtctccaaagctagccacgaccccctggtccccaactcatcccccctccccaccaacgggatcagtgggagtccagagagcttcgccagctccctggatggcagtgggcatgcaggcccagagggcagccgcctggagcgtgacgagaatgacaagcacagtggcaagatccccgtcaacgccgtgcgaccgcacaccagctccccgggcctgggcaagccccctggaccctgcttgcagccaaaggcttcggtgctgcagcagctggacagggtggacgagactccggggcctccccatcccaagggaccccctcgctgctctttcagtcctcggaactcacggcatgagggctcctttgcccggcagcagagcttgtatgcacccaagggctccgtgcccagcccctcaccgcggccccaggcactcgatgccacacaggtgccgtcaccgcttccactggcacagccgtccacaccccccgtacggcggctcgagctgctgcccagtgcggaaagcccagtgtgctggcttgagcagcctgagagccaccagcggctggcggggccgggctgcaaggcagggctgtccccagccgagcccctcctgtcccgggcaggcttttccccagactcctccaaggcggacagtgatgctgcctcctcagggggctcggacagtaaaaagaagaagaggtaccgacctcgagactatacggttaacttggacgggcaggtggctgaggcgggcgtcaagcctgtccggttaaaagagcggaagctcacctttgaccccatgacgagacagatcaaacctctgacccagaaagagccagtgcgggcagacagccctgtgcacatggagcagcagtccaggacagagctggacaagcaggaggccaaggccagcctccagagccccttcgaacagacgaactggaaggagctgtcacgcaacgagatcatccagtcctacctgagccggcagagcagcctgctctcatcatcgggcgcgcagaccccaggggctcaccacttcatgtctgagtacctgaagcaggaggagagcacccggcaaggggccaggcagctgcatgtgctggtgcctcaaagcccgcccacggacctccctggtctgacccgggaggtcacacaggacgatctcgacagaatccaggccagccagtggccgggggtgaacgggtgtcaggacacacagggtaactggtatgactggacgcagtgcatatcgctcgatccgcacggcgacgacgggcgcttgaacattctgccttatgtctgcttggactgaccggcctgtcagccacaaagtgcattcccatcttgcagaagccgggtgggcgggcaggcaggtgggcaggtggccggggcccagctgcctcctgcgctgggaactcggggagtccggcccaggcgggagggagggggcgggagtcacgcggtctctctgcgctcttccctcaaaactctttttgtgaaatgctgctaccagtttactaacaaaattgcgaagaaggaccgcgtggaaggaaggacggcaaagtgagttcagaactctatagcaaaccagctataaaaagcgttagtccctcacccccaaagaggtgcggacactttccagcacctgaaagctggggcctcagttgcaggcaggcacagaaaacctgtgggagaggtcacctttaacacagcaacagaagcacgcatctcatctctcttgcattttctgttctttaatttggccctgagtgtcttgagacagtgggccatgccactgcctctgtttgctccctacccagccactgtcaggccagtgttgtctgtcatgtgccagaagcttctcagctgtggtgagccactggcattgggcaggcgggccagctggccagccagtgtgacccacactccatgggcagccacctgtttatatctggtttcagttataacccagtttttaaagaaatgctgcaaaaatttaagttttctcatgtttattttaaacaattcctcttccatcagaccaccagacaaaaaaacctttcctttcttcctcccttttcttttttcccttcctgtacacatctagaaaacttcacctttctagagtccccccaaaacaacacaaaagttattgtgggtgctactggttttatgctgtactgtggggcgagggggaagacctgtctgtacgctggaaacactcataaccattcctttagattcgtttgccttatggttatttgtcataaacgcgatttgcaaaaacaaggagccttagtgaatgtacagtacctagacttctgtgttctcaggacgcagaagggagcaactttgctatttggtccagtaagtggacaccttgtgatataaatgtggaaataaaaaaaaaaaaaaaacca

SEQ ID NO: 152267 - DNA, 539 bp, Homo sapiens
  Payload ID: 9955
  Gene Symbol: MED26
  Gene Name: mediator complex subunit 26
  ENST ID: ENST00000598492
  CDS Start-End: 208-539
agacatgcaccttcccgtcattgttcctcccagtgtcattcttcctctgagaagctgtgaacttgaggctttgcccctggggtttgaggctcccatgaggtcccctcagaggaaggtgccttcactgggcagagcctggtggacctgcaccagccccatgaggctgagcggagagtgcagggtggggcccgcctgaggatccggaacatggtggcggtgctggaagtcatctccagcctggagaaataccctattaccaaagaggcacttgaggaaacacgacttgggaagctcatcaacgacgtccgcaagaaaaccaagaacgaggagctcgccaagcgggccaagaagctgctgcggagctggcagaagctcatcgagccggcacaccagcatgaggcggcgctgcgggggctggcgggggccaccggctctgccaacgggggcgcacacaactgccggccggaggtgggggcggctggcccacccaggagcatccatgacctgaagagccgcaatgacctccagaggctgcccgg

SEQ ID NO: 152268 - DNA, 742 bp, Homo sapiens
  Payload ID: 9955
  Gene Symbol: MED26
  Gene Name: mediator complex subunit 26
  ENST ID: ENST00000598608
  CDS Start-End: 104-742
atcacggggttctctgccggtgggggggcggggggactgtgcccccacaagggacggcggcaatgactgcagattgggggagggggcgcttcggaggccagagatgccgctcaacttccgacagatcgggggacccgccccgaagacagagcgatcccgcccaaatgccagtggtgccgaggtggagaagccgccgcgtagacgcagatttgcaacctccggctttcccagctacggcgggcggcttctgccagaggcgctttgccgcctcacgttttcgcgatcggggtcgcgcgtggcggtgcagacccccgccctgccaccacacccattcccacaccctctgaggggcgggggggccgcggcgacacccccggactccgatgacccttctgcgcgcagaatcacaacgtggacgtctggttccctcgccctcacaaaaaactcggcagctgctcagcctgcgactcccgtcccccagtcacgcgccgggaaggctctcccagaggaaggattttcccgccgccctccccgccccgagatccggaacatggtggcggtgctggaagtcatctccagcctggagaaataccctattaccaaagaggcacttgaggaaacacgacttgggaagctcatcaacgacgtccgcaagaaaaccaagaacgaggagctcgccaagcgggccaagaagctgctgcggagctggcagaagctcatcgagccggcacaccagcatgag

SEQ ID NO: 152269 - DNA, 558 bp, Homo sapiens
  Payload ID: 9955
  Gene Symbol: MED26
  Gene Name: mediator complex subunit 26
  ENST ID: ENST00000601478
  CDS Start-End: 395-558
agtagaactgtgaggaacacagatgttaagtgatgattaacaaacttagcttttagaggaaaggtccgacgaatagtagacggtgtactgcatcctcatggcaagtaaaataaccgcacagggcagggcttgctagctgcaggtgaatgccctgtgttcagaccagggagaggcctgagaaggtcccgcagcaaagagggacttgaactagccctggccgcgtgtgtcagtgcctccagctgccaggctctgagcgggaaacgtccttgggagctgctttctttttcacagctcttcaggcaacagagaccaagggagaggtgaccgaggcactctgcagagagacacagcaagaaagatcattttcccacctaagaattggaagatccggaacatggtggcggtgctggaagtcatctccagcctggagaaataccctattaccaaagaggcacttgaggaaacacgacttgggaagctcatcaacgacgtccgcaagaaaaccaagaacgaggagctcgccaagcgggccaagaagctgctgcggagctggcagaa

SEQ ID NO: 152270 - DNA, 478 bp, Homo sapiens
  Payload ID: 9955
  Gene Symbol: MED26
  Gene Name: mediator complex subunit 26
  ENST ID: ENST00000600060
  CDS Start-End: 231-478
gagcggcggcggctccggcggctcctcctcctcctttggtggcggcggcggcccgggaccgagacccggccccggctcccctctccgccaccccgcgcgcccccaaccccccggcgccgcggggaacatgcggctccggctcccggaggccggcgagtgagtgacccccgtcccccgcctcagcccgcccgcccgctggcccggccgcaaccccccgcctcgcccaggcaatgacagcggctccggcgtctccgcagcagatcagggaccggctgctgcaggccatcgacccccagagcaacatccggaacatggtggcggtgctggaagtcatctccagcctggagaaataccctattaccaaagaggcacttgaggtgagtatcccagaccccagcatttgggagggcagaacggggggcaggggatggtaccaaccaggtccttccgcagcttctgggagcatcagtgtctttgc

SEQ ID NO: 152271 - DNA, 1444 bp, Homo sapiens
  Payload ID: 9955
  Gene Symbol: MED26
  Gene Name: mediator complex subunit 26
  Uniprot ID: O95402
  ENST ID: ENST00000611692
  CDS Start-End: 1-279
atgacagcggctccggcgtctccgcagcagatcagggaccggctgctgcaggccatcgacccccagagcaacatccggaacatggtggcggtgctggaagtcatctccagcctggagaaataccctattaccaaagaggcacttgaggaaacacgacttgggaagctcatcaacgacgtccgcaagaaaaccaagaacgaggagctcgccaagcgggccaagaagctccctggatggcagtgggcatgcaggcccagagggcagccgcctggagcgtgacgagaatgacaagcacagtggcaagatccccgtcaacgccgtgcgaccgcacaccagctccccgggcctgggcaagccccctggaccctgcttgcagccaaaggcttcggtgctgcagcagctggacagggtggacgagactccggggcctccccatcccaagggaccccctcgctgctctttcagtcctcggaactcacggcatgagggctcctttgcccggcagcagagcttgtatgcacccaagggctccgtgcccagcccctcaccgcggccccaggcactcgatgccacacaggtgccgtcaccgcttccactggcacagccgtccacaccccccgtacggcggctcgagctgctgcccagtgcggaaagcccagtgtgctggcttgagcagcctgagagccaccagcggctggcggggccgggctgcaaggcagggctgtccccagccgagcccctcctgtcccgggcaggcttttccccagactcctccaaggcggacagtgatgctgcctcctcagggggctcggacagtaaaaagaagaagaggtaccgacctcgagactatacggttaacttggacgggcaggtggctgaggcgggcgtcaagcctgtccggttaaaagagcggaagctcacctttgaccccatgacgagacagatcaaacctctgacccagaaagagccagtgcgggcagacagccctgtgcacatggagcagcagtccaggacagagctggacaagcaggaggccaaggccagcctccagagccccttcgaacagacgaactggaaggagctgtcacgcaacgagatcatccagtcctacctgagccggcagagcagcctgctctcatcatcgggcgcgcagaccccaggggctcaccacttcatgtctgagtacctgaagcaggaggagagcacccggcaaggggccaggcagctgcatgtgctggtgcctcaaagcccgcccacggacctccctggtctgacccgggaggtcacacaggacgatctcgacagaatccaggccagccagtggccgggggtgaacgggtgtcaggacacacagggtaactggtatgactggacgcagtgcatatcgctcgatccgcacggcgacgacgggcgcttgaacattctgccttatgtctgcttggac

SEQ ID NO: 152272 - DNA, 1431 bp, Homo sapiens
  Payload ID: 9956
  Gene Symbol: MED27
  Gene Name: mediator complex subunit 27
  Uniprot ID: Q6P2C8
  ENST ID: ENST00000292035
  CDS Start-End: 65-1000
atcagcgagcgcggcttttttgcttgcgaagccggctttggagagctgctgtggcggcggcaacatggcggacgtgataaatgtcagtgtgaacctggaggccttttcccaggccattagtgccatccaggcgctgcgctccagcgtgagcagggtgttcgactgcctgaaggatgggatgcggaacaaggagacgctggagggccgggagaaggcctttattgcgcacttccaggacaacttacattcggtcaaccgggacctcaatgagctggaacgtctgagcaatctggtaggcaagccatctgagaaccatcctcttcataacagtgggctgttaagcctggatcctgtgcaggacaaaactcctctctatagtcaactccttcaagcatataagtggtcaaacaagttgcagtaccatgcaggactagcatctggccttttaaatcagcagtcattgaagcgttccgctaatcagatgggagtatctgccaaacgtagaccaaaggctcagcccacaactcttgtcctaccacctcaatatgttgatgatgtgatcagccgcattgacaggatgtttcctgaaatgtccatccacttatccagacccaatggaacatcagcaatgcttctggtgaccttgggaaaggtgttgaaagtgatcgtcgtcatgcggagcctgttcattgatcgaacaatagtaaagggatataacgagaatgtctacacagaagatggcaagcttgatatatggtccaaatccaactatcaagtattccagaaggtgacagaccatgccaccactgccctgctccactatcagctgccccagatgccggatgtcgtggtccgatccttcatgacctggttaagaagttacataaagctgttccaggccccgtgccagcgctgcgggaagtttctgcaggacggccttcccccgacatggagggatttccgaaccctcgaagccttccatgacacctgccggcagtagcccccacgctggccccagcctcagaccccacccagcaccttcccagacacgcaggaagcccacagaaggctcagctggttcctcactgcccagatgtgtacagctgctcctccctttcataaagcagcgccatgtgtgcagaggccactcttgaagagcagactccctctgtggctgatgggactaattattcccactagccagcggactgaaggcaaagaagacctttctagaacctggtagaaggaagctgtgcagcatgctcctcgtccatgtgtgtcggcagtgctggtgtctgtcgtctccgcgagctgttactggaatgagcccttgtgttcatgggtatcgtcatgcggggttcttgtgttttgtggggcttgggttttggtaacttatttttataagcaataaaccttttgtatcctggataa

SEQ ID NO: 152273 - DNA, 1281 bp, Homo sapiens
  Payload ID: 9956
  Gene Symbol: MED27
  Gene Name: mediator complex subunit 27
  Uniprot ID: Q6P2C8
  ENST ID: ENST00000357028
  CDS Start-End: 23-850
gagctgctgtggcggcggcaacatggcggacgtgataaatgtcagtgtgaacctggaggccttttcccaggccattagtgccatccaggcgctgcgctccagcgtgagcagggtgttcgactgcctgaaggatgggatgcggaacaaggagacgctggagggccgggagaaggcctttattgcgcacttccaggacaacttacattcggtcaaccgggacctcaatgagctggaacgtctgagcaatctggtaggcaagccatctgagaaccatcctcttcataacagtgggctgttaagcctggatcctgtgcaggacaaaactcctctctatagtcaactccttcaagcatataagtggtcaaacaagttgcagtaccatgcaggactagcatctggccttttaaatcagcagtcattgaagcgttccgctaatcagatgggagtatctgccaaacgtagaccaaaggctcagcccacaactcttgtcctaccacctcaatatgttgatgatgtgatcagccgcattgacaggatgtttcctgaaatgtccatccacttatccagacccaatggaacatcagcaatgcttctgcttgatatatggtccaaatccaactatcaagtattccagaaggtgacagaccatgccaccactgccctgctccactatcagctgccccagatgccggatgtcgtggtccgatccttcatgacctggttaagaagttacataaagctgttccaggccccgtgccagcgctgcgggaagtttctgcaggacggccttcccccgacatggagggatttccgaaccctcgaagccttccatgacacctgccggcagtagcccccacgctggccccagcctcagaccccacccagcaccttcccagacacgcaggaagcccacagaaggctcagctggttcctcactgcccagatgtgtacagctgctcctccctttcataaagcagcgccatgtgtgcagaggccactcttgaagagcagactccctctgtggctgatgggactaattattcccactagccagcggactgaaggcaaagaagacctttctagaacctggtagaaggaagctgtgcagcatgctcctcgtccatgtgtgtcggcagtgctggtgtctgtcgtctccgcgagctgttactggaatgagcccttgtgttcatgggtatcgtcatgcggggttcttgtgttttgtggggcttgggttttggtaacttatttttataagcaataaaccttttgtatcctggataa

SEQ ID NO: 152274 - DNA, 762 bp, Homo sapiens
  Payload ID: 9956
  Gene Symbol: MED27
  Gene Name: mediator complex subunit 27
  Uniprot ID: Q6P2C8
  ENST ID: ENST00000474263
  CDS Start-End: 23-415
gagctgctgtggcggcggcaacatggcggacgtgataaatgtcagtgtgaacctggaggccttttcccaggccattagtgccatccaggcgctgcgctccagcgtgagcagggtgttcgactgcctgaaggatgggatgcggaacaaggagacgctggagggccgggagaaggcctttattgcgcacttccaggacaacttacattcggtcaaccgggacctcaatgagctggaacgtctgagcaatctggtaggcaagccatctgagaaccatcctcttcataacagtgggctgttaagcctggatcctgtgcaggacaaaactcctctctatagtcaactccttcaagcatataagtggtcaaacaagaaagagcaactttctattccaagaatattccattggaaagtctgaagacatttcctccctcctgccctcctgaactgttcttattagaatccagttgcttaatgactaagttactgcaaagttcacctctcacatctatctctgaaggtgctcttttctgtttttgcatcatggaactaacagggttggaatcgttttacattgcaacgcagagcctttcctttagggactctgtcctctattaagggtaaactataaggctcaggggagaggcaccatgtccatcttgttccttgctgggagtccccagcaactagcaaggcgcctggtacactgtaatcattcagtgaagattcactgagagaatgaaagaataaatgaatcgaagcgtt

SEQ ID NO: 152275 - DNA, 10868 bp, Homo sapiens
  Payload ID: 9957
  Gene Symbol: MED28
  Gene Name: mediator complex subunit 28
  Uniprot ID: Q9H204
  ENST ID: ENST00000237380
  CDS Start-End: 25-561
gatctctcttgcgccattccaaacatggcggctccactagggggtatgttttctgggcagccacccggtccccctcaggccccgccgggccttccgggccaagcttcgcttcttcaggcagctccaggcgctcctagaccttccagcagtactttggtggacgagttggagtcatctttcgaggcttgctttgcatctctggtgagtcaggactatgtcaatggcaccgatcaggaagaaattcgaaccggtgttgatcagtgtatccagaagtttctggatattgcaagacagacagaatgttttttcttacaaaaaagattgcagttatctgtccagaaaccagagcaagttatcaaagaggatgtgtcagaactaaggaatgaattacagcggaaagatgcactagtccagaagcacttgacaaagctgaggcattggcagcaggtgctggaggacatcaacgtgcagcacaaaaagcccgccgacatccctcagggctccttggcctacctggagcaggcatctgccaacatccctgcacctctgaagccaacgtgagcaaagggcagaggcagttggcctatgagtgggctgatgcgtgaggttggccacacattccttcctgtggacttgacattttggaagaactctttgccagataatgagttcattttagttttatgctcccattgaaaaattttccactatttttataagctgttaatttcttgagtactttataacatgtctgtagcttggataaaccaagtaagtattttttttttgtctttagcaaagtttagactgtgaatatgatgacacagattcttttttatggtggctttgcttgttttaaatttttgcatgacttttcatctttttatgtgtgtttcctgtagtttgatccgaaggaaaagagtatagtagcctgagaatcaggagatgggagttttagtcgtaggccttatgataattaccccgcggtggtgtgtagaaaagtatgtaaatttgctctgttttaagactttgaactacctcaagaagaggaatctaatacaatatttgtaatgtttccagagctctcagaatgaggatttttttgtaaataggtcagaagacgatggaactgtcctgggttagtatagtaatcttacagtaggatccttaggttgatgctgacttctgtttggggtatgtttatattttatgtggtgtttactttttttttttgacatagaaggatatagtgggagcagtgatacgctaacattcattacattctgcagtaatgaatctgtttaatgggtcagtcactgttttcagtagcatgacagtggggtcataggtgagctgtgaggggctaaatcttgctctgattgtctctttctgttttgagttttgtttgcgtgtatcatttttgttctacattttgggaggggaaacattttccgttaaggaaggttgttgccagtggatttgactccaagggactagagtgtcgtggtgggggtggggaggggctgcagggtgatcattggctactgagcctccacagagagcatgtggtgccctgcctttgggagggtattttgctctcgttagttttgtgggcagcctcagattccctgttgagttgctgttaagaaatggagatttctggctctcattgggtaaggttttctgagttttatatcttattagatcacatccctttacccagaacaaatgcttcactgtcttctgattggcagtactcctgtggctttgtgccttgactcattttgttgtcttcagccttgaaggccccttcccacatggactgacatccactcatgtgcctgatccctgaagcctcccagcacccattcagttgcatccccagggcacaggactttgatctcttctgttgccctcgctaggttctccctggtgggttagtgctttgtatctgtctctctgcccctcactaattctacacccatgagaattagacattattctccttaaatatataaggaccatataatctgtatctttttggtgtgtgtatatggtatctggcacatggatctctgattaccagcctgacatcaacaaatcccctcagttacaacgtataggttaaacaaagcttttaaaagctcatgtggtatgacctcaaggttgctaacctggtcactcatggtaattagaaactctgattggcagctttgtatttcttgactaaaaacctaaataaactgattaggttttaggcgttctttcaaagaggttcttgagaagattgagaactatcctatttggtgcttagtgaaaagattttgaattactgtacgtaccagttgttgccatttctttattaaattcagaagtttttttgccaaataacaatttttcaatcttctctgtttgtagacatcttactgggtgatgaataatcctctaagaaaccctctgagctgctaactttttcagggagaaaatcacaagccatcttctcaagttcccctagaaacctgtggaatgccctctgccaagcactgctctggtactggggagtggagtattatgtcttggaagagactcctgctgtgattgtccaggggtacgttctggtctggcttggtgcttgaccttaggtctgcccacaggcttcaggctttcaactttgaaacaaacatctgtgccacacacattttgtaaatgatcccattcagtcttctagaagccttataacagaatcaatattgtttttcccattttcacagatggataataaatctgtaaaatagggataagactaggacctattccccaggattacttctgcagattaaaggagatgttgaggccaggtgcagtggctcacgcctgtaatcccagcactttggggggctgaggcaggagaatcgcttgaacctgggaggcagaggttgtgatgagccaagatcgtgccattgcactccatcctgggctacaagagtgaaactccgtctcaaaaaagaaaaaggagatgttgaatgggaagtcagcaagggtgctagaatgtagcaagtattcttcaggtgttagtgatttctgttgttcgggaagaggagggttatggaggaagagtatgggatttaggtgggttaagtgatttgcccaaagtcaagaggttagtctttaacctttggcagaagcaggatttgaagtgagttttcacacccctcttccctggtcagtgtgttgataacagcccacccacctgtggttccagggtgttcttaagaagccaaggttgtcttgggtgtggtagctctttgaaaggtagaaagttccaccaagaaggccttttttcttgaatactgcttagcttccttgtcaggctccaagatgcagattgcctgtgggctatctctctccacagataaacctactcacatcttcaggacagccttttttttttgagacaggagtcttgctctgttgcccaggctgtagtgcagtggcacaacggggtcccacaggcaagtgctggggaaaggcccacccagccatcaggtagcctgtgtgttctacaaacagcagctggcagcactgtctcctgccggacattcctgccacccgacatcaaagctggtgggtgaccttttcagccatttgacattcctcccagaagaacctctgcctcccagaggtttaagcagttctcctgcctcagcctcccaagtagctgggctatttttttttttttttttttgagatggagtcttgctctgtcgcccggttagagtgcagtggtgcaatctcggctcactgcaacctctgcctcccgggttcaagtaattttcctacgtcagcctcccgagtagctgtcaggtgcacaccactacacccagataattttgtatttttagtagagatggggtttcaccatgttggtcaggatggtctcaatctgacctcgtgatccgcctgcctctgcctcccaaagggctgggattacaggcatgagccaccgcgcccagccttaatttttgtatttttaatggagatggggttttgccatgttggccaggctggtcttgaactcctgacctcaagtgatctgtccgcctcagcctcccaaagtactgagattacaggcatgagccaccgtgcccagcccatcttcatcttctttacttgaacttaattctttttcatgcatcttcccttctttcctcttttctcctccacccaaatgtcttaactgttaacattcccaggtgtttggtcctgggcctctggaggttgtgaaggagcactgctcagtcctcccttcaagaaagcagcttcaaggagttcaattacaaaagctcctggcattggggacctgccgccatgttcctgcccagggcatgctggtcctggctgtcaccaagcacagtggaggtcaggtgctaggccatttctgcccgacacaggcctcctctaatgagcagtctgaggccaggcacaggaggctgaggcaggagaatcgcttgaacccaggaggtggacgttgcagtgagccgagatcgagccactgcactccagcctgggtgacagagtaagacttcgtctcaaaaaataaaaaataaaaaaatactgagcagtctgcttgggcgcttccatcagcctggccatgacatctttggagctgtcctgccctcttttgccccggtgttccttggcccacctgtcagacctacatcataggctcttcctgtcttctgtttcctctcccctttctctaacataggtgtttctcctgagaaagaaaaaaaccacctgtccctgacattcagaagctgacaacactgttcggtcatgccattctcctgttggacataaacagtctctgaatgccaaccccaaagttgctctcaggccatgataaaataaaccacttaataattttgtctaagcacgtacaaagaaaattcaaggtcagtttaccactcacaaaataccaaacatccttctgctggttaaaacgagtgacagctgccgtgtgtgtgtgtgtgtgtgtgtgtgtgtgtgtgtgtatgtgtatatgcgtatatatgtgtatgtatgtgtgtatatatatatgtgtgtgtgtatatatatatatgcaattatacctttatccctactctagtccaccttcctataaataagatgtattgagatgctcagtgcccccattctgacagcatccaatcgagtgaatcctcacttccttgaaatcacccaaccagggccagaatcctaaaagaggttctttgtgacaccctctgtctgagaagtcctatggttctctgtgatgaatagacccaacttgttcaaatacaggcatttctggtgggctttggctgaaggcattcacaccccccagtgaatgtcttgcacttctaattgtgtctcggggcatgcctggtggaggacctgactgagacaattgtgactggatgtggtctgagagcaggcagtaggatgaggcttggggactggctcactcactgcccaactggtagcaaaacccatctggagcagcgtgtgaggtatggacactcactcacacgagggggtggcccagttgctgaggattccaccagtggtaccctgggaaaatatccctgtggaggggaatgggaggagtcaaactgtggaagataagaggagtactgcacacaaggacagtagagtgtctgttccctgcagagggatagtgaggaactgatgaggtgactgtgagtgcccggggcctctgtcgttatcttggaggatcactttgaggtcaggagttcatgaccagcctggccaacatggtgaaaccctgtctctactaaaaatacattaattagcatggtggcgggtgcctgtagtcccagctactcgggaggctgaggcaggagaatcgcttgaacccgggaggccgaggttgcagtgagctgagatggcgccactgcaccccagcttgggtgacagagcaagactccgtctcaaaaacaaacacacagtactgcatcctgggggtggaggtgaggtgacggtagagatcagtgctacccttggaaatctgacagatacagtaagatggtccctatcatagttccatttaatttgccagcctcatctgcagaatccagatggatcctggagaaaaattaaccaagtagcctcaatcacaaatgttgggttggatattacatcagtgttagagcagttaagggctcaggtatgtggtgtgcagccattgactgggtgaatccatttttacctaccccaattacaaaacagtttgctttcatgtggaacagatagtattcctttcagttttgctgcaggaacatattaactcttccacccctgtcataatacagcctgaagagatttaccattaaatactgtttttttctctctcttaacttaatcccgaattggataatttctcttcatcttcactgtcacctctacgccatcactgtcatctctagaccgctctgctgttgagagattgatggaatcattatgcaaactaaaatagaatgttttatctatcaaattgtatttctttgtcaatagtgttagggcacagtaggttcatttactgctggtaagggtgtaaattgttagaaactttctgaatggcagtttggtaataacaaacaaaaagcttaagtttgtgtccttaaatgccttacttcaatacccaaggcatatggcctcaataaaaaattatggaagcatgcaaagattttgttaacaaagatataatcattgcagggtagaatttagaaatttaagactgaaagatcttttcagtcacctgcagcaagaaaggagtcaaaacctatgtacgatctcaactagtaaaattttctccttgcccagggatcatgctgagtttaaggacagaaatgcaaagtgcagcctgggaaagtgtttcaacacacaaaaatagaaccacctgtatgtagtctttttgaaagcacaaaataaagagcagtcctacagggttcactgctatgtcctgaatgttgatgtcccttccaaaattcatatgttggaacctaatgtcaatgtaatagtattaagaggtggggcttttgggaagcaatggagtcatgagggcttcaccctcatgagtaggataagtacccttacaaaagaggctcagggaggcgctcttgcctcttccaccatgtaaggacacgtagcaggcacccatttctgaagaatgggccctccccagactccatatctgctggtgccttgatcttggacttagcctctaggactgtgagtgacatatttctattgtttataaattatccagtataagtaagatattttgttagagcagcctgaacgaactaagacactctaagcgggaaactcacaaaaaatatttggtagtgaaaaacagtatggtgtgttaatgtatggtgacaagtgtttgtttgcatttaaaaatgcattggagcctcgttttgattaggcagtaaatttacctttaatacgtaagtttgacagttatatgtaatcagcttttttttttttaagatggtgtgattgaggttaatgtgaactgaactttctatttctaagctgtcttcatctaattttacctttctgtggaaaatcaatacaagtcaaccatttttattgcccagttattcaaagttttattcaaagagcaaagatttgacaatgcatagaattaacattggtttgtgggccaccttctgggccagcaccaaagactgaaaaaatattttgccccctaaaagttgttattgagtcttgtcaaatcacattgctctgtcagaaggtaagacaaatcagtgtggactgagagcaaggtcagcaccgtgaacagccattgcggttcctttaacccactgggaattcatgcagtgaagaagcaacacaccatgaggcaaatggctcaaacccaaagaccagaggttcaggggatatatatatatatttttttaatctgtagagatgggatctcactatcttgcccaggctggtctcgaactcttgggctcatgctgtcctacctcagacttccaagtagctgggttttctttgggctaattatttttttgtagagatggaggtctcgctgtgttgcccaggctggtctcaaattcctggcctcaagctctcctcccatctcagcctcccaaagtgttgggattacaggcatgagccatgtgcccagtctagaagatctttgacttcaaagaacagataatctagagaccttcacaagtgatcatgttggcactatggtcattacactgagacctataactgggctaggattggttatttacagaaaaaccttgtggtacttaattccaattcatgttaatttatgttatcttgcttaatccttgcaaagcccttttagaggtgggtgttatcccatctataatctgctgcttgtcttagaccaaggaagtgaaagtattcagtccaagcatgctaccatccatttctggtaggtttggtttgtttttagttggctttcctgtttaactgttatttgtcttcctattgaggttagatgtgcattttggaattgcatcattttacatagaaacagctttccagtggagttgactagcatcctaaggacaagtacaaccacttttgaaatagatcatggaaatcacaaagtctgatgttccacaaaatggagtatgatgttatggacactagaaatacaaggtatgggtcattagtaacgctaataacattttcctatagatgacttttaataacactggtttaatgtcaattttttttttttttttttttttttttttttttttttttttttttggagacagggtctccctctgtcacccaggctggttggaatgcaggagttcgaacttggctcactgcaacctctgcctcctaggttcaagtgatcctcccgcctcagtcccccaagtacctgggaccacaggcacacgccaccatgcctggctaatttttgtatattttgtagagatggggtttcaccatattggccaggctggtctcaaattcctggactcaagcagtccatctgcctcagcctcccaaagtgatgggattacaggcgtgagctgctgtgcctggcagaacagtatgaagtgttaacgccaaaatttgttttagctatcatatataaatcataagcatattatttggttggttggtgttagttcattccttcaatcggatgatttaaaataaatgtttttcaagtatcctctgtgatgtatcccaaaggttagcttagaaagaaaagtacttggtgaaccattcctggtgcggagagccctgtttctgctggacttctttggcttgggccgtttcaccatctggggtcctaaaagcaaaaaaaggtttttttatatggttttgaaaactatgcaagaagcagcttaatacccaccatcttttcagggaaagataactgcttgtttactcttcaaaaacacccaaatgggactggccaacattagtagtgggaaacaaattgtaaaggatggggctggggagggagtacctaatcctcatttggaaaacagaaggttcaccattgtttggttctccattgttcctttgagacttagtggttgtagctctaataatgcaggattaaccaaacctacagatcaagagactttgtttttattttttgtgacagagtctccctctgtcacccaggctggagtgcagtggcatgatctcggctcactgcaacctccagcctcctgcgttcaagcgatcattgtgcctcagcctcccggggagctggaattacaggcgcataccaccacacctggctaatttttgtattttttgtagagatgggtttcaccatgttgcccaggctggtctcgaactcctgaccttaggtgatccacccacctccatctcccaaagtgctgggattacaggcgtgagccaccaagcccggcccgattaagagactttagaattccaaggtgatagagtaaatcttgaggaataatgttagtaataatactgaaactatattgaagatttttgtgccaagtcctgtgctaagcacatcctatggattaattcctttagtctcacgtcagtctgatgagataggtgctgtattatcttaattttaaaggcaaggtatatggagacctggagaggtcaagtgacctgtccaaggccacagagctaagaatgaggaagactgtaatttgaattcagacctccaggccagatggagtccaccttttgtataacccatgctgaagttttcaggtaagtgattcagtgtcccttgtctaatcatccatgaaaaaaggccttctggaatttggtaccaggtgctagaaagaatcctacttcccctcttatctacagggaaatagaataagggcccctgtccccaacatcccccaaaccttgtggcagtttttgcatctgtagactggttgggtttgtaggtccggccacagctggggcttgggtccaagctgggtgatgtagttattggaggggcattaatcctggaactcagatcgccactcagaaagttctttgcataggaggcgaggttcggcacgctgaccacgcggctgggcacgtcctccaccttctttttctgtttgtattaatggacaggttagtgcaatgcaatgcaaaaaacaaaataaagcattattgtaaaagcaaataatgctcacccaatcaaaattgtatcggagaagaagcaacaatttcatttatacacttacatgctattttttaaagcacttttccctccaatcttcattttgtattataaataaatatgtatgttcacaacctcttaaccaaaa

SEQ ID NO: 152276 - DNA, 879 bp, Homo sapiens
  Payload ID: 9957
  Gene Symbol: MED28
  Gene Name: mediator complex subunit 28
  ENST ID: ENST00000503945
  CDS Start-End: 1-540
ccactagggggtatgttttctgggcagccacccggtccccctcaggccccgccgggccttccgggccaagcttcgcttcttcaggcagctccaggcgctcctagaccttccagcagtactttggtggacgagttggagtcatctttcgaggcttgctttgcatctctggtgagtcaggactatgtcaatggcaccgatcaggaagaaattcgaaccggtgttgatcagtgtatccagaagtttctggatattgcaagacagacagaatgttttttcttacaaaaaagattgcagttatctgtccagaaaccagagcaagttatcaaagaggatgtgtcagaactaaggaatgaattacagcggaaagatgcactagtccagaagcacttgacaaagctgaggcattggcagcaggtgctggaggacatcaacgtgcagcacaaaaagcccgccgacatccctcagggctccttggcctacctggagcaggcatctgccaacatccctgcacctctgaagccaacacatcttactgggtgatgaataatcctctaagaaaccctctgagctgctaactttttcagggagaaaatcacaagccatcttctcaagttcccctagaaacctgtggaatgccctctgccaagcactgctctggtactggggagtggagtattatgtcttggaagagactcctgctgtgattgtccaggggtgtttctcctgagaaagaaaaaaaccacctgtccctgacattcagaagctgacaacactgttcggtcatgccattctcctgttggacataaacagtctctgaatgccaaccccaaagttgctctcaggccatgataaaataaaccacttaataattttgtctaa

SEQ ID NO: 152277 - DNA, 758 bp, Homo sapiens
  Payload ID: 9957
  Gene Symbol: MED28
  Gene Name: mediator complex subunit 28
  ENST ID: ENST00000612711
  CDS Start-End: 4-582
aacatggcggctccactagggggtatgttttctgggcagccacccggtccccctcaggccccgccgggccttccgggccaagcttcgcttcttcaggcagctccaggcgctcctagaccttccagcagtactttggtggacgagttggagtcatctttcgaggcttgctttgcatctctggtgagtcaggactatgtcaatggcaccgatcaggaagaaattcgaaccggtgttgatcagtgtatccagaagtttctggatattgcaagacagacagaatgttttttcttacaaaaaagattgcagttatctgtccagaaaccagagcaagttatcaaagaggatgtgtcagaactaaggaatgaattacagcggaaagatgcactagtccagaagcacttgacaaagctgaggcattggcagcaggtgctggaggacatcaacgtgcagcacaaaaagcccgccgacatccctcagggctccttggcctacctggcaggcatctgccaacatccctgcacctctgaagccaacgtgagcaaagggcagaggcagttggcctatgagtgggctgatgcgtgaggttggccacacattccttcctgtggacttgacattttggaagaactctttgccagataatgagttcattttagttttatgctcccattgaaaaattttccactatttttataagctgttaatttcttgagtactttataacatgtctgtagcttggataaaccaagtaagtattt

SEQ ID NO: 152278 - DNA, 3653 bp, Homo sapiens
  Payload ID: 9958
  Gene Symbol: MED29
  Gene Name: mediator complex subunit 29
  ENST ID: ENST00000315588
  CDS Start-End: 50-715
aattgcctagggggcgggactaactagcaaacggggactagaaatagggatgctgaaaagcaacggggagagacgcagtcgtaacgcacttccggcggtctacgcgaggaagatggctgcatcccagcagcaagcttcagcggcttcctcagctgctggtgtatcgggtcctagttcggctggcggcccgggtccccagcagcagccgcaaccgccagcacaactggtgggccctgcccagagcggcctcctgcagcaacagcaacaggacttcgatcctgtgcagcgttataagatgctcatcccgcagctgaaggagagtctacagaccttgatgaaggttgcggcccaaaacttgattcagaacactaacatcgacaatggacaaaagagcagtgatggacccatacagcgctttgacaagtgcctggaagagttctatgcactctgtgaccagctggagctgtgcctgcgcctggcgcatgagtgcctgtcacagagttgtgacagtgccaagcactctccaacgttggtgcccacagccaccaagcccgacgcagtgcagcctgacagcctcccctacccacagtacctggcggtcatcaaagcccagatttcctgtgccaaggacattcacaccgccctgctggactgtgccaacaaggtcacgggcaagacacccgcaccacctgctggccctgggggcactctgtgaagtgggggacagggagtggggcaggcagtggttggtgggtggtgtgcaaagggaatgaagagcgtcctgggcctaaacacagcagcctcctctcttcctgcctgagcaccgcagcgggagccagcagggggcagcagaggccaacagggagctcgcaggccgggcccctgcgtccctgccccttcttcctgctccccctcctagcctagggtagactttgaactgtgtgtgttgatgacttctctgttccacaggccctcccccattcttgcctgggtgtggagccctggctgtcccctctccctcagtccttcctgactgtctccagctgggaggtggtctctgtgtgccactcctctgtgtctctattacagttgtgtctctctcatcctgtctctttttcccttgtttctctgttcctgttaatgtgtttctccccatggtcctatttctctcactctgacctctctctcttagtcccctttagctgtcttctatccccagctcctaactgggactctgtgtctatgcagggggccagcacccctgggttatctggggctaagggaagggacttcatttccaggggccacagccaagcccagagtcccccagcggctcgcatgtcagcccagaccccagggtccttggcctaggagaggagcagtggaggggcccaggctctgagctccacaggtctgagcagggagcaactcaggcccccacccaagcctgcgtcagcggaacttgagtgaggggcgttgtgcaatttgtggcaaggctggcccagctggatgcctgggtcccagtatttttagccccaaaggagaagtgaaaaggccccagccggggtgaatcatcagtcctggggaagaacccaggcgcctgagccccagctccgggaagcaggcactggggagggggcttcaaggagggagtgccccctcagactccctgcttccctggaagcttcaggaagctcagcctcagccttcaggcctgagcaagtgcagggcggagctaccagcccaggctcagatgttggggtgtgaaagcctcaagtgactcagcctggttggagaactgccccacccagtatcttctgtgccatggttcccacattcgcactccatggcctcctgtcctggaccccacgtctgcaaggaaaccctaggaccatggatacctctgtgattcacgctgagcccaagtccccacactggaaaactgggaaatggccagctgtgtgtcccaggaaattcctccccttattcttccttgaagtgcccgagcatgtagggcaagaaggaaggctgaagcgctgtccctaggaggaatttctccttcaggggagcctcagttttgcccatttatctaattgaatcagttttttacccaatcccccgattttgtaggataatctcccttatctaaagtcaactgattatggactttaatcacatctacaaaacacttccatggcgacagctagatgagtgtttgaataactgggactgtagcccgtccaagttgacacataaaactgaccatcgggccgggggcggtggctcacgcctgtaatcccaacactttgggagcccgaggcgggcggatcacaaggtcaggagttcgagaccagcctggccaacacggtgaaaccccgactctactaaaaatacaaaaaattagccgggtgtggtggcacacacctgtagtcccagctactcgggaggctgaggcaggagaatcgtttgaacctgggaggcagaggttgcagtgagccaagatcacactattgcactccagcctgggcgacagggcaagactctgtctcaaaaaaaataaaaaactgaccatctagtccttgtcatctgggcaccctcacacatctccttaaccacacttaatctccaaataagtacgataacatagtcatagtcccacccaacatgatgcagttatcttgcatacaactgaagacaactaaccctttccccaacagagcccaccagcagtggtggagatgtcggtccatgagcgcacacacaagactgagggactgtcggccctcccaggtggtgtcaacacaacatcacacacaggtgggggggcctgatagcccagcacccatgatacagggcctaccaatgcttaaaaccacacccagggagcccacagaggcactcagtgggtggtggggtgatggatacacatctatcaggcacagggcggaggtgggcaccactgagttgcactcagcaaacacattgggtatcttgtgcccaaggcctgtatttgtggagctgatgttctagtgagagacagtaaatgtgacaaaagtaaaatatatcagatggtgagaaaacagaaaaatgagatcagaagtggagatgttggggccaggcacagtggcccaggcctgtaatcccatcactttgggaggtgcaggcaggcagatggcttgagcccaggaattcaagaccagtccgagcaacatagcaaaagcccttatctgcaaaaaattcaaaaattagccaggtgtggtggtgcgtgcccaggttcccaggtactcggaggctgagaggtgggaggatgccttgagcttgagaggttgaagctgcagtgagctgtgatcgcaccactgcactccagcttggttcatggagaccctgtttttttaaaaaaagaagtggaggtgtttacaccagcaaaatactcattttttaagtgtaattaagttgaagatcaaaaaatggaaatgtataattaaatcatacttagcaaatctaacacatgaaatgtaacatctgcatatggagaatcgtgttactttattgaaaaacattaaaagtttgagaacttaagttggattgtggtttcgtgagcattcattatggtttatatatgttccatgtatttattattaaatagatgacaa

SEQ ID NO: 152279 - DNA, 2941 bp, Homo sapiens
  Payload ID: 9958
  Gene Symbol: MED29
  Gene Name: mediator complex subunit 29
  ENST ID: ENST00000599417
  CDS Start-End: 58-348
attggcttaattgcctagggggcgggactaactagcaaacggggactagaaatagggatgctgaaaagcaacggggagagacgcagtcgtaacgcacttccggcggtctacgcgaggaagatggctgcatcccagcagcaagcttcagcggcttcctcagctgctggtgtatcgggtcctagttcggctggcggcccgggtccccagcagcagccgcaaccgccagcacaactggtgggccctgcccagagcggcctcctgcagcaacagcaacaggacttcgatcctgtgcagcgttataagatgctcatcccgcagctgaaggagagtctacagaaagagcagtgatggacccatacagcgctttgacaagtgcctggaagagttctatgcactctgtgaccagctggagctgtgcctgcgcctggcgcatgagtgcctgtcacagagttgtgacagtgccaagcactctccaacgttggtgcccacagccaccaagcccgacgcagtgcagcctgacagcctcccctacccacagtacctggcggtcatcaaagcccagatttcctgtgccaaggacattcacaccgccctgctggactgtgccaacaaggtcacgggcaagacacccgcaccacctgctggccctgggggcactctgtgaagtgggggacagggagtggggcaggcagtggttggtgggtggtgtgcaaagggaatgaagagcgtcctgggcctaaacacagcagcctcctctcttcctgcctgagcaccgcagcgggagccagcagggggcagcagaggccaacagggagctcgcaggccgggcccctgcgtccctgccccttcttcctgctccccctcctagcctagggtagactttgaactgtgtgtgttgatgacttctctgttccacaggccctcccccattcttgcctgggtgtggagccctggctgtcccctctccctcagtccttcctgactgtctccagctgggaggtggtctctgtgtgccactcctctgtgtctctattacagttgtgtctctctcatcctgtctctttttcccttgtttctctgttcctgttaatgtgtttctccccatggtcctatttctctcactctgacctctctctcttagtcccctttagctgtcttctatccccagctcctaactgggactctgtgtctatgcagggggccagcacccctgggttatctggggctaagggaagggacttcatttccaggggccacagccaagcccagagtcccccagcggctcgcatgtcagcccagaccccagggtccttggcctaggagaggagcagtggaggggcccaggctctgagctccacaggtctgagcagggagcaactcaggcccccacccaagcctgcgtcagcggaacttgagtgaggggcgttgtgcaatttgtggcaaggctggcccagctggatgcctgggtcccagtatttttagccccaaaggagaagtgaaaaggccccagccggggtgaatcatcagtcctggggaagaacccaggcgcctgagccccagctccgggaagcaggcactggggagggggcttcaaggagggagtgccccctcagactccctgcttccctggaagcttcaggaagctcagcctcagccttcaggcctgagcaagtgcagggcggagctaccagcccaggctcagatgttggggtgtgaaagcctcaagtgactcagcctggttggagaactgccccacccagtatcttctgtgccatggttcccacattcgcactccatggcctcctgtcctggaccccacgtctgcaaggaaaccctaggaccatggatacctctgtgattcacgctgagcccaagtccccacactggaaaactgggaaatggccagctgtgtgtcccaggaaattcctccccttattcttccttgaagtgcccgagcatgtagggcaagaaggaaggctgaagcgctgtccctaggaggaatttctccttcaggggagcctcagttttgcccatttatctaattgaatcagttttttacccaatcccccgattttgtaggataatctcccttatctaaagtcaactgattatggactttaatcacatctacaaaacacttccatggcgacagctagatgagtgtttgaataactgggactgtagcccgtccaagttgacacataaaactgaccatcgggccgggggcggtggctcacgcctgtaatcccaacactttgggagcccgaggcgggcggatcacaaggtcaggagttcgagaccagcctggccaacacggtgaaaccccgactctactaaaaatacaaaaaattagccgggtgtggtggcacacacctgtagtcccagctactcgggaggctgaggcaggagaatcgtttgaacctgggaggcagaggttgcagtgagccaagatcacactattgcactccagcctgggcgacagggcaagactctgtctcaaaaaaaataaaaaactgaccatctagtccttgtcatctgggcaccctcacacatctccttaaccacacttaatctccaaataagtacgataacatagtcatagtcccacccaacatgatgcagttatcttgcatacaactgaagacaactaaccctttccccaacagagcccaccagcagtggtggagatgtcggtccatgagcgcacacacaagactgagggactgtcggccctcccaggtggtgtcaacacaacatcacacacaggtgggggggcctgatagcccagcacccatgatacagggcctaccaatgcttaaaaccacacccagggagcccacagaggcactcagtgggtggtggggtgatggatacacatctatcaggcacagggcggaggtgggcaccactgagttgcactcagcaaacacattgggtatct

SEQ ID NO: 152280 - DNA, 546 bp, Homo sapiens
  Payload ID: 9958
  Gene Symbol: MED29
  Gene Name: mediator complex subunit 29
  ENST ID: ENST00000600973
  CDS Start-End: 36-380
gtcgtaacgcacttccggcggtctacgcgaggaagatggctgcatcccagcagcaagcttcagcggcttcctcagctgctggtgtatcgggtcctagttcggctggcggcccgggtccccagcagcagccgcaaccgccagcacaactggtgggccctgcccagagcggcctcctgcagcaacagcaacaggacttcgatcctgtgcagcgttataagatgctcatcccgcagctgaaggagagtctacagaccttgatgaaggttgcggcccaaaacttgattcagaacactaacatcgacaatggacaggtctccctctgtcacccaggctggactacagtggcacgatcttggctcattgcagccttgaacacctgagttaggagatcctcttgcctcagcctcccaagtagccaggactacagacatggctacagactacagatgcctggctaatttaaagagcagtgatggacccatacagcgctttgacaagtgcctggaagagttctatgcactctgtgaccagctggagctgtgcctg

SEQ ID NO: 152281 - DNA, 2490 bp, Homo sapiens
  Payload ID: 9958
  Gene Symbol: MED29
  Gene Name: mediator complex subunit 29
  Uniprot ID: Q9NX70
  ENST ID: ENST00000599213
  CDS Start-End: 28-630
gcacttccggcggtctacgcgaggaagatggctgcatcccagcagcaagcttcagcggcttcctcagctgctggtgtatcgggtcctagttcggctggcggcccgggtccccagcagcagccgcaaccgccagcacaactggtgggccctgcccagagcggcctcctgcagcaacagcaacaggacttcgatcctgtgcagcgttataagatgctcatcccgcagctgaaggagagtctacagaccttgatgaaggttgcggcccaaaacttgattcagaacactaacatcgacaatggacaaaagagcagtgatggacccatacagcgctttgacaagtgcctggaagagttctatgcactctgtgaccagctggagctgtgcctgcgcctggcgcatgagtgcctgtcacagagttgtgacagtgccaagcactctccaacgttggtgcccacagccaccaagcccgacgcagtgcagcctgacagcctcccctacccacagtacctggcggtcatcaaagcccagatttcctgtgccaaggacattcacaccgccctgctggactgtgccaacaaggtcacgggcaagacacccgcaccacctgctggccctgggggcactctgtgaagtgggggacagggagtggggcaggcagtggttggtgggtggtgtgcaaagggaatgaagagcgtcctgggcctaaacacagcagcctcctctcttcctgcctgagcaccgcagcgggagccagcagggggcagcagaggccaacagggagctcgcaggccgggcccctgcgtccctgccccttcttcctgctccccctcctagcctagggtagactttgaactgtgtgtgttgatgacttctctgttccacaggccctcccccattcttgcctgggtgtggagccctggctgtcccctctccctcagtccttcctgactgtctccagctgggaggtggtctctgtgtgccactcctctgtgtctctattacagttgtgtctctctcatcctgtctctttttcccttgtttctctgttcctgttaatgtgtttctccccatggtcctatttctctcactctgacctctctctcttagtcccctttagctgtcttctatccccagctcctaactgggactctgtgtctatgcagggggccagcacccctgggttatctggggctaagggaagggacttcatttccaggggccacagccaagcccagagtcccccagcggctcgcatgtcagcccagaccccagggtccttggcctaggagaggagcagtggaggggcccaggctctgagctccacaggtctgagcagggagcaactcaggcccccacccaagcctgcgtcagcggaacttgagtgaggggcgttgtgcaatttgtggcaaggctggcccagctggatgcctgggtcccagtatttttagccccaaaggagaagtgaaaaggccccagccggggtgaatcatcagtcctggggaagaacccaggcgcctgagccccagctccgggaagcaggcactggggagggggcttcaaggagggagtgccccctcagactccctgcttccctggaagcttcaggaagctcagcctcagccttcaggcctgagcaagtgcagggcggagctaccagcccaggctcagatgttggggtgtgaaagcctcaagtgactcagcctggttggagaactgccccacccagtatcttctgtgccatggttcccacattcgcactccatggcctcctgtcctggaccccacgtctgcaaggaaaccctaggaccatggatacctctgtgattcacgctgagcccaagtccccacactggaaaactgggaaatggccagctgtgtgtcccaggaaattcctccccttattcttccttgaagtgcccgagcatgtagggcaagaaggaaggctgaagcgctgtccctaggaggaatttctccttcaggggagcctcagttttgcccatttatctaattgaatcagttttttacccaatcccccgattttgtaggataatctcccttatctaaagtcaactgattatggactttaatcacatctacaaaacacttccatggcgacagctagatgagtgtttgaataactgggactgtagcccgtccaagttgacacataaaactgaccatcgggccgggggcggtggctcacgcctgtaatcccaacactttgggagcccgaggcgggcggatcacaaggtcaggagttcgagaccagcctggccaacacggtgaaaccccgactctactaaaaatacaaaaaattagccgggtgtggtggcacacacctgtagtcccagctactcgggaggctgaggcaggagaatcgtttgaacctgggaggcagaggttgcagtgagccaagatcacactattgcactccagcctgggcgacagggcaagactctgtctcaaaaaaaataaaaaactgaccatcta

SEQ ID NO: 152282 - DNA, 1471 bp, Homo sapiens
  Payload ID: 9958
  Gene Symbol: MED29
  Gene Name: mediator complex subunit 29
  Uniprot ID: Q9NX70
  ENST ID: ENST00000594368
  CDS Start-End: 31-621
aacgcacttccggcggtctacgcgaggaagatggctgcatcccagcagcaagcttcagcggcttcctcagctgctggtgtatcgggtcctagttcggctggcggcccgggtccccagcagcagccgcaaccgccagcacaactggtgggccctgcccagagcggcctcctgcagcaacagcaacaggacttcgatcctgtgcagcgttataagatgctcatcccgcagctgaaggagagtctacagaccttgatgaaggttgcggcccaaaacttgattcagaacactaacatcgacaatggacaaaagagcagtgatggacccatacagcgctttgacaagtgcctggaagagttctatgcactctgtgaccagctggagctgtgcctgccaccaagcccgacgcagtgcagcctgacagcctcccctacccacagtacctggcggtcatcaaagcccagatttcctgtgccaaggacattcacaccgccctgctggactgtgccaacaaggtcacgggcaagacacccgcaccacctgctggccctgggggcactctgtgaagtgggggacagggagtggggcaggcagtggttggtgggtggtgtgcaaagggaatgaagagcgtcctgggcctaaacacagcagcctcctctcttcctgcctgagcaccgcagcgggagccagcagggggcagcagaggccaacagggagctcgcaggccgggcccctgcgtccctgccccttcttcctgctccccctcctagcctagggtagactttgaactgtgtgtgttgatgacttctctgttccacaggccctcccccattcttgcctgggtgtggagccctggctgtcccctctccctcagtccttcctgactgtctccagctgggaggtggtctctgtgtgccactcctctgtgtctctattacagttgtgtctctctcatcctgtctctttttcccttgtttctctgttcctgttaatgtgtttctccccatggtcctatttctctcactctgacctctctctcttagtcccctttagctgtcttctatccccagctcctaactgggactctgtgtctatgcagggggccagcacccctgggttatctggggctaagggaagggacttcatttccaggggccacagccaagcccagagtcccccagcggctcgcatgtcagcccagaccccagggtccttggcctaggagaggagcagtggaggggcccaggctctgagctccacaggtctgagcagggagcaactcaggcccccacccaagcctgcgtcagcggaacttgagtgaggggcgttgtgcaatttgtggcaaggctggcccagctggatgcctgggtcccagtatttttagccccaaaggagaagtgaaaaggccccagccggggtgaatcatcagtcctggggaagaacccaggcgcctgagccccagctccgggaagca

SEQ ID NO: 152283 - DNA, 636 bp, Homo sapiens
  Payload ID: 9958
  Gene Symbol: MED29
  Gene Name: mediator complex subunit 29
  ENST ID: ENST00000596297
  CDS Start-End: 12-636
acgcgaggaagatggctgcatcccagcagcaagcttcagcggcttcctcagctgctggtgtatcgggtcctagttcggctggcggcccgggtccccagcagcagccgcaaccgccagcacaactggtgggccctgcccagagcggcctcctgcagcaacagcaacaggacttcgatcctgtgcagcgttataagatgctcatcccgcagctgaaggagagtctacagaccttgatgaaggttgcggcccaaaacttgattcagaacactaacatcgacaatggacaaaagagcagtgatggacccatacagcgctttgacaagtgcctggaagagttctatgcactctgtgaccagctggagctgtgcctggtaagaagccttctggacacgggcgcctggcgcatgagtgcctgtcacagagttgtgacagtgccaagcactctccaacgttggtgcccacagccaccaagcccgacgcagtgcagcctgacagcctcccctacccacagtacctggcggtcatcaaagcccagatttcctgtgccaaggacattcacaccgccctgctggactgtgccaacaaggtcacgggcaagacacccgcaccacctgctggccctgggggcactctgtg

SEQ ID NO: 152284 - DNA, 3565 bp, Homo sapiens
  Payload ID: 9958
  Gene Symbol: MED29
  Gene Name: mediator complex subunit 29
  ENST ID: ENST00000615911
  CDS Start-End: 38-703
ggcgggactaactagcaaacggggactagaaatagggatgctgaaaagcaacggggagagacgcagtcgtaacgcacttccggcggtctacgcgaggaagatggctgcatcccagcagcaagcttcagcggcttcctcagctgctggtgtatcgggtcctagttcggctggcggcccgggtccccagcagcagccgcaaccgccagcacaactggtgggccctgcccagagcggcctcctgcagcaacagcaacaggacttcgatcctgtgcagcgttataagatgctcatcccgcagctgaaggagagtctacagaccttgatgaaggttgcggcccaaaacttgattcagaacactaacatcgacaatggacaaaagagcagtgatggacccatacagcgctttgacaagtgcctggaagagttctatgcactctgtgaccagctggagctgtgcctgcgcctggcgcatgagtgcctgtcacagagttgtgacagtgccaagcactctccaacgttggtgcccacagccaccaagcccgacgcagtgcagcctgacagcctcccctacccacagtacctggcggtcatcaaagcccagatttcctgtgccaaggacattcacaccgccctgctggactgtgccaacaaggtcacgggcaagacacccgcaccacctgctggccctgggggcactctgtgaagtgggggacagggagtggggcaggcagtggttggtgggtggtgtgcaaagggaatgaagagcgtcctgggcctaaacacagcagcctcctctcttcctgcctgagcaccgcagcgggagccagcagggggcagcagaggccaacagggagctcgcaggccgggcccctgcgtccctgccccttcttcctgctccccctcctagcctagggtagactttgaactgtgtgtgttgatgacttctctgttccacaggccctcccccattcttgcctgggtgtggagccctggctgtcccctctccctcagtccttcctgactgtctccagctgggaggtggtctctgtgtgccactcctctgtgtctctattacagttgtgtctctctcatcctgtctctttttcccttgtttctctgttcctgttaatgtgtttctccccatggtcctatttctctcactctgacctctctctcttagtcccctttagctgtcttctatccccagctcctaactgggactctgtgtctatgcagggggccagcacccctgggttatctggggctaagggaagggacttcatttccaggggccacagccaagcccagagtcccccagcggctcgcatgtcagcccagaccccagggtccttggcctaggagaggagcagtggaggggcccaggctctgagctccacaggtctgagcagggagcaactcaggcccccacccaagcctgcgtcagcggaacttgagtgaggggcgttgtgcaatttgtggcaaggctggcccagctggatgcctgggtcccagtatttttagccccaaaggagaagtgaaaaggccccagccggggtgaatcatcagtcctggggaagaacccaggcgcctgagccccagctccgggaagcaggcactggggagggggcttcaaggagggagtgccccctcagactccctgcttccctggaagcttcaggaagctcagcctcagccttcaggcctgagcaagtgcagggcggagctaccagcccaggctcagatgttggggtgtgaaagcctcaagtgactcagcctggttggagaactgccccacccagtatcttctgtgccatggttcccacattcgcactccatggcctcctgtcctggaccccacgtctgcaaggaaaccctaggaccatggatacctctgtgattcacgctgagcccaagtccccacactggaaaactgggaaatggccagctgtgtgtcccaggaaattcctccccttattcttccttgaagtgcccgagcatgtagggcaagaaggaaggctgaagcgctgtccctaggaggaatttctccttcaggggagcctcagttttgcccatttatctaattgaatcagttttttacccaatcccccgattttgtaggataatctcccttatctaaagtcaactgattatggactttaatcacatctacaaaacacttccatggcgacagctagatgagtgtttgaataactgggactgtagcccgtccaagttgacacataaaactgaccatcgggccgggggcggtggctcacgcctgtaatcccaacactttgggagcccgaggcgggcggatcacaaggtcaggagttcgagaccagcctggccaacacggtgaaaccccgactctactaaaaatacaaaaaattagccgggtgtggtggcacacacctgtagtcccagctactcgggaggctgaggcaggagaatcgtttgaacctgggaggcagaggttgcagtgagccaagatcacactattgcactccagcctgggcgacagggcaagactctgtctcaaaaaaaataaaaaactgaccatctagtccttgtcatctgggcaccctcacacatctccttaaccacacttaatctccaaataagtacgataacatagtcatagtcccacccaacatgatgcagttatcttgcatacaactgaagacaactaaccctttccccaacagagcccaccagcagtggtggagatgtcggtccatgagcgcacacacaagactgagggactgtcggccctcccaggtggtgtcaacacaacatcacacacaggtgggggggcctgatagcccagcacccatgatacagggcctaccaatgcttaaaaccacacccagggagcccacagaggcactcagtgggtggtggggtgatggatacacatctatcaggcacagggcggaggtgggcaccactgagttgcactcagcaaacacattgggtatcttgtgcccaaggcctgtatttgtggagctgatgttctagtgagagacagtaaatgtgacaaaagtaaaatatatcagatggtgagaaaacagaaaaatgagatcagaagtggagatgttggggccaggcacagtggcccaggcctgtaatcccatcactttgggaggtgcaggcaggcagatggcttgagcccaggaattcaagaccagtccgagcaacatagcaaaagcccttatctgcaaaaaattcaaaaattagccaggtgtggtggtgcgtgcccaggttcccaggtactcggaggctgagaggtgggaggatgccttgagcttgagaggttgaagctgcagtgagctgtgatcgcaccactgcactccagcttggttcatggagaccctgtttttttaaaaaaagaagtggaggtgtttacaccagcaaaatactcattttttaagtgtaattaagttgaagatcaaaaaatggaaatgtataattaaatcatacttagcaaatctaacacatgaaatgtaacatctgcatatggagaatcgtgttactttattgaaaaacattaaaagtttgagaactt

SEQ ID NO: 152285 - DNA, 985 bp, Homo sapiens
  Payload ID: 9959
  Gene Symbol: MED30
  Gene Name: mediator complex subunit 30
  Uniprot ID: Q96HR3
  ENST ID: ENST00000297347
  CDS Start-End: 165-701
gtgttacgtcacagtgggcggaagtcgcggccgctgttttgaaatcgggccgcggggggtctctcaagctggttccaacgctgaggccccacagcctcccaattccgggcagacccctgacacctgctgtctggccccttccggcctgaagctgcagccgcgccatgtccacccctccgttggccgcgtcggggatggcgcccgggcccttcgccgggccccaggctcagcaggccgcccgggaagtcaacacggcgtcgctgtgccgcatcgggcaggagacagtgcaggacatcgtgtaccgcaccatggagatcttccagctcctgaggaacatgcagctgccaaatggtgtcacttaccacactggaacatatcaagaccggttaacaaagctacaggataatcttcgccaactttcagttctcttcaggaagctgagattggtatatgacaaatgcaatgaaaactgtggtgggatggatcccattccagtcgagcaacttattccatatgtggaagaagatggctcaaagaatgatgatcgggctggcccacctcgttttgctagtgaagagaggcgagaaattgctgaagtaaataaaaaactcaaacagaagaatcaacagctgaaacaaattatggatcaattacgaaatctcatctgggatataaatgccatgttggcaatgaggaactaagctgatatttaaatttcctgctttacacatgttataccattgttttttccctcaagtattttttccctgtgaagaagattatttatctgcttttattttagtcactaaaactaaagtttttatttttacattgtgatttttacattaaaatattaactttttttaatgctattttatgaaagattattgtaataaactttgatggggtttgtattttggttaatcttcatgaattgaataattgtttttttaaagcaaaataaagttttttaaataaatgttaa

SEQ ID NO: 152286 - DNA, 476 bp, Homo sapiens
  Payload ID: 9959
  Gene Symbol: MED30
  Gene Name: mediator complex subunit 30
  Uniprot ID: Q96HR3
  ENST ID: ENST00000522839
  CDS Start-End: 45-476
cacctgctgtctggccccttccggcctgaagctgcagccgcgccatgtccacccctccgttggccgcgtcggggatggcgcccgggcccttcgccgggccccaggctcagcaggccgcccgggaagtcaacacggcgtcgctgtgccgcatcgggcaggagacagtgcaggacatcgtgtaccgcaccatggagatcttccagctcctgaggaacatgcagctgccaaatggtgtcacttaccacactggaacatatcaagaccggttaacaaagctacaggataatcttcgccaactttcagttctcttcaggaagctgagattggtatatgacaaatgcaatgaaaactgtggtgggatggatcccattccagtcgagaaactcaaacagaagaatcaacagctgaaacaaattatggatcaattacgaaatctcatctgggatataaatgccatgttggcaatgaggaactaa

SEQ ID NO: 152287 - DNA, 1654 bp, Homo sapiens
  Payload ID: 9960
  Gene Symbol: MED31
  Gene Name: mediator complex subunit 31
  Uniprot ID: Q9Y3C7
  ENST ID: ENST00000225728
  CDS Start-End: 107-502
acagtgccccgggaccggaagagggagccgtggtttccggaacttcgcccgcgtctctgggcttttgctctgtcaggctggtggcgttttggtgtcttcgtttgttatggccgctgctgtcgctatggagacagatgatgctggaaatcgacttcggtttcagttggagttggaatttgtgcaatgtttagccaacccaaattaccttaattttcttgcccaaagaggttacttcaaagacaaagcttttgttaattatcttaaatacttgctttactggaaagacccagaatatgccaagtatctaaagtaccctcagtgtttacacatgttagagctgctccaatatgaacacttccgaaaggagctggtgaatgctcagtgtgcgaaatttattgatgaacagcagattctacattggcagcactattcccggaagcggatgcgccttcagcaagccttggcagagcagcaacagcaaaataacacatcgggaaaatgaaaaactggatacaaacgaggcacttaatacatgtatataatgtatttcttttgtacagtgaagacaaaaaaaatgaaaactcttcctatctacctttattatggtagcccctagaacctttagtgtgctttttcatccaactttttattgttaatagactatttctgttaaacctgaattgttctttgatttccctgtggatttgtaaggtgtttttcttttttacgcatttagcataatcagctgattaagaatggaaaagttaggtgctttagaccaaataaggcactggggcatggggtaggggtgggccaccaagtatactgaattctaaggctagctgttcctgacatatagtagggcaagaccatctcctggaaccttactgtctcagatcaactactctaccactctactctaagatgtagtgagagtagcggagtcactgacctctttaaatcataggacaggaactgcataaaggttcttgaattctgcaggacaggaaataactgtattacctgctttgcaaggtggctttaagaatcactgaatcactgtggcctcacttgacctagtcatggcaggacaactagtggttagttactaactggactcttgactttagaacaaacatgaggagcctcaaatacttgtgttcatttgggaaagctaccattgatttgggaggtaccacaaaccaggtgctatgttaagtgcttccttgaattctcattttattctaagaaccttgtttatagaagagaaaactgaggtttggacggggtgagtaacttgcctgtggttacacagctagtaagtggtagagtcagtgtgactgactcccagcttggagttcttcccagaactgggttatagagtctttccggccgctctccgccacctgcctcatcccaagtaaagcacattgagacagctgcaaaacaaactgcttctagtgctcaggagtctgttttttattaaacaaaacaaaactgcctgaattaagcagaggctagattagaggtcatgtgctttccttcagtggtgaggttaggttctacattccaaaatcaaagaaggggtttcaggaatatcatcagttgctttgcagatggagataacttaaaataaaagatactgatcttttga

SEQ ID NO: 152288 - DNA, 593 bp, Homo sapiens
  Payload ID: 9960
  Gene Symbol: MED31
  Gene Name: mediator complex subunit 31
  ENST ID: ENST00000575197
  CDS Start-End: 107-238
acagtgccccgggaccggaagagggagccgtggtttccggaacttcgcccgcgtctctgggcttttgctctgtcaggctggtggcgttttggtgtcttcgtttgttatggccgctgctgtcgctatggagacagatgatgctggaaatcgacttcggtttcagttggagttggaatttgtgcaatgtttagccaacccaaattaccttaattgtaccctcagtgtttacacatgttagagctgctccaatatgaacacttccgaaaggagctggtgaatgctcagtgtgcgaaatttattgatgaacagcagattctacattggcagcactattcccggaagcggatgcgccttcagcaagccttggcagagcagcaacagcaaaataacacatcgggaaaatgaaaaactggatacaaacgaggcacttaatacatgtatataatgtatttcttttgtacagtgaagacaaaaaaaatgaaaactcttcctatctacctttattatggtagcccctagaacctttagtgtgctttttcatccaactttttattgttaatagactatttctgttaaacctgaattgttctttg

SEQ ID NO: 152289 - DNA, 619 bp, Homo sapiens
  Payload ID: 9960
  Gene Symbol: MED31
  Gene Name: mediator complex subunit 31
  ENST ID: ENST00000574128
  CDS Start-End: 274-447
cttccaggccttactcttggcagggttaatatttggacagagaggagagaaggctcttgtagcgtctagaaagactaagatgatgctggaaatcgacttcggtttcagttggagttggaatttgtgcaatgtttagccaacccaaattaccttaattttcttgcccaaagaggttacttcaaagacaaagcttttgttaattatcttaaatacttgctttactggaaagacccagaatatgccaagtatctaaagtaccctcagtgtttacacatgttagagctgctccaatatgaacacttccgaaaggagctggtgaatgctcagtgtgcgaaatttattgatgaacagcagattctacattggcagcactattcccggaagcggatgcgccttcagcaagccttggcagagcagcaacagcaaaataacacatcgggaaaatgaaaaactggatacaaacgaggcacttaatacatgtatataatgtatttcttttgtacagtgaagacaaaaaaaatgaaaactcttcctatctacctttattatggtagcccctagaacctttagtgtgctttttcatccaactttttattgttaatagactatttctgttaaa

SEQ ID NO: 152290 - DNA, 2022 bp, Homo sapiens
  Payload ID: 9961
  Gene Symbol: MED4
  Gene Name: mediator complex subunit 4
  Uniprot ID: Q9NPJ6
  ENST ID: ENST00000258648
  CDS Start-End: 27-839
gcgccggtggcgggactctggggaaaatggctgcgtcttcgagtggtgagaaggagaaggagcggctgggaggcggtttgggagtggcgggtggtaacagcacacgagagcggctgctgtctgcgcttgaggacttggaggtcctgtctagggaacttatagaaatgctggcaatttcaagaaaccaaaagttgttacaggctggagaggaaaaccaggtcctggagttgttaattcaccgagatggggaatttcaagaactaatgaaattggcacttaatcagggaaaaattcatcatgaaatgcaagttttagaaaaagaagtagagaagagagacagtgatattcagcagctacaaaaacagctaaaggaagcagaacaaatactggcaacagctgtttaccaagcgaaggagaaactcaagtcaatagaaaaagcaagaaaaggtgctatctcctctgaagaaataattaagtatgcacataggatcagtgcaagtaatgctgtatgtgctccactgacctgggttccaggggacccccggagaccctacccaactgatttagagatgagaagtgggttactgggtcagatgaacaatccttccactaatggcgtgaatggccatttaccaggagatgcacttgcagcaggaagattgccagatgtccttgctccacagtatccatggcagtcaaatgacatgtcgatgaatatgttaccaccaaatcatagtagtgactttttgttggaacctcctgggcataataaagaaaatgaagatgatgtagagattatgtcaacggactcctcaagcagtagtagtgagtctgattgaaaaaccttaaaagacaatatacagaattgaatactgtagaattctgtttctttaacagtagcagggaaatgtaaactacaggtgacaaaaaatacccaggtaaacactggctttggtagaattgtgcagtcattaaaagtcaaaattttttgactttctttttaaagccaaagaccatagttttagttttaagccactaggtagatatttaggggaatagtcaaaatttactgttgaaaaagcagttgctatgtgctttcttaccctgttctgttccagttttgctggatttgtacatagccattctagaaatagagttgagggaaattatccatatacatatcactaataggcttcttggaattatttagaaaagcatttttaaactggcagtggatgactgaataggcatcatatttctttttgtgtgtcatttaaaagtaacaaaaactgccatttgacagtaaaggctcttggcttctgttggaggcatgggaaattgtctcaatttgtacagtttgtaattgtaatttttgtaaataaatttgtttgtacattgtatgctttttttttagtttaaatatactgtcagtgtaggtaggaaattatttctgtaaatccagttgcattttataatacttgagtgactaactgaattgaaacctattacaattaatagggttctcaaaggcctattcctattagaagaaataattttttttaataattgaaaaaatttaccacagccttgtctgattttaagaatagattgtgtgaagatttagaatggaaagcaaccatttcttcccttcaccttcctcttcttacagttccccaggagtcatttttaaccacttttaatttctgttggtaacctctgtgtttaggtaatatgcttatacaactatttcttgatgtatcagttttagacaatgtatcttctgatttcaaaggtaatacaacatttaatgtgaaacatttagtgaatacagtaaaggagaaaataaaattgttagcattctacccagagataatatcaattcatattgtagtgtagatttttttaaagttcacatacacttttttgtaaaatgagaataatgtttatttcctgagatactgctgtattttttaattgctaatctgtattcttcaaatgaactgagaattccatttttccatc

SEQ ID NO: 152291 - DNA, 931 bp, Homo sapiens
  Payload ID: 9961
  Gene Symbol: MED4
  Gene Name: mediator complex subunit 4
  Uniprot ID: Q9NPJ6
  ENST ID: ENST00000378586
  CDS Start-End: 86-760
gcacctgcgtcagctcgctctgcgcgtgcgccggtggcgggactctggggaaaatggctgcgtcttcgagtgggaacttatagaaatgctggcaatttcaagaaaccaaaagttgttacaggctggagaggaaaaccaggtcctggagttgttaattcaccgagatggggaatttcaagaactaatgaaattggcacttaatcagggaaaaattcatcatgaaatgcaagttttagaaaaagaagtagagaagagagacagtgatattcagcagctacaaaaacagctaaaggaagcagaacaaatactggcaacagctgtttaccaagcgaaggagaaactcaagtcaatagaaaaagcaagaaaaggtgctatctcctctgaagaaataattaagtatgcacataggatcagtgcaagtaatgctgtatgtgctccactgacctgggttccaggggacccccggagaccctacccaactgatttagagatgagaagtgggttactgggtcagatgaacaatccttccactaatggcgtgaatggccatttaccaggagatgcacttgcagcaggaagattgccagatgtccttgctccacagtatccatggcagtcaaatgacatgtcgatgaatatgttaccaccaaatcatagtagtgactttttgttggaacctcctgggcataataaagaaaatgaagatgatgtagagattatgtcaacggactcctcaagcagtagtagtgagtctgattgaaaaaccttaaaagacaatatacagaattgaatactgtagaattctgtttctttaacagtagcagggaaatgtaaactacaggtgacaaaaaatacccaggtaaacactggctttggtagaattgtgcagtcattaaaagtcaaaattttttgactttctttttaaagccaa

SEQ ID NO: 152292 - DNA, 911 bp, Homo sapiens
  Payload ID: 9961
  Gene Symbol: MED4
  Gene Name: mediator complex subunit 4
  ENST ID: ENST00000417167
  CDS Start-End: 197-911
cttcgagtggtgagaaggagaaggagcggctgggaggcggtttgggagtggcgggtggtaacagcacacgagagcggctgctgtctgcgcttgaggacttggaggtcctgtctagggccgggtgtggtggctcacgcctataatccgagcactttgggaggccaaggcgggcggatcattggaacttcttcacagaatgaagctgctctggtggtgtgactggcttccagaaaggtctcatgtgttcactcagagggaacttatagaaatgctggcaatttcaagaaaccaaaagttgttacaggctggagaggaaaaccaggtcctggagttgttaattcaccgagatggggaatttcaagaactaatgaaattggcacttaatcagggaaaaattcatcatgaaatgcaagttttagaaaaagaagtagagaagagagacagtgatattcagcagctacaaaaacagctaaaggaagcagaacaaatactggcaacagctgtttaccaagcgaaggagaaactcaagtcaatagaaaaagcaagaaaaggtgctatctcctctgaagaaataattaagtatgcacataggatcagtgcaagtaatgctgtatgtgctccactgacctgggttccaggggacccccggagaccctacccaactgatttagagatgagaagtgggttactgggtcagatgaacaatccttccactaatggcgtgaatggccatttaccaggagatgcacttgcagcaggaagattgccagatgtccttgctccacagtatccatggcagtcaaatgacatgtcgatgaatatgttaccaccaaatcatagtagtgactttttgttggaacctcctgggcataataaagaaaatgaagatgatgtagagattatgtcaacgg

SEQ ID NO: 152293 - DNA, 460 bp, Homo sapiens
  Payload ID: 9961
  Gene Symbol: MED4
  Gene Name: mediator complex subunit 4
  ENST ID: ENST00000495013
  CDS Start-End: 1-460
gggacccccggagaccctacccaactgatttagagatgagaagtgggttactgggtcagatgaacaatccttccactaatggcgtgaatggccatttaccaggagatgcacttgcagcaggaagattgccagatgtccttgctccacagtatccatggcagtcaaatgacatgtcgatgaatatgttaccaccaaatcatagtagtgactttttgttggaacctcctgggcataataaagaaaatgaagatgatgtagagattatgtcaacggactcctcaagcagtagtaagatggagtttcaccatgttggccagactggttccgaactcctgacctcaagtgatccacccacctcggcctcccaaagtgctgggattacaggtgtgagccaccgcgcctggcaagagccttctttacttagcacagaagattgcttaataaatacttcttggttata

SEQ ID NO: 152294 - DNA, 1995 bp, Homo sapiens
  Payload ID: 9962
  Gene Symbol: MED6
  Gene Name: mediator complex subunit 6
  Uniprot ID: O75586
  ENST ID: ENST00000256379
  CDS Start-End: 31-771
gaaagagaacctgtaaacgctctcggaattatggcggcggtggatatccgagacaatctgctgggaatttcttgggttgacagctcttggatccctattttgaacagtggtagtgtcctggattacttttcagaaagaagtaatcctttttatgacagaacatgtaataatgaagtggtcaaaatgcagaggctaacattagaacacttgaatcagatggttggaatcgagtacatccttttgcatgctcaagagcccattcttttcatcattcggaagcaacagcggcagtcccctgcccaagttatcccactagctgattactatatcattgctggagtgatctatcaggcaccagacttgggatcagttataaactctagagtgcttactgcagtgcatggtattcagtcagcttttgatgaagctatgtcatactgtcgatatcatccttccaaagggtattggtggcacttcaaagatcatgaagagcaagataaagtcagacctaaagccaaaaggaaagaagaaccaagctctatttttcagagacaacgtgtggatgctttacttttagacctcagacaaaaatttccacccaaatttgtgcagctaaagcctggagaaaagcctgttccagtggatcaaacaaagaaagaggcagaacctataccagaaactgtaaaacctgaggagaaggagaccacaaagaatgtacaacagacagtgagtgctaaaggcccccctgaaaaacggatgagacttcagtgagtactggacaaaagagaagcctggaagactcctcatgctagttatcatacctcagtactgtggctcttgagctttgaagtactttattgtaaccttcttatttgtatggaatgcgcttattttttgaaaggatattaggccggatgtggtggctcacgcctgtaatcccagcactttgggaggccatggcgggtggatcacttgaggtcagaagttcaagaccagcctgaccaatatggtgaaaccccgtctctactaaaaatacaaaaattagccgggcgtggtggcgggcgcccatagtcccagctactcgggaggctgagacaggagacttgcttgaacccgggaggtggaggttgccctgagctgattatcatgctgttgcactccagcttgggcgacagagcgagactttgtctcaaaaaagaagaaaagatattattcccatcatgatttcttgtgaatatttgttatatgtcttctgtaacctttcctctcccggacttgagcaacctacacactcacatgtttactggtagatatgtttaaaagcaaaataaaggtatttgtatatattgcttcatcatgacttttttcttcatcataactgatatttttcagatgcactttgaagacataaaggatgttaaagtagtaactaagcatatttctttttgttcagttacataatcctcagtattaaaataaacagttgctgacattttggaagatgaagaaaaggaaaaacctcactcaccaataccattaccctataaatactgtaacagtgttgtgaattttaatcttattctgtgtgtagatacttcttttttcaataaagaaaaggaattttattttttttaaagttatggaggctgagaagtccagcattgattggctccatctggtgagggccttcttgctggtaggaagtctgcaaagtccctaggcagcacagggtatctcatggcaagggggctgagtgtgcttgctgcatgtagatgcttttaaaactgtactttaatcattcctttcgtacaattttactttattatatctgttgtaagcttttccccatgtttatgtagtttttatagactgttttagtgtccgaatttctgtaaatgattgtatctcagttttctttctgtcttatatttgggatttttcccagtttacattattttatataagactgctgtgattatatctttgtataatgcc

SEQ ID NO: 152295 - DNA, 931 bp, Homo sapiens
  Payload ID: 9962
  Gene Symbol: MED6
  Gene Name: mediator complex subunit 6
  Uniprot ID: O75586
  ENST ID: ENST00000440435
  CDS Start-End: 19-564
gtaaacgctctcggaattatggcggcggtggatatccgagacaatctgctgggaatttcttgggttgacagctcttggatccctattttgaacagtggtagtgtcctggattacttttcagaaagaagtaatcctttttatgacagaacatgtaataatgaagtggtcaaaatgcagaggctaacattagaacacttgaatcagatggttggaatcgagtacatccttttgcatgctcaagagcccattcttttcatcattcggaagcaacagcggcagtcccctgcccaagttatcccactagctgattactatatcattgctggagtgatctatcaggcaccagacttgggatcagttataaactctagagtgcttactgcagtgcatggtattcagtcagcttttgatgaagctatgtcatactgtcgatatcatccttccaaagggtattggtggcacttcaaagatcatgaagagcaagctaaagcctggagaaaagcctgttccagtggatcaaacaaagaaagaggcagaacctataccagaaactgtaaaacctgaggagaaggagaccacaaagaatgtacaacagacagtgagtgctaaaggcccccctgaaaaacggatgagacttcagtgagtactggacaaaagagaagcctggaagactcctcatgctagttatcatacctcagtactgtggctcttgagctttgaagtactttattgtaaccttcttatttgtatggaatgcgcttattttttgaaaggatattaggccggatgtggtggctcacgcctgtaatcccagcactttgggaggccatggcgggtggatcacttgaggtcagaagttcaagaccagcctgaccaatatggtgaaaccccgtctctactaaaaatacaaaaattagccgggcgtggtggc

SEQ ID NO: 152296 - DNA, 1507 bp, Homo sapiens
  Payload ID: 9962
  Gene Symbol: MED6
  Gene Name: mediator complex subunit 6
  Uniprot ID: O75586
  ENST ID: ENST00000430055
  CDS Start-End: 19-780
gtaaacgctctcggaattatggcggcggtggatatccgagacaatctgctgggaatttcttgggttgacagctcttggatccctattttgaacagtggtagtgtcctggattacttttcagaaagaagtaatcctttttatgacagaacatgtaataatgaagtggtcaaaatgcagaggctaacattagaacacttgaatcagatggttggaatcgagtacatccttttgcatgctcaagagcccattcttttcatcattcggaagcaacagcggcagtcccctgcccaagttatcccactagctgattactatatcattgctggagtgatctatcaggcaccagacttgggatcagttataaactctagagtgagtttattttccttttacaagcttactgcagtgcatggtattcagtcagcttttgatgaagctatgtcatactgtcgatatcatccttccaaagggtattggtggcacttcaaagatcatgaagagcaagataaagtcagacctaaagccaaaaggaaagaagaaccaagctctatttttcagagacaacgtgtggatgctttacttttagacctcagacaaaaatttccacccaaatttgtgcagctaaagcctggagaaaagcctgttccagtggatcaaacaaagaaagaggcagaacctataccagaaactgtaaaacctgaggagaaggagaccacaaagaatgtacaacagacagtgagtgctaaaggcccccctgaaaaacggatgagacttcagtgagtactggacaaaagagaagcctggaagactcctcatgctagttatcatacctcagtactgtggctcttgagctttgaagtactttattgtaaccttcttatttgtatggaatgcgcttattttttgaaaggatattaggccggatgtggtggctcacgcctgtaatcccagcactttgggaggccatggcgggtggatcacttgaggtcagaagttcaagaccagcctgaccaatatggtgaaaccccgtctctactaaaaatacaaaaattagccgggcgtggtggcgggcgcccatagtcccagctactcgggaggctgagacaggagacttgcttgaacccgggaggtggaggttgccctgagctgattatcatgctgttgcactccagcttgggcgacagagcgagactttgtctcaaaaaagaagaaaagatattattcccatcatgatttcttgtgaatatttgttatatgtcttctgtaacctttcctctcccggacttgagcaacctacacactcacatgtttactggtagatatgtttaaaagcaaaataaaggtatttgtatatattgcttcatcatgacttttttcttcatcataactgatatttttcagatgcactttgaagacataaaggatgttaaagtagtaactaagcatatttctttttgttcagttacataatcctcagtattaaaataaacagttgctgacattttgg

SEQ ID NO: 152297 - DNA, 975 bp, Homo sapiens
  Payload ID: 9962
  Gene Symbol: MED6
  Gene Name: mediator complex subunit 6
  ENST ID: ENST00000554963
  CDS Start-End: 7-756
ggaattatggcggcggtggatatccgagacaatctgctgggaatttcttgggttgacagctcttggatccctattttgaacagtggtagtgtcctggattacttttcagaaagaagtaatcctttttatgacagaacatgtaataatgaagtggtcaaaatgcagaggctaacattagaacacttgaatcagatggttggaatcgagtacatccttttgcatgctcaagagcccattcttttcatcattcggaagcaacagcggcagtcccctgcccaagttatcccactagctgattactatatcattgctggagtgatctatcaggcaccagacttgggatcagttataaactctagagtgcttactgcagtgcatggtattcagtcagcttttgatgaagctatgtcatactgtcgatatcatccttccaaagggtattggtggcacttcaaagatcatgaagagcaagataaagtcagacctaaagccaaaaggaaagaagaaccaagctctatttttcagagacaacgtgtggatgctttacttttagacctcagacaaaaatttccacccaaatttgtgcagctaaagcctggagaaaagcctgttccagtggatcaaacaaagaaagaggcagaacctataccagaaactgtaaaacctgaggagaaggagaccacaaagaatgtacaacagacagtgagtgctaaaggcccccctgaaaaacggatgagacttcagaaagctgtgtgaagagacaaagggagaatgccatgtgaagatggaggatcggagtgatgcgtctacaagccaaggaatgccaaagatttccggccagtcaccagaagctaagaggcaaagaaggattcccctacaggtttcagagaaagcatagcccatatccctgctgacactttgattttggattttcagcctccagaattttgagacaataaatttattgtttaagtc

SEQ ID NO: 152298 - DNA, 1700 bp, Homo sapiens
  Payload ID: 9962
  Gene Symbol: MED6
  Gene Name: mediator complex subunit 6
  ENST ID: ENST00000615788
  CDS Start-End: 54-827
aggcttacgtttactttgcgccggaaagagaacctgtaaacgctctcggaattatggcggcggtggatatccgagacaatctgctgggaatttcttgggttgacagctcttggatccctattttgaacagtggtagtgtcctggattacttttcagaaagaagtaatcctttttatgacagaacatgtaataatgaagtggtcaaaatgcagaggctaacattagaacacttgaatcagatggttggaatcgagtacatccttttgcatgctcaagagcccattcttttcatcattcggaagcaacagcggcagtcccctgcccaagttatcccactagctgattactatatcattgctggagtgatctatcaggcaccagacttgggatcagttataaactctagagtgcttactgcagtgcatggtattcagtcagcttttgatgaagctatgtcatactgtcgatatcatccttccaaagggtattggtggcacttcaaagatcatgaagagcaagataaagtcagacctaaagccaaaaggaaagaagaaccaagctctatttttcagagacaacgtgtggatgctttacttttagacctcagacaaaaatttccacccaaatttgtgcagctaaagcctggagaaaagcctgttccagtggatcaaacaaagaaagaggcagaacctataccagaaactgtaaaacctgaggagaaggagaccacaaagaatgtacaacagacagtgagtgctaaaggcccccctgaaaaacggatgagacttcattacataatcctcagtattaaaataaacagttgctgacattttggaagatgaagaaaaggaaaaacctcactcaccaataccattaccctataaatactgtaacagtgttgtgaattttaatcttattctgtgtgtagatacttcttttttcaataaagaaaaggaattttattttttttaaagttatggaggctgagaagtccagcattgattggctccatctggtgagggccttcttgctggtaggaagtctgcaaagtccctaggcagcacagggtatctcatggcaagggggctgagtgtgcttgctgcatgtagatgcttttaaaactgtactttaatcattcctttcgtacaattttactttattatatctgttgtaagcttttccccatgtttatgtagtttttatagactgttttagtgtccgaatttctgtaaatgattgtatctcagttttctttctgtcttatatttgggatttttcccagtttacattattttatataagactgctgtgattatatctttgtataatgccttttcagtgtttggtatttatttccttaggatagagttccagaagtggaatcactagagtctctgcatttttattgctcttagtccatattgctaagttgttcctcaaaatgttggactagtgatcactcaaacagcgaagtttgaaagtatgtatcaggttttccagaattgctaccactgaattttgtcatttatgtttttagtgttaagtagcaaaagtggtattttagtatttaaagtagttgaagaatttctcatctttttctgcttttatgaaatgtctaattttatgtattgtgtgagatttttgtctttcaacttcttattttgacataatttccggcaaacagaaaagttgtaagaata

SEQ ID NO: 152299 - DNA, 2402 bp, Homo sapiens
  Payload ID: 9963
  Gene Symbol: MED7
  Gene Name: mediator complex subunit 7
  Uniprot ID: O43513
  ENST ID: ENST00000286317
  CDS Start-End: 383-1084
ttcacgttaagtcttacaagagcatgttaaacattaaaacataagattgtttctggtcaataaggggtctataaaaaataaagcaataaggtgtcttgttcaattttatgccttaattcaaaaagaaacgaagaaacggaaccctcagctacgacttttaaaagtcagtaacgggtggatgggaggagtcaaacatacgtaggcgcaacagcgagggatcggtctgaggcggagctagaatttcgttaaaggacagctcttacagccaatcaaggacagagtcggtggcttcttcccggaggagaccggaagttggtttcggctgcagaggggaaggcggctaccagtgtaaagccagagctgaggttcttgatagtccacaatgggtgaaccacagcaagtgagtgcacttccaccacctccaatgcaatatatcaaggaatatacggatgaaaatattcaagaaggcttagctcccaagcctccccctccaataaaagacagttacatgatgtttggcaatcagttccaatgtgatgatcttatcatccgccctttggaaagtcagggcatcgaacggcttcatcctatgcagtttgatcacaagaaagaactgagaaaacttaatatgtctatccttattaatttcttggaccttttagatattttaataaggagccctgggagtataaaacgagaagagaaactagaagatcttaagctgctttttgtacacgtgcatcatcttataaatgaataccgaccccaccaagcaagagagaccttgagagtcatgatggaggtccagaaacgtcaacggcttgaaacagctgagagatttcaaaagcacctggaacgagtaattgaaatgattcagaattgcttggcttctttgcctgatgatttgcctcattcagaagcaggaatgagagtaaaaactgaaccaatggatgctgatgatagcaacaattgtactggacagaatgaacatcaaagagaaaattcaggtcataggagagatcagattatagagaaagatgctgccttgtgtgtcctaattgatgagatgaatgaaagaccatgaaagatgtttctttttctttttttccttttgataatagcatcatatattagttcattttcttttggacagtcttaagagaagtttcactaaaaatgtaaacagctttaatcttgactccaaatttttcaattatgagatgtcataggcagtaatttcgctgtataacaagcatagacaaatgagtgtccctgcactaagaagaatcactttaaaaagcaaagtgttagctgctgttgtatgggacattcctatgttttagagttgcagtaaaactttgatgataacctcaataatagcaaagttttcgtctttgaaaaggggatttagcatttgctttaagaatgatagataaatggatattaagctctctacatgtaaaactatgaaatctttagacttattccattaaaaattttgcttaagctccaaaaagtagcataacatgttgatagagaggagcccagtagagttataaaatagaaacttcattttttcctcatgactgcttctgtaaacccactagctcagtcttttctccctatcctgaatggactcttgcagggaagtcccataaattgttgtttttttttccagtcactcaggtaataagtcctttggtcactttaagttacagacattaattttagtaattaagatgtctgtgtcattagctatacattttctttaaagctaagctcagacttgtttaagtccacaatgggaaaggggtttgatggcagagactgctaggtgtctaccaaagattcttgctctttgaagatatgttgtcaagatgtggcaatccagccagggacatttccctactcccagcatctctgtgagaacatatgactaagtcgtaggcggtgaaatgtgggcataggaatccaggcttgccccataaacatttcttgcatgatcctccattctcttctcccagctgctggttggacggtcgtatccaggataagtttggaagccaccgaagatggcaaagattgtcagtctggttctttgaatgaccgtgaggactaagtcttcctttcagtaactccactctgcccctagctaattggactttatatgagcactttcttctcttcttcccccgactgtccatctgctcttccaccaaggtgttagtggagagttgaccttgtgtctgaggatctctgcctgccgttttcttaatgtaggcccgtggttcttaaagtgtgtggtcctggaccagcagcattggtatcacttggggacttactagaaataaaagttttagtataatccgtaggttcagaaaaataaaaaataaatgagggtt

SEQ ID NO: 152300 - DNA, 1382 bp, Homo sapiens
  Payload ID: 9963
  Gene Symbol: MED7
  Gene Name: mediator complex subunit 7
  Uniprot ID: O43513
  ENST ID: ENST00000420343
  CDS Start-End: 393-1094
ttttcttccggaccccgcagcttcctctgtgctgggctgggaactggggaggcatggctgagttcggcctccaaaggcggtctttcgtctttctctcccgagtctctccgagagtgcggtctctccgagagcgcggaggcctcggggtggacagcctggaggagggggctctaagcgtggcagtctcggggcttcctccgtgttgggacgccgagccggagtggaggttgggagacctggcgtctagtccccgcgccgctgtttttctaagctgtgtggccttgggcgagtcatttgccctctccggctctttgtaacatgagagtagccctccctgcccttccttcttctgggagcagttatgaaacagctgaggttcttgatagtccacaatgggtgaaccacagcaagtgagtgcacttccaccacctccaatgcaatatatcaaggaatatacggatgaaaatattcaagaaggcttagctcccaagcctccccctccaataaaagacagttacatgatgtttggcaatcagttccaatgtgatgatcttatcatccgccctttggaaagtcagggcatcgaacggcttcatcctatgcagtttgatcacaagaaagaactgagaaaacttaatatgtctatccttattaatttcttggaccttttagatattttaataaggagccctgggagtataaaacgagaagagaaactagaagatcttaagctgctttttgtacacgtgcatcatcttataaatgaataccgaccccaccaagcaagagagaccttgagagtcatgatggaggtccagaaacgtcaacggcttgaaacagctgagagatttcaaaagcacctggaacgagtaattgaaatgattcagaattgcttggcttctttgcctgatgatttgcctcattcagaagcaggaatgagagtaaaaactgaaccaatggatgctgatgatagcaacaattgtactggacagaatgaacatcaaagagaaaattcaggtcataggagagatcagattatagagaaagatgctgccttgtgtgtcctaattgatgagatgaatgaaagaccatgaaagatgtttctttttctttttttccttttgataatagcatcatatattagttcattttcttttggacagtcttaagagaagtttcactaaaaatgtaaacagctttaatcttgactccaaatttttcaattatgagatgtcataggcagtaatttcgctgtataacaagcatagacaaatgagtgtccctgcactaagaagaatcactttaaaaagcaaagtgttagctgctgttgtatgggacattcctatgttttagagttgcagtaaaactttgatgataacctc

SEQ ID NO: 152301 - DNA, 979 bp, Homo sapiens
  Payload ID: 9963
  Gene Symbol: MED7
  Gene Name: mediator complex subunit 7
  ENST ID: ENST00000524289
  CDS Start-End: 394-979
gatctataaaatgagattacaggagatgttttgaaagacatgttcccattagaaatgtccatgtgatggctgggtgctgtggctcatggctgtaatcccagcactttcggaggctgaggctggcggatcacctgagaaacgaagaaacggaaccctcagctacgacttttaaaagtcagtaacgggtggatgggaggagtcaaacatacgtaggcgcaacagcgagggatcggtctgaggcggagctagaatttcgttaaaggacagctcttacagccaatcaaggacagagtcggtggcttcttcccggaggagaccggaagttggtttcggctgcagaggggaaggcggctaccagtgtaaagccagagctgaggttcttgatagtccacaatgggtgaaccacagcaagtgagtgcacttccaccacctccaatgcaatatatcaaggaatatacggatgaaaatattcaagaaggcttagctcccaagcctccccctccaataaaagacagttacatgatgtttggcaatcagttccaatgtgatgatcttatcatccgccctttggaaagtcagggcatcgaacggcttcatcctatgcagtttgatcacaagaaagaactgagaaaacttaatatgtctatccttattaatttcttggaccttttagatattttaataaggagccctgggagtataaaacgagaagagaaactagaagatcttaagctgctttttgtacacgtgcatcatcttataaatgaataccgaccccaccaagcaagagagaccttgagagtcatgatggaggtccagaaacgtcaacggcttgaaacagctgagagatttcaaaagcacctggaacgagtaattgaaatgattcagaattgcttggcttctttgcctgatgatttgcctcattcagaagcaggaatgagagtaaaaactgaaccaatggatgctgatgatagcaaca

SEQ ID NO: 152302 - DNA, 1483 bp, Homo sapiens
  Payload ID: 9964
  Gene Symbol: MED8
  Gene Name: mediator complex subunit 8
  Uniprot ID: Q96G25
  ENST ID: ENST00000290663
  CDS Start-End: 45-950
ggaaaaccggaagtgaaatcgtggcagccgcctcggccgccgcaatgcagagagaggagaagcagcttgaggcatcattagatgcactgctgagtcaagtggctgatctgaagaactctctggggagtttcatttgcaagttggagaacgagtatggccggctgacctggccatctgtcctggacagctttgccttgctttctggacagctgaacactctgaacaaggtcttgaagcatgaaaaaacaccgctgttccgtaaccaggtcatcattcctctggtgttgtctccagaccgagatgaagatctcatgcggcagactgaaggacgggtgcctgttttcagccatgaggtagtccctgaccatctgagaaccaagcctgaccctgaagtggaagaacaggagaagcaactgacgacagatgctgcccgcattggtgcagatgcagcccagaagcagatccagagcttgaataaaatgtgttcaaaccttctggagaaaatcagcaaagaggagcgagaatcagagagtggaggtctccggccgaacaagcagacctttaaccctacagacactaatgccttggtggcagctgttgcctttgggaaaggactatctaattggagaccttcaggcagcagtggtcctggccaggcaggccagccaggagctgggacgatccttgcaggaacctcaggattacagcaggtgcagatggcaggagctccaagccagcagcagccaatgctcagtggggtacaaatggctcaggcaggtcaaccagggaaaatgccaagtggaataaaaaccaacatcaagtcggcttccatgcatccctaccagcggccctcctgcctgggtttcattctggctatccctctaaggcgcaaggtgaagaagcttctgggccaggaaggaaaaaaaaatgcccacctgcagctctggtgaagcttgggcctgctctcctttccatcctctaaggagccaacttggcttttacctgtcaaatagtcataaagtcccctatcctttaccccaccttatacacacgaggctttctcaggaagtggctctgccaggcaggactatgtgggaaagggtttttccttagcacacgaaaaagccccttcccctggattcatgtttcttattttggagggagaagggaattgcacttcacactgccatcagggtttagttgacctcataatggtgcccactttctcgactttggccaggatttccttcaaagaaaacgactttccttcatttccctaagcctgtggcccaaatggtggaccagaatgatggtgggagggggcaacccccagtagctttgcctgcttttataaagttgaacaaattgaatttagacattcaggctaacctgcctttcttagtactcctttgttggcatgggcaggggttgagtcagcagaagtggaccaaaggattcctctgaataaagttatttaaattga

SEQ ID NO: 152303 - DNA, 1186 bp, Homo sapiens
  Payload ID: 9964
  Gene Symbol: MED8
  Gene Name: mediator complex subunit 8
  Uniprot ID: Q96G25
  ENST ID: ENST00000372455
  CDS Start-End: 331-870
cagccgcctcggccgccgcaatgcagccctcctttctatgtgtcatactcgtttatctgggtgaccaacctgttcctattggtgcagagagaggagaagcagcttgaggcatcattagatgcactgctgagtcaagtggctgatctgaagaactctctggggagtttcatttgcaagttggagaacgagtatggccggctgacctgctttgccttgctttctggacagctgaacactctgaacaaggtcttgaagcatgaaaaaacaccgctgttccgtaaccaggtcatcattcctctggtgttgtctccagaccgagatgaagatctcatgcggcagactgaaggacgggtgcctgttttcagccatgaggtagtccctgaccatctgagaaccaagcctgaccctgaagtggaagaacaggagaagcaactgacgacagatgctgcccgcattggtgcagatgcagcccagaagcagatccagagcttgaataaaatgtgttcaaaccttctggagaaaatcagcaaagaggagcgagaatcagagagtggaggtctccggccgaacaagcagacctttaaccctacagacactaatgccttggtggcagctgttgcctttgggaaaggactatctaattggagaccttcaggcagcagtggtcctggccaggcaggccagccaggagctgggacgatccttgcaggaacctcaggattacagcaggtgcagatggcaggagctccaagccagcagcagccaatgctcagtggggtacaaatggctcaggcaggtcaaccagggaaaatgccaagtggaataaaaaccaacatcaagtcggcttccatgcatccctaccagcggtgagtgtggctggcaacctcgactccctggtgctctttgcagagttgggcagtgaaattaccttttgctcaaggctcacctagatgggtacaataaaaagaacatgggctttcagcagcagacaaatcccacttccaccactgactagctgtgtgaccttggacaagtgacctaatttttctgagcctgtttctcatttgtaaatggtgataatacctacctcatagggttgttgtgaggattaaaatgaggaaatgaatgtaaagcacttagtacagtatatgaaataatgggtattcaataaatgatagtttctaca

SEQ ID NO: 152304 - DNA, 1924 bp, Homo sapiens
  Payload ID: 9964
  Gene Symbol: MED8
  Gene Name: mediator complex subunit 8
  Uniprot ID: Q96G25
  ENST ID: ENST00000372457
  CDS Start-End: 45-851
ggaaaaccggaagtgaaatcgtggcagccgcctcggccgccgcaatgcagagagaggagaagcagcttgaggcatcattagatgcactgctgagtcaagtggctgatctgaagaactctctggggagtttcatttgcaagttggagaacgagtatggccggctgacctggccatctgtcctggacagctttgccttgctttctggacagctgaacactctgaacaaggtcttgaagcatgaaaaaacaccgctgttccgtaaccaggtcatcattcctctggtgttgtctccagaccgagatgaagatctcatgcggcagactgaaggacgggtgcctgttttcagccatgaggtagtccctgaccatctgagaaccaagcctgaccctgaagtggaagaacaggagaagcaactgacgacagatgctgcccgcattggtgcagatgcagcccagaagcagatccagagcttgaataaaatgtgttcaaaccttctggagaaaatcagcaaagaggagcgagaatcagagagtggaggtctccggccgaacaagcagacctttaaccctacagacactaatgccttggtggcagctgttgcctttgggaaaggactatctaattggagaccttcaggcagcagtggtcctggccaggcaggccagccaggagctgggacgatccttgcaggaacctcaggattacagcaggtgcagatggcaggagctccaagccagcagcagccaatgctcagtggggtacaaatggctcaggcaggtcaaccagggaaaatgccaagtggaataaaaaccaacatcaagtcggcttccatgcatccctaccagcggtgagtgtggctggcaacctcgactccctggtgctctttgcagagttgggcagtgaaattaccttttgctcaaggctcacctagatgggtacaataaaaagaacatgggctttcagcagcagacaaatcccacttccaccactgactagctgtgtgaccttggacaagtgacctaatttttctgagcctgtttctcatttgtaaatggtgataatacctacctcatagggttgttgtgaggattaaaatgaggaaatgaatgtaaagcacttagtacagtatatgaaataatgggtattcaataaatgatagtttctacagatccttctccccaccaccctccacagtccttgatccagaacttaccctaatctgatactgcctcacgtcaatggtgagctgatggacacaagatcaaataaggctatgcttattttgtgctgccagaaactgtagcaacctctgtgttcttagaggcacactgtttttgcaggccctcctgcctgggtttcattctggctatccctctaaggcgcaaggtgaagaagcttctgggccaggaaggaaaaaaaaatgcccacctgcagctctggtgaagcttgggcctgctctcctttccatcctctaaggagccaacttggcttttacctgtcaaatagtcataaagtcccctatcctttaccccaccttatacacacgaggctttctcaggaagtggctctgccaggcaggactatgtgggaaagggtttttccttagcacacgaaaaagccccttcccctggattcatgtttcttattttggagggagaagggaattgcacttcacactgccatcagggtttagttgacctcataatggtgcccactttctcgactttggccaggatttccttcaaagaaaacgactttccttcatttccctaagcctgtggcccaaatggtggaccagaatgatggtgggagggggcaacccccagtagctttgcctgcttttataaagttgaacaaattgaatttagacattcaggctaacctgcctttcttagtactcctttgttggcatgggcaggggttg

SEQ ID NO: 152305 - DNA, 2228 bp, Homo sapiens
  Payload ID: 9965
  Gene Symbol: MED9
  Gene Name: mediator complex subunit 9
  Uniprot ID: Q9NWA0
  ENST ID: ENST00000268711
  CDS Start-End: 57-497
gtagagtgcgcgacgcttttggcgacccgacctctggctaacctacccccggagccatggcctctgctggggtggcagccgggcgacaggcggaggatgtattgccgccaacgtccgaccagccgctgcctgacaccaagccgctgccgcctcctcagccgccgccggtccctgcgcctcaaccgcagcagtcgccggcgccacggcctcagtcacctgcccgcgcgagggaggaagagaactactcctttttacctttggttcacaacatcatcaaatgcatggacaaggacagcccggaggtccaccaggacctgaacgccctcaaaagcaagttccaggagatgcgcaagctcatcagcaccatgcccggcatccacctgagccccgaacagcagcagcagcagctgcagagcctccgggagcaagtcaggaccaagaatgagcttctgcaaaagtacaagagcctctgcatgttcgaaatccccaaggagtagagtgaggctgacttccttagaaagagggggaagccaatggcctgtctccccactaccatccccaaacgctccttggggcgtggttcctgtggaccccagctcagctcgtcaagctgcaggggcggggctcctgtgctgctgcgcgcgcttcgcctgtgcgggagccagcgcagagcttggctgcgccgggggttcctcgtgtagatccatatgtctagatgcataataactggagtgcctgctggtggaagtcagaatgctcctggaggctgcagagggggtggaggactctcccctgcctctggggagggggccatctgctgcgcccggccccactgacagatctgaagagcacagtaggaagggaggcggctcctctttgcttccttccctctctctcctcccacccccataggatcagtgtgtaccaggtacacattgttcctgttaacagcagcttcttgaaacatttgcatagaattcactggacgaattaagcctgcactcatatggcatagaattgtgagagaatgttttgaaaggccagagggtggcctttttccccaaacagtttggttccttttatgtttgagccagtgaagggaactacgctttgggggcttcagcctagagccctgccaggcagcccctggctccaggttccctgcctcctagcgctctcctcgccttcagctcttgctcccttcctcgttcatcaccctcagtcagtgcccaagagtggccaaaccgcttcacatctgcagtgcttccccagggttgacaaggggccgtcctttccacacaggccagaagaggtcttcaggcgaaccgaccttcccccttctggcatttcagattccccttgctctggttaaaaggtctttccctcgtggcctttgcacttgcggcagcaacgtgtactacactgcagaagggttcagtatgcaccttgtgttgagagagaggcaaccctgggggccagttcaggtggtccccaaccataagctaggtctgaaagttacacagccaagtttgagctcttaaaagttgatgaacagcctcatttccccagcttccctgatttcttccagatgggacgttttatttgtgtgctctcccttgactgtcagattgaagtaagagcagttctctccgttgcctctcgaggaggaggtgcgaagtcctggagtattgtttgggtctcggaatgggcgcataacctgcgctgaccagtttaggggcttagcagatgcctgccagctgacctcgttggcaggagggttgggtggagatgtttttagcagagcttccattagtgtagacctgtagccacctgtcagaaggtgggtggcatattggggacctgggaatgtgtgaaggaggagatcaaatttcagtggctttggacagaaaagaaggctctggatttaagcgggtggtcacctgtgagaccaggtctaccttgggactgttatttaactgaatcagttatttccttgaaatttcacagtagtgggtgggcctgttttaaggctctgacagataccacgaaacatgaagcacgtggaactacaagacccccggggtctttctgagtgcaaggctgaaatggacaagggctcctcacgggggtggagggagccggagcctgccttgtgttccttttttgacttgtgacatttttcaaacacataattaaaaggacttatgctctgctgtctcaggacataa

SEQ ID NO: 152306 - DNA, 568 bp, Homo sapiens
  Payload ID: 9965
  Gene Symbol: MED9
  Gene Name: mediator complex subunit 9
  ENST ID: ENST00000581315
  CDS Start-End: 18-266
aacctacccccggagccatggcctctgctggggtggcagccgggcgacaggcggaggatgtattgccgccaacgtccgaccagccgctgcctgacaccaagccgctgccgcctcctcagccgccgccggtccctgcgcctcaaccgcagcagtcgccggcgccacggcctcagtcacctgcccgcgcgagggaggaagagaactactcctttttacctttggttcacaacatcatcaaatgtagagacggggctggcctcaagtgatctgctgacttcagcctcccaaagtgctgggattacaggcgtgagccaccggccgccatctgggatttttaagcagcatagtgacctgctcagacttgggtttctaaagcatggacaaggacagcccggaggtccaccaggacctgaacgccctcaaaagcaagttccaggagatgcgcaagctcatcagcaccatgcccggcatccacctgagccccgaacagcagcagcagcagctgcagagcctccgggagcaagtcaggaccaagaatgagcttctgcaaaagtacaagagcctctgc

SEQ ID NO: 152307 - DNA, 565 bp, Homo sapiens
  Payload ID: 9965
  Gene Symbol: MED9
  Gene Name: mediator complex subunit 9
  ENST ID: ENST00000580462
  CDS Start-End: 49-297
cgcgacgcttttggcgacccgacctctggctaacctacccccggagccatggcctctgctggggtggcagccgggcgacaggcggaggatgtattgccgccaacgtccgaccagccgctgcctgacaccaagccgctgccgcctcctcagccgccgccggtccctgcgcctcaaccgcagcagtcgccggcgccacggcctcagtcacctgcccgcgcgagggaggaagagaactactcctttttacctttggttcacaacatcatcaaatgtagagacggggctggcctcaagtgatctgctgacttcagcctcccaaagtgctgggattacaggcgtgagccaccggccgccatctgggatttttaagcagcatagtgacctgctcagacttgggtttctaaaggtaggtggggcagaagtgtttcagaagaggggaggacctgggtccacaggaaggcagtggcaatgggaggtggctggtctagaggagatggagctggcaggatggtggctggaagaagggggcacacaggtgcaagcctgggggtcctagcgtggccag

SEQ ID NO: 152308 - DNA, 4505 bp, Homo sapiens
  Payload ID: 9966
  Gene Symbol: MEMO1
  Gene Name: mediator of cell motility 1
  Uniprot ID: Q9Y316
  ENST ID: ENST00000295065
  CDS Start-End: 311-1204
gggacgccgggggccggggccagggctttccgggcttcggtgaggccgccgtgggccccatcttccggcggtcgccggagtttgtggtgattgttgctgccgccgccaccgccccggctgccatctcctcctcctgggccgccgcctcctcctcttcctcctcctcctgggccgggctgatcccctccccgctgccgcctcctcctgggctgggcccgcggtgtctcgtcccctcgcggagccgctcctgccgccgccgccgccgcctcctcattcatcctcgtgcaccataggcggcacaggcaccaagatgtccaaccgagtggtctgccgagaagccagtcacgccgggagctggtacacagcctcaggaccgcagctgaatgcacagctagaaggttggctttcacaagtacagtctacaaaaagacctgctagagccattattgccccccatgcaggatatacgtactgtgggtcttgtgctgcccatgcttataaacaagtggatccgtctattacccggagaattttcatccttgggccttctcatcatgtgcccctctctcgatgtgcactttccagtgtggatatatataggacacctctgtatgaccttcgtattgaccaaaagatttacggagaactgtggaagacaggaatgtttgaacgcatgtctctgcagacagatgaagatgaacacagtattgaaatgcatttgccttatacagctaaagccatggaaagccataaggatgagtttaccattattcctgtactggttggagctctgagtgagtcaaaagaacaggaattcggaaaactcttcagtaaatatctagcggatcctagtaatctctttgtggtttcttctgatttctgccattggggtcaaaggttccgttacagttactatgatgaatcccagggggagatttatagatccattgaacatctagataaaatgggtatgagtattatagaacaattagaccctgtatcttttagcaattacttgaagaaataccataatactatatgtggaagacatcccattggggtgttattaaatgctatcacagagctccagaagaatggaatgaatatgagtttttcgtttttgaattatgcccagtcgagccagtgtagaaactggcaagacagttcagtgagttatgcagctggagcactcacggtccactgaagctctgaatcctcagggatgccacctgcacattctcatactctgtccggggtcccagcctagcctttaccacgatactggtcctggtttggggggattctgaaacctcaaactaatagaactttcttctctttttttctagtaggtgtagtccttccttaatttcaactcattaaaaaatgctttatagtttagggcagtggaaggaaggctggcatcaaaatattttgatcaaaaaagatgacaatgtaaaggctcagttgtggcagacagttttttgaaagtaacttgtaaagcatttaccatatcctaaatttgcactctttgcagacttgtgcacatatattccgctttcagaatagttttgcaaattgtacacaaacaaacaaaaaggtggaagctttttaataaagaaattgcatttataaatgatctgtattagaatataataaatctccagttatagtcaattactacccatgttgtacaacagataccttctattttagttgctaataaagggctacacaactcaaaatagtctgatttaaacttattgctctgtggtatatatgaaaattgttttttattaattccatctcagaatttttgttaaaaatggtaaacctcagctcttatgtaaaaatatattaggatgtattttatattttatatatttgtatgatttttttaaatcagaaattagaatcatatgatcttaaagttaactttttaaattacatgcagtttgcctttttgtctgtgacatccctttgtgtcattactatattgtaacagaatatatattcaagattggtaaaagaacgtagatgtaatccttgacttcaaagatcatgtttgatagtctgcaaatgaggaaacattgaagagtgttcttagtgtttttcaaatcattgcagaccttacactgctgtgcttttttaatgctttaagcagtttgactcttttacttgaatttttagccagagatcattaacatcatcaacaacaacaagccactggattttcttatggttacacaattttttttgtcatgatttttggtgcggctcttccaactaaaataatggtatgatgttgtatttctttctttctttagcatagaccaattctagtcactttcgccaaaaaaaaaaaaaaaaaaaaaaaaaagatataatttagttaataattcagttaccatgtatgtactgcattatacctattttaacctaacagtgtctacattatattagagagtgtttatatctccagtgttatgccagagtagcacaatttttagatgccttgcaccaattttatttaaagatttatgtttcttatttattaaatatcaactttctatactcgagtgaaataaaataatgttaccttttagattcaaagtcgcccacctatgtatgtgtggaaattatattcttacacattagtgatttattttccgtaatttagatacactttttagtactattaatatttatttcttgtttaatatgaactataaaattttaaaatggacaacagtgaatttttaaaataatgttttctgagtataagactaatacatgattattttagaaaatttgaaaattactgaaaagttataaagagaaaaaattatctgcaatctcactacccagagataaccctgttaatatttttctgtatttcttttcagtctttgtctgtgctatttctatgtatgagtgtgtatacatgtgtttgtgtgtgtgtgtaataacaaacttgagattatactgaccatatagttatgtaccctgttttttataacctaacttcatacatatttacccatgtctatgaaaatgtgacttttaaaaatggctgcctaatattctattgtatgaatatgccacaatttaactacttctctctttggatattaggttgttctaatctttcaccattataaataatagtgggatagacatccttgtttgtaaaatttcatctctatattagactctttaggatatactcatgtacatggaataagtggtttagacagtgagaactttttaggctctttaaaatatttccaagttataaccctttagaaagattgtactaaattaacaatgtatgagtacccatcattctgccccttcaccagtatcattatttttttaatctttgacagttggttaacataacaatcggttgtttctttgaccattctaataagagttgctttataatggccgggcgcggtggctcacgcctgtaatcccagcactttgggaggccgaggcgggcggatcacgaggtcaggagatcgagaccatcccggctaaaacggtgaaaccccgtctctactaaaaatacaaaaaattagccgggcgtagtggcgggcgcctgtagtcccagctacttgggaggctgaggcaggagaatggcgtgaacccgggtggcggagcctgcagtgagccgagatcccgccactgcactccagcctgggcgacagagcgagactccgtctcaaaaaaaaaaaaaaaaaaaaaaaaaaagagttgctttataattaattatttttgtctttctataattttatagttgattgatttttaaaaagacaagagggttgcctaagttgggtggactatagtacaagtatggttcttgcacttttaaaactgtagaagctggacacgatggtatgcacctgtagtcccagctactttgactgtggaggcaggaggatcacttgacagtttgagaccagcctgggcaatgtagtgagccccccaaaaccctctaaacaaacaaacaaatctgcagaatatttcagcatcactctacactttcctagaatatcaacatacctgataatgaagtagaaagagttccaaattgatgattgagtgttgggttctagttctatttctgccactaattagttctctgaacttaagtgtttcatgtcatattgaaactttctcatttgtaaaatgtggaggggatctcttaagtgctttctagtttcaaagtactttgatactgtgactttattttgtagaggttctggtgtcatttatttttaatagctacatgaataatgtagagatactatcttttgatttcaacttcacatacatggaaatgaaagtcttgttatttaacacaaaaggaaatttaatttgcattatttaatgcagttaatattacctaaaatgttgaacttaagcttttctactttaagtgcctttaaaagttttgtatttggaatctaaaatataaaggaaattcttatgtagctcta

SEQ ID NO: 152309 - DNA, 1498 bp, Homo sapiens
  Payload ID: 9966
  Gene Symbol: MEMO1
  Gene Name: mediator of cell motility 1
  Uniprot ID: Q9Y316
  ENST ID: ENST00000379383
  CDS Start-End: 58-960
cctatctgtagatctgtttatcttcaatatagaaagagatttatttggaattgactcatgccattatggagggctgacaagtgccaagatgtgcagtcagcaagctggagacccaggagagctgacggaccgcagctgaatgcacagctagaaggttggctttcacaagtacagtctacaaaaagacctgctagagccattattgccccccatgcaggatatacgtactgtgggtcttgtgctgcccatgcttataaacaagtggatccgtctattacccggagaattttcatccttgggccttctcatcatgtgcccctctctcgatgtgcactttccagtgtggatatatataggacacctctgtatgaccttcgtattgaccaaaagatttacggagaactgtggaagacaggaatgtttgaacgcatgtctctgcagacagatgaagatgaacacagtattgaaatgcatttgccttatacagctaaagccatggaaagccataaggatgagtttaccattattcctgtactggttggagctctgagtgagtcaaaagaacaggaattcggaaaactcttcagtaaatatctagcggatcctagtaatctctttgtggtttcttctgatttctgccattggggtcaaaggttccgttacagttactatgatgaatcccagggggagatttatagatccattgaacatctagataaaatgggtatgagtattatagaacaattagaccctgtatcttttagcaattacttgaagaaataccataatactatatgtggaagacatcccattggggtgttattaaatgctatcacagagctccagaagaatggaatgaatatgagtttttcgtttttgaattatgcccagtcgagccagtgtagaaactggcaagacagttcagtgagttatgcagctggagcactcacggtccactgaagctctgaatcctcagggatgccacctgcacattctcatactctgtccggggtcccagcctagcctttaccacgatactggtcctggtttggggggattctgaaacctcaaactaatagaactttcttctctttttttctagtaggtgtagtccttccttaatttcaactcattaaaaaatgctttatagtttagggcagtggaaggaaggctggcatcaaaatattttgatcaaaaaagatgacaatgtaaaggctcagttgtggcagacagttttttgaaagtaacttgtaaagcatttaccatatcctaaatttgcactctttgcagacttgtgcacatatattccgctttcagaatagttttgcaaattgtacacaaacaaacaaaaaggtggaagctttttaataaagaaattgcatttataaatgatctgtattagaatataataaatctccagttatagtcaattactacccatgttgtacaacagataccttctattttagttgctaataaagggctacacaactcaaaa

SEQ ID NO: 152310 - DNA, 682 bp, Homo sapiens
  Payload ID: 9966
  Gene Symbol: MEMO1
  Gene Name: mediator of cell motility 1
  ENST ID: ENST00000407893
  CDS Start-End: 252-554
atcttccggcggtcgccggagtttgtggtgattgttgctgccgccgccaccgccccggctgccatctcctcctcctgggccgccgcctcctcctcttcctcctcctcctgggccgggctgatcccctccccgctgccgcctcctcctgggctgggcccgcggtgtctcgtcccctcgcggagccgctcctgccgccgccgccgccgcctcctcattcatcctcgtgcaccataggcggcacaggcaccaagatgtccaaccgagtggtctgccgagaagccagtcacgccgggagctggtacacagcctcaggaccgcagctgaatgcacagctagaaggttggctttcacaagtacagtctacaaaaagacctgctagagccattattgccccccatgcaggatatacgtactgtgggtcttgtgctgcccatgcttataaacaagtggatccgtctattacattttccaggagtgctctgatgttaaatatcctttctctctgtcttttcatattttcctcaatcagaaaaatgccctttctcattatttgattcttggttcatatactacctggccctagtcaggctacctaaacatttctgagttaccattctctatagcccacgtaagcctttaatttaaaacaaagtgtcatgttatttatgtgctattaagatag

SEQ ID NO: 152311 - DNA, 1482 bp, Homo sapiens
  Payload ID: 9966
  Gene Symbol: MEMO1
  Gene Name: mediator of cell motility 1
  Uniprot ID: Q9Y316
  ENST ID: ENST00000404530
  CDS Start-End: 51-944
atgctcagtgggcaggacccgttagagtggcgagcggcacaggcaccaagatgtccaaccgagtggtctgccgagaagccagtcacgccgggagctggtacacagcctcaggaccgcagctgaatgcacagctagaaggttggctttcacaagtacagtctacaaaaagacctgctagagccattattgccccccatgcaggatatacgtactgtgggtcttgtgctgcccatgcttataaacaagtggatccgtctattacccggagaattttcatccttgggccttctcatcatgtgcccctctctcgatgtgcactttccagtgtggatatatataggacacctctgtatgaccttcgtattgaccaaaagatttacggagaactgtggaagacaggaatgtttgaacgcatgtctctgcagacagatgaagatgaacacagtattgaaatgcatttgccttatacagctaaagccatggaaagccataaggatgagtttaccattattcctgtactggttggagctctgagtgagtcaaaagaacaggaattcggaaaactcttcagtaaatatctagcggatcctagtaatctctttgtggtttcttctgatttctgccattggggtcaaaggttccgttacagttactatgatgaatcccagggggagatttatagatccattgaacatctagataaaatgggtatgagtattatagaacaattagaccctgtatcttttagcaattacttgaagaaataccataatactatatgtggaagacatcccattggggtgttattaaatgctatcacagagctccagaagaatggaatgaatatgagtttttcgtttttgaattatgcccagtcgagccagtgtagaaactggcaagacagttcagtgagttatgcagctggagcactcacggtccactgaagctctgaatcctcagggatgccacctgcacattctcatactctgtccggggtcccagcctagcctttaccacgatactggtcctggtttggggggattctgaaacctcaaactaatagaactttcttctctttttttctagtaggtgtagtccttccttaatttcaactcattaaaaaatgctttatagtttagggcagtggaaggaaggctggcatcaaaatattttgatcaaaaaagatgacaatgtaaaggctcagttgtggcagacagttttttgaaagtaacttgtaaagcatttaccatatcctaaatttgcactctttgcagacttgtgcacatatattccgctttcagaatagttttgcaaattgtacacaaacaaacaaaaaggtggaagctttttaataaagaaattgcatttataaatgatctgtattagaatataataaatctccagttatagtcaattactacccatgttgtacaacagataccttctattttagttgctaataaagggctacacaactcaaaa

SEQ ID NO: 152312 - DNA, 1336 bp, Homo sapiens
  Payload ID: 9966
  Gene Symbol: MEMO1
  Gene Name: mediator of cell motility 1
  Uniprot ID: Q9Y316
  ENST ID: ENST00000426310
  CDS Start-End: 129-953
ccctccccgctgccgcctcctcctgggctgggcccgcggtgtctcgtcccctcgcggagccgctcctgccgccgccgccgccgcctcctcattcatcctcgtgcaccataggcggcacaggcaccaagatgtccaaccgagtggtctgccgagaagccagtcacgccgggagctggtacacagcctcaggaccgcagctgaatgcacagctagaaggttggctttcacaagtacagtctacaaaaagacctgctagagccattattgccccccggagaattttcatccttgggccttctcatcatgtgcccctctctcgatgtgcactttccagtgtggatatatataggacacctctgtatgaccttcgtattgaccaaaagatttacggagaactgtggaagacaggaatgtttgaacgcatgtctctgcagacagatgaagatgaacacagtattgaaatgcatttgccttatacagctaaagccatggaaagccataaggatgagtttaccattattcctgtactggttggagctctgagtgagtcaaaagaacaggaattcggaaaactcttcagtaaatatctagcggatcctagtaatctctttgtggtttcttctgatttctgccattggggtcaaaggttccgttacagttactatgatgaatcccagggggagatttatagatccattgaacatctagataaaatgggtatgagtattatagaacaattagaccctgtatcttttagcaattacttgaagaaataccataatactatatgtggaagacatcccattggggtgttattaaatgctatcacagagctccagaagaatggaatgaatatgagtttttcgtttttgaattatgcccagtcgagccagtgtagaaactggcaagacagttcagtgagttatgcagctggagcactcacggtccactgaagctctgaatcctcagggatgccacctgcacattctcatactctgtccggggtcccagcctagcctttaccacgatactggtcctggtttggggggattctgaaacctcaaactaatagaactttcttctctttttttctagtaggtgtagtccttccttaatttcaactcattaaaaaatgctttatagtttagggcagtggaaggaaggctggcatcaaaatattttgatcaaaaaagatgacaatgtaaaggctcagttgtggcagacagttttttgaaagtaacttgtaaagcatttaccatatcctaaatttgcactctttgcagacttgtgcacatatattccgctttcagaatagttttgcaaattgtacacaaac

SEQ ID NO: 152313 - DNA, 315 bp, Homo sapiens
  Payload ID: 9966
  Gene Symbol: MEMO1
  Gene Name: mediator of cell motility 1
  ENST ID: ENST00000437854
  CDS Start-End: 255-315
gagaccttgggggtgcaaatcgatgagagatgcctgtatatgatggatacccgcgggactgtcctcgtggaaagccgcatccgcgagccctaggtgctctccatttgaggaagttggctgggggagggggcttgccttgcggctgcgtcctgctccccgcgccctgcccccacctcccagcctctgctgccgctaaaccccggagagcggagcgtgcacgttgagattcctcggcgggcggcacaggcaccaagatgtccaaccgagtggtctgccgagaagccagtcacgccgggagctggtacacagcctcag

SEQ ID NO: 152314 - DNA, 7576 bp, Homo sapiens
  Payload ID: 9967
  Gene Symbol: MDC1
  Gene Name: mediator of DNA-damage checkpoint 1
  Uniprot ID: Q14676
  ENST ID: ENST00000376406
  CDS Start-End: 649-6918
ttggatttaagaaaatgacctcaaaatgtccgtcagagacgtattcccaggaagaaagatattacttctactacaaaccaaatcaaaaggaaatgaaattccaatgcaacaggagtgaactgccacgcctacgggctgttctccaaactgcagcctccagccacgactgcaacgcgcaacccactttcatttctcatgagtcagcggacaccatgtctaggaggaccgaggaaaggcgctctggccttaccagacacgtcggacgtctatgacacagcccctctatccgttgccggcagctggcgccagactctctggtcgcggtttggaactgcgcgggaagtgggtggtgggcgggcaagcggtagtgggttgtcccttggagctgcccaatcgacgtgcattattctgttggcgcacggcggccttcaattaccgtctcattaactgatctcagcagcctgggagacaccacctatttgaactctaagggggcggggctttgggtgtgcctccgctcgactggctgcggttgtgaaagacagcggcagaagccaatcagcaaataagctctttttcggcacacgcagtcgctccacctgggtcgcgaccgttactggtggcgcgcgcggggacttaaagtagatcatggaggacacccaggctattgactgggatgttgaagaagaggaggagacagagcaatccagtgaatccttgaggtgtaacgtggagccagtagggcggctacatatctttagtggtgcccatggaccagaaaaagatttcccactacacctcgggaagaatgtggtaggccgaatgcctgactgctctgtggccctgccctttccatctatctccaaacaacatgcagagattgaaatcttagcctgggacaaggcacctatcctccgagactgtgggagccttaatggtactcaaatcctgagacctcctaaggttttgagccctggggtgagtcaccgtctgagggaccaggaattgattctctttgctgacttgctctgccagtaccatcgcctggatgtctctctgccctttgtctcccggggccctctgacagtagaagagacacccagagtacagggagaaactcaaccccagaggcttctgttggctgaggactcggaggaggaagtagattttctttctgaaaggcgtatggtaaaaaaatcaaggaccacatcttcctctgtgatagttccagagagtgatgaagaggggcattccccggtcctgggcggccttgggccgccttttgccttcaatttgaacagtgacacagatgtggaagaaggtcagcaaccagccacagaggaggcctcctcagctgccagaagaggtgccactgtagaggcaaagcagtctgaagctgaagttgtaactgaaatccagcttgaaaaggatcagcctttagtgaaggagagggacaatgatacaaaagtcaagaggggtgcagggaatggggtggttccagctggggtgattctggagaggagccaacctcctggagaggacagtgacacagatgtggatgatgacagcaggcctcctggaaggccagctgaggtccatttggaaagggctcagccttttggcttcatcgacagcgacactgatgcggaagaagagaggatcccagcaaccccagttgtcattcctatgaagaagaggaagatcttccatggagtaggtacaaggggtcctggagcaccaggcctggcccatctgcaggagagccaggctggtagtgatacagatgtggaagaaggcaaggccccacaggctgtccctctggagaaaagccaagcttccatggttatcaacagcgatacagatgacgaggaagaagtctcagcagcgctgactttggcacatctgaaagagagccagcctgctatatggaacagagatgcagaagaggacatgccccaacgtgtggtccttctgcagcgaagccaaaccaccactgagagagacagtgacacagacgtggaggaggaagagctcccagtggaaaatagagaagctgtcctcaaggatcacacaaagattagagcccttgttagagcacattcagaaaaggaccaacctccttttggggacagtgatgacagtgtggaagcagataagagctcacctgggatccacctggagagaagccaagcctccaccacagtggacatcaacacacaagtggagaaggaagtcccgccagggtcagccattatacatataaagaagcatcaggtgtctgtggaggggacaaatcaaacagatgtgaaagcagttgggggaccagcaaagctgcttgtggtatctctagaggaagcctggcctctgcatggggactgtgaaacagatgcagaggagggcacctccctaacagcctcagtagttgcagatgtaagaaagagccagcttccagcagaaggggatgctggggcagagtgggctgcagctgttcttaagcaggagagagctcatgaggtgggggcccagggtgggccacctgtggcacaagtggagcaggacctccctatctcaagagagaacctcacagatctggtggtggacacagacactctaggggaatccacccagccacagagagagggagcccaggtccccacaggaagggagagagaacaacatgtgggtgggaccaaggactctgaagacaactatggtgattctgaagatctggacctacaagctacccagtgctttctggagaatcagggcctggaagcagtccagagcatggaggatgaacctacccaggccttcatgttgactccaccccaagagcttggcccttcccattgcagcttccagacaacaggtaccctagatgaaccatgggaggtcctggctacacagccattctgtctgagagagtctgaggactctgagacccagccttttgacacgcaccttgaggcctatggaccttgcctgtctccacctagggcaataccaggagaccaacatccagagagcccagttcacacagagccaatggggattcaaggcagagggaggcagactgtggataaagtcatgggtataccaaaagaaacagcagagagggtgggccctgagagagggccattggagagagaaactgagaaactgctaccagaaagacagacagatgtgacaggagaggaagaattaaccaaggggaaacaggacagagaacaaaaacagttgttagctagagacacccagagacaagaatctgacaaaaatggggaaagtgcaagtcctgaaagagatagggagagtttgaaggtagaaattgagacatctgaggaaatacaagagaaacaagtacagaagcagacccttccaagcaaagcatttgagagagaagtagagagaccagtagcaaacagagagtgcgatccagccgagttagaagagaaggtgcccaaagtgatcctggagagagatacacagagaggggagccagagggagggagccaggaccagaaagggcaggcctccagcccaacaccagagcctggggtgggggcgggggaccttccgggacctacctcagcccccgtaccttctgggagccagtcaggtggaaggggatccccagtgagccccaggaggcatcagaaaggcctcctgaattgcaagatgccacctgctgagaaggcttccaggatcagagctgctgagaaggtttccaggggcgatcaggaatctccagatgcttgtctgcctcctacagtacctgaagccccagccccaccccaaaagccccttaactctcagagccagaaacatcttgcacctccgccccttctttctccccttttaccttctatcaagccaaccgttcgtaagaccaggcaagatgggagtcaggaagctccagaggctcccttgtcctcagagctggagcctttccacccaaagcctaaaattagaactcggaagtcctccagaatgacaccctttccagctacctctgctgcccctgagccccacccttccacctccacagcccagccagtcactcccaagcccacatctcaggccactaggagcaggacaaataggtcctctgtcaagacccctgaaccagttgtccccacagcccctgagctccagccttccacctccacagaccagcctgtcacctctgagcccacatctcaggttactaggggaagaaaaagtagatcctctgtcaagacccctgaaacagttgtgcccacagcccttgagctccagccttccacctccaccgaccgacctgtcacctctgaacccacctctcaggctactaggggaagaaaaaatagatcctctgtcaagacccctgaaccagttgtccccacagcccctgagctccagccttccacctccacagaccagcctgtcacttctgagcccacatatcaggctactaggggaagaaaaaatagatcctctgtcaagacccctgaaccagttgtgcccacagcccctgagctccggccttccacctccacagaccgacctgtcacccccaagcccacatctcggaccactaggagcaggacaaatatgtcctctgtcaagacccctgaaacagttgtccccacagcccctgagctccagatttccacctccacagaccaacctgtcacccctaagcccacatctcggaccactaggagcaggacaaatatgtcctctgtgaagaaccctgaatcaactgtccctatagcccctgagctcccaccttccacctccacagagcagcctgtcacccctgagcccacatctcgggctactaggggaagaaaaaatagatcctctggcaagacccctgaaacacttgtccccacagcccctaagctcgagccttccacttccacagaccaacctgtcactcctgagcccacatctcaggccaccaggggcaggacaaataggtcctctgtgaagacccctgaaacagttgtccccacagcccctgagctccagccttccacctccacagaccagcctgttacccctgagcctacgtctcaggctactaggggaagaacagatagatcctctgtcaagactcctgaaacagttgtccccacagcccctgagctacaggcttccgcctccacagaccagcctgtcacctctgagcccacatctcggaccactaggggaagaaaaaatcggtcctctgtcaagacccctgaaacagttgtgcccgcagcccctgagctccagccttccacctccacagaccaacctgtcacccctgagcccacatctcgggccactaggggcaggacaaataggtcctctgtcaagacccctgaatcaattgtccctatagcccctgagcttcagccttccacctccagaaaccagcttgtcacccctgagcccacatctcgggccactaggtgcaggacaaataggtcctctgtcaagacccctgagccagttgtccccacagcccctgagccccatcctaccacctccacagaccagcctgtcacccccaagctcacatctagggccactaggagaaagacaaataggtcctctgtcaagactcccaaaccagttgaaccagcagcctctgatcttgagccttttacccccacagaccagtccgtcacccctgaggccatagctcagggtggtcagagcaaaacactgaggtcttccacagtaagagctatgccggttcctaccacccctgaattccaatctcctgtcaccacagaccagcctatttcccctgagcctattactcaacccagttgcatcaagaggcagagagccgctgggaaccctggctccctcgcagctcccattgaccataagccttgctctgcacccttggaacctaaatcccaggcctcaaggaaccaaagatggggagcagtgagagcagctgaatcccttacagccattcctgagcctgcctctccccagcttcttgagacaccaattcatgcctcccagatccaaaaggtggaaccagcaggtagatctaggttcaccccggagctccagcctaaggcctctcaaagccgcaagaggtctttagctaccatggattcaccaccacatcaaaaacagccccaaagaggggaagtctcccagaagacagtgattatcaaggaagaggaagaagatactgcagagaagccagggaaggaagaggatgtcgtgactccaaaaccaggcaagagaaagagagaccaggcagaggaggagcccaacagaataccaagccgcagcctccgacggaccaaacttaaccaagaatcaacagcccccaaagtgctcttcacaggagtggtggatgctcggggagagcgggctgtgctggcactggggggaagtctggctggttcagcggcagaggcttcccacctggtcactgatcgcatccgccggacagtcaagttcctgtgtgccctggggcggggaatccccattctgtccctggactggctgcatcagtcccgcaaggctggtttcttcttacccccggatgaatatgtggtgaccgaccctgagcaagagaagaactttggctttagccttcaagacgcactgagcagggctcgggagcgaaggctgctagagggctatgagatctatgtgacccctggagtccagccaccaccacctcagatgggagagattattagctgctgtggaggcacatacctacccagcatgcctcggtcctataagcctcagagagttgtgatcacatgccctcaggacttccctcattgctccattccactacgggttgggctgcccctcctctcgcctgagttcctgctgactggagtgctgaagcaggaagccaagccagaggcctttgtcctctcccctttggagatgtcatccacctgagaactccactacccttttccctcccagaccacgaattagaagatatgtggaagaaagaactcagggcgttagaaaggattggggtatattgatacaacttgtcctggaacatgggtgggaccagaaatctttatgaataaatgaaaagataagggatttggaagccacaggttgttttttgtttgtttgtttgtttttttaatggccattttattttatttgtatttatagttttttatttgtatagatttaggggatacaagatttcttacatgcatgtattaaatggccattttaaaattagctagtttcatgctcagatgtcataagtggcagctatctttagccagactgttgcagttattgctcgatgccactcatggtgtcctacctcctatttggaaaccatctctatttttttcttactgagattcttactttggggtcaggaacttgaagggatgcttggagtgagtagatttgagggtccagttatggagtgctactaaaacattttcttctctcctggcctctggaagcatctttagctttgactttgggcaagtctctgtacttttctggccagcttttccaggatttataaaattagagcttcggcttgacctctgtgataaataaatattcactctgtgcctta

SEQ ID NO: 152315 - DNA, 7576 bp, Homo sapiens
  Payload ID: 9967
  Gene Symbol: MDC1
  Gene Name: mediator of DNA-damage checkpoint 1
  Uniprot ID: Q14676
  ENST ID: ENST00000383566
  CDS Start-End: 649-6918
ttggatttaagaaaatgacctcaaaatgtccgtcagagacgtattcccaggaagaaagatattacttctactacaaaccaaatcaaaaggaaatgaaattccaatgcaacaggagtgaactgccacgcctacgggctgttctccaaactgcagcctccagccacgactgcaacgcgcaacccactttcatttctcatgagtcagcggacaccatgtctaggaggaccgaggaaaggcgctctggccttaccagacacgtcggacgtctatgacacagcccctctatccgttgccggcagctggcgccagactctctggtcgcggtttggaactgcgcgggaagtgggtggtgggcgggcaagcggtagtgggttgtcccttggagctgcccaatcgacgtgcattattctgttggcgcacggcggccttcaattaccgtctcattaactgatctcagcagcctgggagacaccacctatttgaactctaagggggcggggctttgggtgtgcctccgctcgactggctgcggttgtgaaagacagcggcagaagccaatcagcaaataagctctttttcggcacacgcagtcgctccacccgggtcgcgaccgttactggtggcgcgcgcggggacttaaagtagatcatggaggacacccaggctattgactgggatgttgaagaagaggaggagacagagcaatccagtgaatccttgaggtgtaacgtggagccagtagggcggctacatatctttagtggtgcccatggaccagaaaaagatttcccactacacctcgggaagaatgtggtaggccgaatgcctgactgctctgtggccctgccctttccatctatctccaaacaacatgcagagattgaaatcttagcctgggacaaggcacctatcctccgagactgtgggagccttaatggtactcaaatcctgagacctcctaaggttttgagccctggggtgagtcaccgtctgagggaccaggaattgattctctttgctgacttgctctgccagtaccatcgcctggatgtctctctgccctttgtctcccggggccctctgacagtagaagagacacccagagtacagggagaaactcaaccccagaggcttctgttggctgaggactcggaggaggaagtagattttctttctgaaaggcgtatggtaaaaaaatcaaggaccacatcttcctctgtgatagttccagagagtgatgaagaggggcattccccggtcctgggcggccttgggccgccttttgccttcaatttgaacagtgacacagatgtggaagaaggtcagcaaccagccacagaggaggcctcctcagctgccagaagaggtgccactgtagaggcaaagcagtctgaagctgaagttgtaactgaaatccagcttgaaaaggatcagcctttagtgaaggagaaggacaatgatacaaaagtcaagaggggtgcagggaatggggtggttccagctggggtgattctggagaggagccaacctcctggagaggacagtgacacagatgtggatgatgacagcaggcctcctggaaggccagctgaggtccatttggaaagggctcagccttttggcttcatcgacagcgacactgatgcggaagaagagaggatcccagcaaccccagttgtcattcctatgaagaagaggaagatcttccatggagtaggtacaaggggtcctggagcaccaggcctggcccatctgcaggagagccaggctggtagtgatacagatgtggaagaaggcaaggccccacaggctgtccctctggagaaaagccaagcttccatggttatcaacagcgatacagatgacgaggaagaagtctcagcagcgctgactttggcacatctgaaagagagccagcctgctatatggaacagagatgcagaagaggacatgccccaacgtgtggtccttctgcagcgaagccaaaccaccactgagagagacagtgacacagacgtggaggaggaagagctcccagtggaaaatagagaagctgtcctcaaggatcacacaaagattagagcccttgttagagcacattcagaaaaggaccaacctccttttggggacagtgatgacagtgtggaagcagataagagctcacctgggatccacctggagagaagccaagcctccaccacagtggacatcaacacacaagtggagaaggaagtcccgccagggtcagccattatacatataaagaagcatcaggtgtctgtggaggggacaaatcaaacagatgtgaaagcagttgggggaccagcaaagctgcttgtggtatctctagaggaagcctggcctctgcatggggactgtgaaacagatgcagaggagggcacctccctaacagcctcagtagttgcagatgtaagaaagagccagcttccagcagaaggggatgctggggcagagtgggctgcagctgttcttaagcaggagagagctcatgaggtgggggcccagggtgggccacctgtggcacaagtggagcaggacctccctatctcaagagagaacctcacagatctggtggtggacacagacactctaggggaatccacccagccacagagagagggagcccaggtccccacaggaagggagagagaacaacatgtgggtgggaccaaggactctgaagacaactatggtgattctgaagatctggacctacaagctacccagtgctttctggagaatcagggcctggaagcagtccagagcatggaggatgaacctacccaggccttcatgttgactccaccccaagagcttggcccttcccattgcagcttccagacaacaggtaccctagatgaaccatgggaggtcctggctacacagccattctgtctgagagagtctgaggactctgagacccagccttttgacacgcaccttgaggcctatggaccttgcctgtctccacctagggcaataccaggagaccaacatccagagagcccagttcacacagagccaatggggattcaaggcagagggaggcagactgtggataaagtcatgggtataccaaaagaaacagcagagagggtgggccctgagagagggccattggagagagaaactgagaaactgctaccagaaagacagacagatgtgacaggagaggaagaattaaccaaggggaaacaggacagagaacaaaaacagttgttagctagagacacccagagacaagaatctgacaaaaatggggaaagtgcaagtcctgaaagagatagggagagtttgaaggtagaaattgagacatctgaggaaatacaagagaaacaagtacagaagcagacccttccaagcaaagcatttgagagagaagtagagagaccagtagcaaacagagagtgcgatccagccgagttagaagagaaggtgcccaaagtgatcctggagagagatacacagagaggggagccagagggagggagccaggaccagaaagggcaggcctccagcccaacaccagagcctggggtgggggcgggggaccttccgggacctacctcagcccccgtaccttctgggagccagtcaggtggaaggggatccccagtgagccccaggaggcatcagaaaggcctcctgaattgcaagatgccacctgctgagaaggcttccaggatcagagctgctgagaaggtttccaggggcgatcaggaatctccagatgcttgtctgcctcctacagtacctgaagccccagccccaccccaaaagccccttaactctcagagccagaaacatcttgcacctccgccccttctttctccccttttaccttctatcaagccaaccgttcgtaagaccaggcaagatgggagtcaggaagctccagaggctcccttgtcctcagagctggagcctttccacccaaagcctaaaattagaactcggaagtcctccagaatgacaccctttccagctacctctgctgcccctgagccccacccttccacctccacagcccagccagtcactcccaagcccacatctcaggccactaggagcaggacaaataggtcctctgtcaagacccctgaaccagttgtccccacagcccctgagctccagccttccacctccacagaccagcctgtcacctctgagcccacatctcaggttactaggggaagaaaaagtagatcctctgtcaagacccctgaaacagttgtgcccacagcccttgagctccagccttccacctccaccgaccgacctgtcacctctgaacccacctctcaggctactaggggaagaaaaaatagatcctctgtcaagacccctgaaccagttgtccccacagcccctgagctccagccttccacctccacagaccagcctgtcacttctgagcccacatatcaggctactaggggaagaaaaaatagatcctctgtcaagacccctgaaccagttgtgcccacagcccctgagctccggccttccacctccacagaccgacctgtcacccccaagcccacatctcggaccactaggagcaggacaaatatgtcctctgtcaagacccctgaaacagttgtccccacagcccctgagctccagatttccacctccacagaccaacctgtcacccctaagcccacatctcggaccactaggagcaggacaaatatgtcctctgtgaagaaccctgaatcaactgtccctatagcccctgagctcccaccttccacctccacagagcagcctgtcacccctgagcccacatctcgggctactaggggaagaaaaaatagatcctctggcaagacccctgaaacacttgtccccacagcccctaagctcgagccttccacttccacagaccaacctgtcactcctgagcccacatctcaggccaccaggggcaggacaaataggtcctctgtgaagacccctgaaacagttgtccccacagcccctgagctccagccttccacctccacagaccagcctgttacccctgagcctacgtctcaggctactaggggaagaacagatagatcctctgtcaagactcctgaaacagttgtccccacagcccctgagctacaggcttccgcctccacagaccagcctgtcacctctgagcccacatctcggaccactaggggaagaaaaaatcggtcctctgtcaagacccctgaaacagttgtgcccgcagcccctgagctccagccttccacctccacagaccaacctgtcacccctgagcccacatctcgggccactaggggcaggacaaataggtcctctgtcaagacccctgaatcaattgtccctatagcccctgagcttcagccttccacctccagaaaccagcttgtcacccctgagcccacatctcgggccactaggtgcaggacaaataggtcctctgtcaagacccctgagccagttgtccccacagcccctgagccccatcctaccacctccacagaccagcctgtcacccccaagctcacatctagggccactaggagaaagacaaataggtcctctgtcaagactcccaaaccagttgaaccagcagcctctgatcttgagccttttacccccacagaccagtccgtcacccctgaggccatagctcagggtggtcagagcaaaacactgaggtcttccacagtaagagctatgccggttcctaccacccctgaattccaatctcctgtcaccacagaccagcctatttcccctgagcctattactcaacccagttgcatcaagaggcagagagccgctgggaaccctggctccctcgcagctcccattgaccataagccttgctctgcacccttggaacctaaatcccaggcctcaaggaaccaaagatggggagcagtgagagcagctgaatcccttacagccattcctgagcctgcctctccccagcttcttgagacaccaattcatgcctcccagatccaaaaggtggaaccagcaggtagatctaggttcaccccggagctccagcctaaggcctctcaaagccgcaagaggtctttagctaccatggattcaccaccacatcaaaaacagccccaaagaggggaagtctcccagaagacagtgattatcaaggaagaggaagaagatactgcagagaagccagggaaggaagaggatgtcgtgactccaaaaccaggcaagagaaagagagaccaggcagaggaggagcccaacagaataccaagccgcagcctccgacggaccaaacttaaccaagaatcaacagcccccaaagtgctcttcacaggagtggtggatgctcggggagagcgggctgtgctggcactggggggaagtctggctggttcagcggcagaggcttcccacctggtcactgatcgcatccgccggacagtcaagttcctgtgtgccctggggcggggaatccccattctgtccctggactggctgcatcagtcccgcaaggctggtttcttcttacccccggatgaatatgtggtgaccgaccctgagcaagagaagaactttggctttagccttcaagacgcactgagcagggctcgggagcgaaggctgctagagggctatgagatctatgtgacccctggagtccagccaccaccacctcagatgggagagattattagctgctgtggaggcacatacctacccagcatgcctcggtcctataagcctcagagagttgtgatcacatgccctcaggacttccctcattgctccattccactacgggttgggctgcccctcctctcgcctgagttcctgctgactggagtgctgaagcaggaagccaagccagaggcctttgtcctctcccctttggagatgtcatccacctgagaactccactacccttttccctcccagaccacgaattagaagatatgtggaagaaagaactcagggcgttagaaaggattggggtatattgatacaacttgtcctggaacatgggtgggaccagaaatctttatgaataaatgaaaagataagggatttggaagccacaggttgttttttgtttgtttgtttgtttttttaatggccattttattttatttgtatttatagttttttatttgtatagatttaggggatacaagatttcttacatgcatgtattaaatggccattttaaaattagctagtttcatgctcagatgtcataagtggcagctatctttagccagactgttgcagttattgctcgatgccactcatggtgtcctacctcctatttggaaaccatctctatttttttcttactgagattcttactttggggtcaggaacttgaagggatgcttggagtgagtagatttgagggtccagttatggagtgctactaaaacattttcttctctcctggcctctggaagcatctttagctttgactttgggcaagtctctgtacttttctggccagcttttccaggatttataaaattagagcttcggcttgacctctgtgataaataaatattcactctgtgcctta

SEQ ID NO: 152316 - DNA, 7576 bp, Homo sapiens
  Payload ID: 9967
  Gene Symbol: MDC1
  Gene Name: mediator of DNA-damage checkpoint 1
  Uniprot ID: Q14676
  ENST ID: ENST00000427406
  CDS Start-End: 649-6918
ttggatttaagaaaatgacctcaaaatgtccgtcagagacgtattcccaggaagaaagatattacttctactacaaaccaaatcaaaaggaaatgaaattccaatgcaacaggagtgaactgccacgcctacgggctgttctccaaactgcagcctccagccacgactgcaacgcgcaacccactttcatttctcatgagtcagcggacaccatgtctaggaggaccgaggaaaggcgctctggccttaccagacacgtcggacgtctatgacacagcccctctatccgttgccggcagctggcgccagactctctggtcgcggtttggaactgcgcgggaagtgggtggtgggcgggcaagcggtagtgggttgtcccttggagctgcccaatcgacgtgcattattctgttggcgcacggcggccttcaattaccgtctcattaactgatctcagcagcctgggagacaccacctatttgaactctaagggggcggggctttgggtgtgcctccgctcgactggctgcggttgtgaaagacagcggcagaagccaatcagcaaataagctctttttcggcacacgcagtcgctccacccgggtcgcgaccgttactggtggcgcgcgcggggacttaaagtagatcatggaggacacccaggctattgactgggatgttgaagaagaggaggagacagagcaatccagtgaatccttgaggtgtaacgtggagccagtagggcggctacatatctttagtggtgcccatggaccagaaaaagatttcccactacacctcgggaagaatgtggtaggccgaatgcctgactgctctgtggccctgccctttccatctatctccaaacaacatgcagagattgaaatcttagcctgggacaaggcacctatcctccgagactgtgggagccttaatggtactcaaatcctgagacctcctaaggttttgagccctggggtgagtcaccgtctgagggaccaggaattgattctctttgctgacttgctctgccagtaccatcgcctggatgtctctctgccctttgtctcccggggccctctgacagtagaagagacacccagagtacagggagaaactcaaccccagaggcttctgttggctgaggactcggaggaggaagtagattttctttctgaaaggcgtatggtaaaaaaatcaaggaccacatcttcctctgtgatagttccagagagtgatgaagaggggcattccccggtcctgggcggccttgggccgccttttgccttcaatttgaacagtgacacagatgtggaagaaggtcagcaaccagccacagaggaggcctcctcagctgccagaagaggtgccactgtagaggcaaagcagtctgaagctgaagttgtaactgaaatccagcttgaaaaggatcagcctttagtgaaggagagggacaatgatacaaaagtcaagaggggtgcagggaatggggtggttccagctggggtgattctggagaggagccaacctcctggagaggacagtgacacagatgtggatgatgacagcaggcctcctggaaggccagctgaggtccatttggaaagggctcagccttttggcttcatcgacagcgacactgatgcggaagaagagaggatcccagcaaccccagttgtcattcctatgaagaagaggaagatcttccatggagtaggtacaaggggtcctggagcaccaggcctggcccatctgcaggagagccaggctggtagtgatacagatgtggaagaaggcaaggccccacaggctgtccctctggagaaaagccaagcttccatggttatcaacagcgatacagatgacgaggaagaagtctcagcagcgctgactttggcacatctgaaagagagccagcctgctatatggaacagagatgcagaagaggacatgccccaacgtgtggtccttctgcagcgaagccaaaccaccactgagagagacagtgacacagacgtggaggaggaagagctcccagtggaaaatagagaagctgtcctcaaggatcacacaaagattagagcccttgttagagcacattcagaaaaggaccaacctccttttggggacagtgatgacagtgtggaagcagataagagctcacctgggatccacctggagagaagccaagcctccaccacagtggacatcaacacacaagtggagaaggaagtcccgccagggtcagccattatacatataaagaagcatcaggtgtctgtggaggggacaaatcaaacagatgtgaaagcagttgggggaccagcaaagctgcttgtggtatctctagaggaagcctggcctctgcatggggactgtgaaacagatgcagaggagggcacctccctaacagcctcagtagttgcagatgtaagaaagagccagcttccagcagaaggggatgctggggcagagtgggctgcagctgttcttaagcaggagagagctcatgaggtgggggcccagggtgggccacctgtggcacaagtggagcaggacctccctatctcaagagagaacctcacagatctggtggtggacacagacactctaggggaatccacccagccacagagagagggagcccaggtccccacaggaagggagagagaacaacatgtgggtgggaccaaggactctgaagacaactatggtgattctgaagatctggacctacaagctacccagtgctttctggagaatcagggcctggaagcagtccagagcatggaggatgaacctacccaggccttcatgttgactccaccccaagagcttggcccttcccattgcagcttccagacaacaggtaccctagatgaaccatgggaggtcctggctacacagccattctgtctgagagagtctgaggactctgagacccagccttttgacacgcaccttgaggcctatggaccttgcctgtctccacctagggcaataccaggagaccaacatccagagagcccagttcacacagagccaatggggattcaaggcagagggaggcagactgtggataaagtcatgggtataccaaaagaaacagcagagagggtgggccctgagagagggccattggagagagaaactgagaaactgctaccagaaagacagacagatgtgacaggagaggaagaattaaccaaggggaaacaggacagagaacaaaaacagttgttagctagagacacccagagacaagaatctgacaaaaatggggaaagtgcaagtcctgaaagagatagggagagtttgaaggtagaaattgagacatctgaggaaatacaagagaaacaagtacagaagcagacccttccaagcaaagcatttgagagagaagtagagagaccagtagcaaacagagagtgcgatccagccgagttagaagagaaggtgcccaaagtgatcctggagagagatacacagagaggggagccagagggagggagccaggaccagaaagggcaggcctccagcccaacaccagagcctggggtgggggcgggggaccttccgggacctacctcagcccccgtaccttctgggagccagtcaggtggaaggggatccccagtgagccccaggaggcatcagaaaggcctcctgaattgcaagatgccacctgctgagaaggcttccaggatcagagctgctgagaaggtttccaggggcgatcaggaatctccagatgcttgtctgcctcctacagtacctgaagccccagccccaccccaaaagccccttaactctcagagccagaaacatcttgcacctccgccccttctttctccccttttaccttctatcaagccaaccgttcgtaagaccaggcaagatgggagtcaggaagctccagaggctcccttgtcctcagagctggagcctttccacccaaagcctaaaattagaactcggaagtcctccagaatgacaccctttccagctacctctgctgcccctgagccccacccttccacctccacagcccagccagtcactcccaagcccacatctcaggccactaggagcaggacaaataggtcctctgtcaagacccctgaaccagttgtccccacagcccctgagctccagccttccacctccacagaccagcctgtcacctctgagcccacatctcaggttactaggggaagaaaaagtagatcctctgtcaagacccctgaaacagttgtgcccacagcccttgagctccagccttccacctccaccgaccgacctgtcacctctgaacccacctctcaggctactaggggaagaaaaaatagatcctctgtcaagacccctgaaccagttgtccccacagcccctgagctccagccttccacctccacagaccagcctgtcacttctgagcccacatatcaggctactaggggaagaaaaaatagatcctctgtcaagacccctgaaccagttgtgcccacagcccctgagctccggccttccacctccacagaccgacctgtcacccccaagcccacatctcggaccactaggagcaggacaaatatgtcctctgtcaagacccctgaaacagttgtccccacagcccctgagctccagatttccacctccacagaccaacctgtcacccctaagcccacatctcggaccactaggagcaggacaaatatgtcctctgtgaagaaccctgaatcaactgtccctatagcccctgagctcccaccttccacctccacagagcagcctgtcacccctgagcccacatctcgggctactaggggaagaaaaaatagatcctctggcaagacccctgaaacacttgtccccacagcccctaagctcgagccttccacttccacagaccaacctgtcactcctgagcccacatctcaggccaccaggggcaggacaaataggtcctctgtgaagacccctgaaacagttgtccccacagcccctgagctccagccttccacctccacagaccagcctgttacccctgagcctacgtctcaggctactaggggaagaacagatagatcctctgtcaagactcctgaaacagttgtccccacagcccctgagctacaggcttccgcctccacagaccagcctgtcacctctgagcccacatctcggaccactaggggaagaaaaaatcggtcctctgtcaagacccctgaaacagttgtgcccgcagcccctgagctccagccttccacctccacagaccaacctgtcacccctgagcccacatctcgggccactaggggcaggacaaataggtcctctgtcaagacccctgaatcaattgtccctatagcccctgagcttcagccttccacctccagaaaccagcttgtcacccctgagcccacatctcgggccactaggtgcaggacaaataggtcctctgtcaagacccctgagccagttgtccccacagcccctgagccccatcctaccacctccacagaccagcctgtcacccccaagctcacatctagggccactaggagaaagacaaataggtcctctgtcaagactcccaaaccagttgaaccagcagcgtctgatcttgagccttttacccccacagaccagtccgtcacccctgaggccatagctcagggtggtcagagcaaaacactgaggtcttccacagtaagagctatgccggttcctaccacccctgaattccaatctcctgtcaccacagaccagcctatttcccctgagcctattactcaacccagttgcatcaagaggcagagagccgctgggaaccctggctccctcgcagctcccattgaccataagccttgctctgcacccttggaacctaaatcccaggcctcaaggaaccaaagatggggagcagtgagagcagctgaatcccttacagccattcctgagcctgcctctccccagcttcttgagacaccaattcatgcctcccagatccaaaaggtggaaccagcaggtagatctaggttcaccccggagctccagcctaaggcctctcaaagccgcaagaggtctttagctaccatggattcaccaccacatcaaaaacagccccaaagaggggaagtctcccagaagacagtgattatcaaggaagaggaagaagatactgcagagaagccagggaaggaagaggatgtcgtgactccaaaaccaggcaagagaaagagagaccaggcagaggaggagcccaacagaataccaagccgcagcctccgacggaccaaacttaaccaagaatcaacagcccccaaagtgctcttcacaggagtggtggatgctcggggagagcgggctgtgctggcactggggggaagtctggctggttcagcggcagaggcttcccacctggtcactgatcgcatccgccggacagtcaagttcctgtgtgccctggggcggggaatccccattctgtccctggactggctgcatcagtcccgcaaggctggtttcttcttacccccggatgaatatgtggtgaccgaccctgagcaagagaagaactttggctttagccttcaagacgcactgagcagggctcgggagcgaaggctgctagagggctatgagatctatgtgacccctggagtccagccaccaccacctcagatgggagagattattagctgctgtggaggcacatacctacccagcatgcctcggtcctataagcctcagagagttgtgatcacatgccctcaggacttccctcattgctccattccactacgggttgggctgcccctcctctcgcctgagttcctgctgactggagtgctgaagcaggaagccaagccagaggcctttgtcctctcccctttggagatgtcatccacctgagaactccactacccttttccctcccagaccacgaattagaagatatgtggaagaaagaactcagggcgttagaaaggattggggtatattgatacaacttgtcctggaacatgggtgggaccagaaatctttatgaataaatgaaaagataagggatttggaagccacaggttgttttttgtttgtttgtttgtttttttaatggccattttattttatttgtatttatagttttttatttgtatagatttaggggatacaagatttcttacatgcatgtattaaatggccattttaaaattagctagtttcatgctcagatgtcataagtggcagctatctttagccagactgttgcagttattgctcgatgccactcatggtgtcctacctcctatttggaaaccatctctatttttttcttactgagattcttactttggggtcaggaacttgaagggatgcttggagtgagtagatttgagggtccagttatggagtgctactaaaacattttcttctctcctggcctctggaagcatctttagctttgactttgggcaagtctctgtacttttctggccagcttttccaggatttataaaattagagcttcggcttgacctctgtgataaataaatattcactctgtgcctta

SEQ ID NO: 152317 - DNA, 582 bp, Homo sapiens
  Payload ID: 9967
  Gene Symbol: MDC1
  Gene Name: mediator of DNA-damage checkpoint 1
  ENST ID: ENST00000438165
  CDS Start-End: 203-582
attaactgatctcagcagcctgggagacaccacctatttgaactctaagggggcggggctttgggtgtgcctccgctcgactggctgcggttgtgaaagacagcggcagaagccaatcagcaaataagctctttttcggcacacgcagtcgctccacccgggtcgcgaccgttactggtggcgcgcgcggggacttaaaatcatggaggacacccaggctattgactgggatgttgaagaagaggaggagacagagcaatccagtgaatccttgaggtgtaacgtggagccagtagggcggctacatatctttagtggtgcccatggaccagaaaaagatttcccactacacctcgggaagaatgtggtaggccgaatgcctgactgctctgtggccctgccctttccatctatctccaaacaacatgcagagattgaaatcttagcctgggacaaggcacctatcctccgagactgtgggagccttaatggtactcaaatcctgagacctcctaaggttttgagccctggggtgagtcaccgtctgagggaccaggaattgattctctttgctgacttgct

SEQ ID NO: 152318 - DNA, 583 bp, Homo sapiens
  Payload ID: 9967
  Gene Symbol: MDC1
  Gene Name: mediator of DNA-damage checkpoint 1
  ENST ID: ENST00000437759
  CDS Start-End: 244-583
aatactcatccttacctggcgccccgctccgagtttaggtatgaagacacagggagacgtcgggccacaagggaacccactgaggtggggaccaaagatggtggctctttgaattggagccaagcgtggtgggcacccgctgagttggcctgtcataaagacggagttgacactttatccatggggcatcctactttccctacctgtcaacagtttccctctagagtggcatattttcagatcatggaggacacccaggctattgactgggatgttgaagaagaggaggagacagagcaatccagtgaatccttgaggtgtaacgtggagccagtagggcggctacatatctttagtggtgcccatggaccagaaaaagatttcccactacacctcgggaagaatgtggtaggccgaatgcctgactgctctgtggccctgccctttccatctatctccaaacaacatgcagagattgaaatcttagcctgggacaaggcacctatcctccgagactgtgggagccttaatggtactcaaatcctgagacctcctaaggttttgagccctggggtgagtcacc

SEQ ID NO: 152319 - DNA, 582 bp, Homo sapiens
  Payload ID: 9967
  Gene Symbol: MDC1
  Gene Name: mediator of DNA-damage checkpoint 1
  ENST ID: ENST00000424507
  CDS Start-End: 96-582
gtaccttgggtgcgactgggcggaggtgacttggaagttcgcttctcggactgtaatactcatccttacctggcgccccgctccgagtttagatcatggaggacacccaggctattgactgggatgttgaagaagaggaggagacagagcaatccagtgaatccttgaggtgtaacgtggagccagtagggcggctacatatctttagtggtgcccatggaccagaaaaagatttcccactacacctcgggaagaatgtggtaggccgaatgcctgactgctctgtggccctgccctttccatctatctccaaacaacatgcagagattgaaatcttagcctgggacaaggcacctatcctccgagactgtgggagccttaatggtactcaaatcctgagacctcctaaggttttgagccctggggtgagtcaccgtctgagggaccaggaattgattctctttgctgacttgctctgccagtaccatcgcctggatgtctctctgccctttgtctcccggggccctctgacagtagaagagacacccagagtacagggagaaactcaaccccagaggcttc

SEQ ID NO: 152320 - DNA, 583 bp, Homo sapiens; identical to SEQ ID NO: 152318
  Payload ID: 9967
  Gene Symbol: MDC1
  Gene Name: mediator of DNA-damage checkpoint 1
  ENST ID: ENST00000450033
  CDS Start-End: 244-583

SEQ ID NO: 152321 - DNA, 582 bp, Homo sapiens; identical to SEQ ID NO: 152319
  Payload ID: 9967
  Gene Symbol: MDC1
  Gene Name: mediator of DNA-damage checkpoint 1
  ENST ID: ENST00000441397
  CDS Start-End: 96-582

SEQ ID NO: 152322 - DNA, 583 bp, Homo sapiens; identical to SEQ ID NO: 152318
  Payload ID: 9967
  Gene Symbol: MDC1
  Gene Name: mediator of DNA-damage checkpoint 1
  ENST ID: ENST00000423726
  CDS Start-End: 244-583

SEQ ID NO: 152323 - DNA, 582 bp, Homo sapiens; identical to SEQ ID NO: 152319
  Payload ID: 9967
  Gene Symbol: MDC1
  Gene Name: mediator of DNA-damage checkpoint 1
  ENST ID: ENST00000431441
  CDS Start-End: 96-582

SEQ ID NO: 152324 - DNA, 582 bp, Homo sapiens; identical to SEQ ID NO: 152319
  Payload ID: 9967
  Gene Symbol: MDC1
  Gene Name: mediator of DNA-damage checkpoint 1
  ENST ID: ENST00000412395
  CDS Start-End: 96-582

SEQ ID NO: 152325 - DNA, 582 bp, Homo sapiens; identical to SEQ ID NO: 152317
  Payload ID: 9967
  Gene Symbol: MDC1
  Gene Name: mediator of DNA-damage checkpoint 1
  ENST ID: ENST00000445764
  CDS Start-End: 203-582

SEQ ID NO: 152326 - DNA, 583 bp, Homo sapiens
  Payload ID: 9967
  Gene Symbol: MDC1
  Gene Name: mediator of DNA-damage checkpoint 1
  ENST ID: ENST00000424638
  CDS Start-End: 244-583
aatactcatccttacctggcgccccgctccgagtttaggtatgaagacacagggagacgtcgggccacaagggaacccactgaggtggggaccaaagatggtggctctttgaattggagccaagcgtggtgggcacccgctgagttggcctgtcataaagacggagttgacactttatccatggggcatcctactttccctacctgtcaacaatttccctctagagtggcatattttcagatcatggaggacacccaggctattgactgggatgttgaagaagaggaggagacagagcaatccagtgaatccttgaggtgtaacgtggagccagtagggcggctacatatctttagtggtgcccatggaccagaaaaagatttcccactacacctcgggaagaatgtggtaggccgaatgcctgactgctctgtggccctgccctttccatctatctccaaacaacatgcagagattgaaatcttagcctgggacaaggcacctatcctccgagactgtgggagccttaatggtactcaaatcctgagacctcctaaggttttgagccctggggtgagtcacc

SEQ ID NO: 152327 - DNA, 916 bp, Homo sapiens
  Payload ID: 9967
  Gene Symbol: MDC1
  Gene Name: mediator of DNA-damage checkpoint 1
  ENST ID: ENST00000448895
  CDS Start-End: 1-916
acatgtgggtgggaccaaggactctgaagacaactatggtgattctgaagatctggacctacaagctacccagtgctttctggagaatcagggcctggaagcagtccagagcatggaggatgaacctacccaggccttcatgttgactccaccccaagagcttggcccttcccattgcagcttccagacaacaggcctcctgaattgcaagatgccacctgctgagaaggcttccaggatcagagctgctgagaaggtttccaggggcgatcaggaatctccagatgcttgtctgcctcctacagtacctgaagccccagccccaccccaaaagccccttaactctcagagccagaaacatcttgcacctccgccccttctttctccccttttaccttctatcaagccaaccgttcgtaagaccaggcaagatgggagtcaggaagctccagaggctcccttgtcctcagagctggagcctttccacccaaagcctaaaattagaactcggaagtcctccagaatgacaccctttccagctacctctgctgcccctgagccccacccttccacctccacagcccagccagtcactcccaagcccacatctcaggccactaggagcaggacaaataggtcctctgtcaagacccctgaaccagttgtccccacagcccctgagctccagccttccacctccacagaccagcctgtcacctctgagcccacatctcaggttactaggggaagaaaaagtagatcctctgtcaagacccctgaaacagttgtgcccacagcccttgagctccagccttccacctccaccgaccgacctgtcacctctgaacccacctctcaggctactaggggaagaaaaaatagatcctctgtcaagacccctgaaccagttgtcccc

SEQ ID NO: 152328 - DNA, 916 bp, Homo sapiens; identical to SEQ ID NO: 152327
  Payload ID: 9967
  Gene Symbol: MDC1
  Gene Name: mediator of DNA-damage checkpoint 1
  ENST ID: ENST00000445130
  CDS Start-End: 1-916

SEQ ID NO: 152329 - DNA, 582 bp, Homo sapiens; identical to SEQ ID NO: 152319
  Payload ID: 9967
  Gene Symbol: MDC1
  Gene Name: mediator of DNA-damage checkpoint 1
  ENST ID: ENST00000447640
  CDS Start-End: 96-582

SEQ ID NO: 152330 - DNA, 7576 bp, Homo sapiens
  Payload ID: 9967
  Gene Symbol: MDC1
  Gene Name: mediator of DNA-damage checkpoint 1
  Uniprot ID: Q14676
  ENST ID: ENST00000420019
  CDS Start-End: 649-6918
ttggatttaagaaaatgacctcaaaatgtccgtcagagacgtattcccaggaagaaagatattacttctactacaaaccaaatcaaaaggaaatgaaattccaatgcaacaggagtgaactgccacgcctacgggctgttctccaaactgcagcctccagccacgactgcaacgcgcaacccactttcatttctcatgagtcagcggacaccatgtctaggaggaccgaggaaaggcgctctggccttaccagacacgtcggacgtctatgacacagcccctctatccgttgccggcagctggcgccagactctctggtcgcggtttggaactgcgcgggaagtgggtggtgggcgggcaagcggtagtgggttgtcccttggagctgcccaatcgacgtgcattattctgttggcgcacggcggccttcaattaccgtctcattaactgatctcagcagcctgggagacaccacctatttgaactctaagggggcggggctttgggtgtgcctccgctcgactggctgcggttgtgaaagacagcggcagaagccaatcagcaaataagctctttttcggcacacgcagtcgctccacccgggtcgcgaccgttactggtggcgcgcgcggggacttaaagtagatcatggaggacacccaggctattgactgggatgttgaagaagaggaggagacagagcaatccagtgaatccttgaggtgtaacgtggagccagtagggcggctacatatctttagtggtgcccatggaccagaaaaagatttcccactacacctcgggaagaatgtggtaggccgaatgcctgactgctctgtggccctgccctttccatctatctccaaacaacatgcagagattgaaatcttagcctgggacaaggcacctatcctccgagactgtgggagccttaatggtactcaaatcctgagacctcctaaggttttgagccctggggtgagtcaccgtctgagggaccaggaattgattctctttgctgacttgctctgccagtaccatcgcctggatgtctctctgccctttgtctcccggggccctctgacagtagaagagacacccagagtacagggagaaactcaaccccagaggcttctgttggctgaggactcggaggaggaagtagattttctttctgaaaggcgtatggtaaaaaaatcaaggaccacatcttcctctgtgatagttccagagagtgatgaagaggggcattccccggtcctgggcggccttgggccgccttttgccttcaatttgaacagtgacacagatgtggaagaaggtcagcaaccagccacagaggaggcctcctcagctgccagaagaggtgccactgtagaggcaaagcagtctgaagctgaagttgtaactgaaatccagcttgaaaaggatcagcctttagtgaaggagagggacaatgatacaaaagtcaagaggggtgcagggaatggggtggttccagctggggtgattctggagaggagccaacctcctggagaggacagtgacacagatgtggatgatgacagcaggcctcctggaaggccagctgaggtccatttggaaagggctcagccttttggcttcatcgacagcgacactgatgcggaagaagagaggatcccagcaaccccagttgtcattcctatgaagaagaggaagatcttccatggagtaggtacaaggggtcctggagcaccaggcctggcccatctgcaggagagccaggctggtagtgatacagatgtggaagaaggcaaggccccacaggctgtccctctggagaaaagccaagcttccatggttatcaacagcgatacagatgacgaggaagaagtctcagcagcgctgactttggcacatctgaaagagagccagcctgctatatggaacagagatgcagaagaggacatgccccaacgtgtggtccttctgcagcgaagccaaaccaccactgagagagacagtgacacagacgtggaggaggaagagctcccagtggaaaatagagaagctgtcctcaaggatcacacaaagattagagcccttgttagagcacattcagaaaaggaccaacctccttttggggacagtgatgacagtgtggaagcagataagagctcacctgggatccacctggagagaagccaagcctccaccacagtggacatcaacacacaagtggagaaggaagtcccgccagggtcagccattatacatataaagaagcatcaggtgtctgtggaggggacaaatcaaacagatgtgaaagcagttgggggaccagcaaagctgcttgtggtatctctagaggaagcctggcctctgcatggggactgtgaaacagatgcagaggagggcacctccctaacagcctcagtagttgcagatgtaagaaagagccagcttccagcagaaggggatgctggggcagagtgggctgcagctgttcttaagcaggagagagctcatgaggtgggggcccagggtgggccacctgtggcacaagtggagcaggacctccctatctcaagagagaacctcacagatctggtggtggacacagacactctaggggaatccacccagccacagagagagggagcccaggtccccacaggaagggagagagaacaacatgtgggtgggaccaaggactctgaagacaactatggtgattctgaagatctggacctacaagctacccagtgctttctggagaatcagggcctggaagcagtccagagcatggaggatgaacctacccaggccttcatgttgactccaccccaagagcttggcccttcccattgcagcttccagacaacaggtaccctagatgaaccatgggaggtcctggctacacagccattctgtctgagagagtctgaggactctgagacccagccttttgacacgcaccttgaggcctatggaccttgcctgtctccacctagggcaataccaggagaccaacatccagagagcccagttcacacagagccaatggggattcaaggcagagggaggcagactgtggataaagtcatgggtataccaaaagaaacagcagagagggtgggccctgagagagggccattggagagagaaactgagaaactgctaccagaaagacagacagatgtgacaggagaggaagaattaaccaaggggaaacaggacagagaacaaaaacagttgttagctagagacacccagagacaagaatctgacaaaaatggggaaagtgcaagtcctgaaagagatagggagagtttgaaggtagaaattgagacatctgaggaaatacaagagaaacaagtacagaagcagacccttccaagcaaagcatttgagagagaagtagagagaccagtagcaaacagagagtgcgatccagccgagttagaagagaaggtgcccaaagtgatcctggagagagatacacagagaggggagccagagggagggagccaggaccagaaagggcaggcctccagcccaacaccagagcctggggtgggggcgggggaccttccgggacctacctcagcccccgtaccttctgggagccagtcaggtggaaggggatccccagtgagccccaggaggcatcagaaaggcctcctgaattgcaagatgccacctgctgagaaggcttccaggatcagagctgctgagaaggtttccaggggcgatcaggaatctccagatgcttgtctgcctcctacagtacctgaagccccagccccaccccaaaagccccttaactctcagagccagaaacatcttgcacctccgccccttctttctccccttttaccttctatcaagccaaccgttcgtaagaccaggcaagatgggagtcaggaagctccagaggctcccttgtcctcagagctggagcctttccacccaaagcctaaaattagaactcggaagtcctccagaatgacaccctttccagctacctctgctgcccctgagccccacccttccacctccacagcccagccagtcactcccaagcccacatctcaggccactaggagcaggacaaataggtcctctgtcaagacccctgaaccagttgtccccacagcccctgagctccagccttccacctccacagaccagcctgtcacctctgagcccacatctcaggttactaggggaagaaaaagtagatcctctgtcaagacccctgaaacagttgtgcccacagcccttgagctccagccttccacctccaccgaccgacctgtcacctctgaacccacctctcaggctactaggggaagaaaaaatagatcctctgtcaagacccctgaaccagttgtccccacagcccctgagctccagccttccacctccacagaccagcctgtcacttctgagcccacatatcaggctactaggggaagaaaaaatagatcctctgtcaagacccctgaaccagttgtgcccacagcccctgagctccggccttccacctccacagaccgacctgtcacccccaagcccacatctcggaccactaggagcaggacaaatatgtcctctgtcaagacccctgaaacagttgtccccacagcccctgagctccagatttccacctccacagaccaacctgtcacccctaagcccacatctcggaccactaggagcaggacaaatatgtcctctgtgaagaaccctgaatcaactgtccctatagcccctgagctcccaccttccacctccacagagcagcctgtcacccctgagcccacatctcgggctactaggggaagaaaaaatagatcctctggcaagacccctgaaacacttgtccccacagcccctaagctcgagccttccacttccacagaccaacctgtcactcctgagcccacatctcaggccaccaggggcaggacaaataggtcctctgtgaagacccctgaaacagttgtccccacagcccctgagctccagccttccacctccacagaccagcctgttacccctgagcctacgtctcaggctactaggggaagaacagatagatcctctgtcaagactcctgaaacagttgtccccacagcccctgagctacaggcttccgcctccacagaccagcctgtcacctctgagcccacatctcggaccactaggggaagaaaaaatcggtcctctgtcaagacccctgaaacagttgtgcccgcagcccctgagctccagccttccacctccacagaccaacctgtcacccctgagcccacatctcgggccactaggggcaggacaaataggtcctctgtcaagacccctgaatcaattgtccctatagcccctgagcttcagccttccacctccagaaaccagcttgtcacccctgagcccacatctcgggccactaggtgcaggacaaataggtcctctgtcaagacccctgagccagttgtccccacagcccctgagccccatcctaccacctccacagaccagcctgtcacccccaagctcacatctagggccactaggagaaagacaaataggtcctctgtcaagactcccaaaccagttgaaccagcagcctctgatcttgagccttttacccccacagaccagtccgtcacccctgaggccatagctcagggtggtcagagcaaaacactgaggtcttccacagtaagagctatgccggttcctaccacccctgaattccaatctcctgtcaccacagaccagcctatttcccctgagcctattactcaacccagttgcatcaagaggcagagagccgctgggaaccctggctccctcgcagctcccattgaccataagccttgctctgcacccttggaacctaaatcccaggcctcaaggaaccaaagatggggagcagtgagagcagctgaatcccttacagccattcctgagcctgcctctccccagcttcttgagacaccaattcatgcctcccagatccaaaaggtggaaccagcaggtagatctaggttcaccccggagctccagcctaaggcctctcaaagccgcaagaggtctttagctaccatggattcaccaccacatcaaaaacagccccaaagaggggaagtctcccagaagacagtgattatcaaggaagaggaagaagatactgcagagaagccagggaaggaagaggatgtcgtgactccaaaaccaggcaagagaaagagagaccaggcagaggaggagcccaacagaataccaagccgcagcctccgacggaccaaacttaaccaagaatcaacagcccccaaagtgctcttcacaggagtggtggatgctcggggagagcgggctgtgctggcactggggggaagtctggctggttcagcggcagaggcttcccacctggtcactgatcgcatccgccggacagtcaagttcctgtgtgccctggggcggggaatccccattctgtccctggactggctgcatcagtcccgcaaggctggtttcttcttacccccggatgaatatgtggtgaccgaccctgagcaagagaagaactttggctttagccttcaagacgcactgagcagggctcgggagcgaaggctgctagagggctatgagatctatgtgacccctggagtccagccaccaccacctcagatgggagagattattagctgctgtggaggcacatacctacccagcatgcctcggtcctataagcctcagagagttgtgatcacatgccctcaggacttccctcattgctccattccactacgggttgggctgcccctcctctcgcctgagttcctgctgactggagtgctgaagcaggaagccaagccagaggcctttgtcctctcccctttggagatgtcatccacctgagaactccactacccttttccctcccagaccacgaattagaagatatgtggaagaaagaactcagggcgttagaaaggattggggtatattgatacaacttgtcctggaacatgggtgggaccagaaatctttatgaataaatgaaaagataagggatttggaagccacaggttgttttttgtttgtttgtttgtttttttaatggccattttattttatttgtatttatagttttttatttgtatagatttaggggatacaagatttcttacatgcatgtattaaatggccattttaaaattagctagtttcatgctcagatgtcataagtggcagctatctttagccagactgttgcagttattgctcgatgccactcatggtgtcctacctcctatttggaaaccatctctatttttttcttactgagattcttactttggggtcaggaacttgaagggatgcttggagtgagtagatttgagggtccagttatggagtgctactaaaacattttcttctctcctggcctctggaagcatctttagctttgactttgggcaagtctctgtacttttctggccagcttttccaggatttataaaattagagcttcggcttgacctctgtgataaataaatattcactctgtgcctta

SEQ ID NO: 152331 - DNA, 582 bp, Homo sapiens
  Payload ID: 9967
  Gene Symbol: MDC1
  Gene Name: mediator of DNA-damage checkpoint 1
  ENST ID: ENST00000425072
  CDS Start-End: 203-582
attaactgatctcagcagcctgggagacaccacctatttgaactctaagggggcggggctttgggtgtgcctccgctcgactggctgcggttgtgaaagacagcggcagaagccaatcagcaaataagctctttttcggcacacgcagtcgctccacctgggtcgcgaccgttactggtggcgcgcgcggggacttaaaatcatggaggacacccaggctattgactgggatgttgaagaagaggaggagacagagcaatccagtgaatccttgaggtgtaacgtggagccagtagggcggctacatatctttagtggtgcccatggaccagaaaaagatttcccactacacctcgggaagaatgtggtaggccgaatgcctgactgctctgtggccctgccctttccatctatctccaaacaacatgcagagattgaaatcttagcctgggacaaggcacctatcctccgagactgtgggagccttaatggtactcaaatcctgagacctcctaaggttttgagccctggggtgagtcaccgtctgagggaccaggaattgattctctttgctgacttgct

SEQ ID NO: 152332 - DNA, 916 bp, Homo sapiens; identical to SEQ ID NO: 152327
  Payload ID: 9967
  Gene Symbol: MDC1
  Gene Name: mediator of DNA-damage checkpoint 1
  ENST ID: ENST00000425790
  CDS Start-End: 1-916

SEQ ID NO: 152333 - DNA, 582 bp, Homo sapiens; identical to SEQ ID NO: 152319
  Payload ID: 9967
  Gene Symbol: MDC1
  Gene Name: mediator of DNA-damage checkpoint 1
  ENST ID: ENST00000425029
  CDS Start-End: 96-582

SEQ ID NO: 152334 - DNA, 916 bp, Homo sapiens; identical to SEQ ID NO: 152327
  Payload ID: 9967
  Gene Symbol: MDC1
  Gene Name: mediator of DNA-damage checkpoint 1
  ENST ID: ENST00000419675
  CDS Start-End: 1-916

SEQ ID NO: 152335 - DNA, 582 bp, Homo sapiens; identical to SEQ ID NO: 152317
  Payload ID: 9967
  Gene Symbol: MDC1
  Gene Name: mediator of DNA-damage checkpoint 1
  ENST ID: ENST00000424437
  CDS Start-End: 203-582

SEQ ID NO: 152336 - DNA, 916 bp, Homo sapiens; identical to SEQ ID NO: 152327
  Payload ID: 9967
  Gene Symbol: MDC1
  Gene Name: mediator of DNA-damage checkpoint 1
  ENST ID: ENST00000419172
  CDS Start-End: 1-916

SEQ ID NO: 152337 - DNA, 582 bp, Homo sapiens; identical to SEQ ID NO: 152317
  Payload ID: 9967
  Gene Symbol: MDC1
  Gene Name: mediator of DNA-damage checkpoint 1
  ENST ID: ENST00000417228
  CDS Start-End: 203-582

SEQ ID NO: 152338 - DNA, 582 bp, Homo sapiens; identical to SEQ ID NO: 152319
  Payload ID: 9967
  Gene Symbol: MDC1
  Gene Name: mediator of DNA-damage checkpoint 1
  ENST ID: ENST00000416571
  CDS Start-End: 96-582

SEQ ID NO: 152339 - DNA, 7576 bp, Homo sapiens
  Payload ID: 9967
  Gene Symbol: MDC1
  Gene Name: mediator of DNA-damage checkpoint 1
  Uniprot ID: Q14676
  ENST ID: ENST00000435664
  CDS Start-End: 649-6918
ttggatttaagaaaatgacctcaaaatgtccgtcagagacgtattcccaggaagaaagatattacttctactacaaaccaaatcaaaaggaaatgaaattccaatgcaacaggagtgaactgccacgcctacgggctgttctccaaactgcagcctccagccacgactgcaacgcgcaacccactttcatttctcatgagtcagcggacaccatgtctaggaggaccgaggaaaggcgctctggccttaccagacacgtcggacgtctatgacacagcccctctatccgttgccggcagctggcgccagactctctggtcgcggtttggaactgcgcgggaagtgggtggtgggcgggcaagcggtagtgggttgtcccttggagctgcccaatcgacgtgcattattctgttggcgcacggcggccttcaattaccgtctcattaactgatctcagcagcctgggagacaccacctatttgaactctaagggggcggggctttgggtgtgcctccgctcgactggctgcggttgtgaaagacagcggcagaagccaatcagcaaataagctctttttcggcacacgcagtcgctccacccgggtcgcgaccgttactggtggcgcgcgcggggacttaaagtagatcatggaggacacccaggctattgactgggatgttgaagaagaggaggagacagagcaatccagtgaatccttgaggtgtaacgtggagccagtagggcggctacatatctttagtggtgcccatggaccagaaaaagatttcccactacacctcgggaagaatgtggtaggccgaatgcctgactgctctgtggccctgccctttccatctatctccaaacaacatgcagagattgaaatcttagcctgggacaaggcacctatcctccgagactgtgggagccttaatggtactcaaatcctgagacctcctaaggttttgagccctggggtgagtcaccgtctgagggaccaggaattgattctctttgctgacttgctctgccagtaccatcgcctggatgtctctctgccctttgtctcccggggccctctgacagtagaagagacacccagagtacagggagaaactcaaccccagaggcttctgttggctgaggactcggaggaggaagtagattttctttctgaaaggcgtatggtaaaaaaatcaaggaccacatcttcctctgtgatagttccagagagtgatgaagaggggcattccccggtcctgggcggccttgggccgccttttgccttcaatttgaacagtgacacagatgtggaagaaggtcagcaaccagccacagaggaggcctcctcagctgccagaagaggtgccactgtagaggcaaagcagtctgaagctgaagttgtaactgaaatccagcttgaaaaggatcagcctttagtgaaggagagggacaatgatacaaaagtcaagaggggtgcagggaatggggtggttccagctggggtgattctggagaggagccaacctcctggagaggacagtgacacagatgtggatgatgacagcaggcctcctggaaggccagctgaggtccatttggaaagggctcagccttttggcttcatcgacagcgacactgatgcggaagaagagaggatcccagcaaccccagttgtcattcctatgaagaagaggaagatcttccatggagtaggtacaaggggtcctggagcaccaggcctggcccatctgcaggagagccaggctggtagtgatacagatgtggaagaaggcaaggccccacaggctgtccctctggagaaaagccaagcttccatggttatcaacagcgatacagatgacgaggaagaagtctcagcagcgctgactttggcacatctgaaagagagccagcctgctatatggaacagagatgcagaagaggacatgccccaacgtgtggtccttctgcagcgaagccaaaccaccactgagagagacagtgacacagacgtggaggaggaagagctcccagtggaaaatagagaagctgtcctcaaggatcacacaaagattagagcccttgttagagcacattcagaaaaggaccaacctccttttggggacagtgatgacagtgtggaagcagataagagctcacctgggatccacctggagagaagccaagcctccaccacagtggacatcaacacacaagtggagaaggaagtcccgccagggtcagccattatacatataaagaagcatcaggtgtctgtggaggggacaaatcaaacagatgtgaaagcagttgggggaccagcaaagctgcttgtggtatctctagaggaagcctggcctctgcatggggactgtgaaacagatgcagaggagggcacctccctaacagcctcagtagttgcagatgtaagaaagagccagcttccagcagaaggggatgctggggcagagtgggctgcagctgttcttaagcaggagagagctcatgaggtgggggcccagggtgggccacctgtggcacaagtggagcaggacctccctatctcaagagagaacctcacagatctggtggtggacacagacactctaggggaatccacccagccacagagagagggagcccaggtccccacaggaagggagagagaacaacatgtgggtgggaccaaggactctgaagacaactatggtgattctgaagatctggacctacaagctacccagtgctttctggagaatcagggcctggaagcagtccagagcatggaggatgaacctacccaggccttcatgttgactccaccccaagagcttggcccttcccattgcagcttccagacaacaggtaccctagatgaaccatgggaggtcctggctacacagccattctgtctgagagagtctgaggactctgagacccagccttttgacacgcaccttgaggcctatggaccttgcctgtctccacctagggcaataccaggagaccaacatccagagagcccagttcacacagagccaatggggattcaaggcagagggaggcagactgtggataaagtcatgggtataccaaaagaaacagcagagagggtgggccctgagagagggccattggagagagaaactgagaaactgctaccagaaagacagacagatgtgacaggagaggaagaattaaccaaggggaaacaggacagagaacaaaaacagttgttagctagagacacccagagacaagaatctgacaaaaatggggaaagtgcaagtcctgaaagagatagggagagtttgaaggtagaaattgagacatctgaggaaatacaagagaaacaagtacagaagcagacccttccaagcaaagcatttgagagagaagtagagagaccagtagcaaacagagagtgcgatccagccgagttagaagagaaggtgcccaaagtgatcctggagagagatacacagagaggggagccagagggagggagccaggaccagaaagggcaggcctccagcccaacaccagagcctggggtgggggcgggggaccttccgggacctacctcagcccccgtaccttctgggagccagtcaggtggaaggggatccccagtgagccccaggaggcatcagaaaggcctcctgaattgcaagatgccacctgctgagaaggcttccaggatcagagctgctgagaaggtttccaggggcgatcaggaatctccagatgcttgtctgcctcctacagtacctgaagccccagccccaccccaaaagccccttaactctcagagccagaaacatcttgcacctccgccccttctttctccccttttaccttctatcaagccaaccgttcgtaagaccaggcaagatgggagtcaggaagctccagaggctcccttgtcctcagagctggagcctttccacccaaagcctaaaattagaactcggaagtcctccagaatgacaccctttccagctacctctgctgcccctgagccccacccttccacctccacagcccagccagtcactcccaagcccacatctcaggccactaggagcaggacaaataggtcctctgtcaagacccctgaaccagttgtccccacagcccctgagctccagccttccacctccacagaccagcctgtcacctctgagcccacatctcaggttactaggggaagaaaaagtagatcctctgtcaagacccctgaaacagttgtgcccacagcccttgagctccagccttccacctccaccgaccgacctgtcacctctgaacccacctctcaggctactaggggaagaaaaaatagatcctctgtcaagacccctgaaccagttgtccccacagcccctgagctccagccttccacctccacagaccagcctgtcacttctgagcccacatatcaggctactaggggaagaaaaaatagatcctctgtcaagacccctgaaccagttgtgcccacagcccctgagctccggccttccacctccacagaccgacctgtcacccccaagcccacatctcggaccactaggagcaggacaaatatgtcctctgtcaagacccctgaaacagttgtccccacagcccctgagctccagatttccacctccacagaccaacctgtcacccctaagcccacatctcggaccactaggagcaggacaaatatgtcctctgtgaagaaccctgaatcaactgtccctatagcccctgagctcccaccttccacctccacagagcagcctgtcacccctgagcccacatctcgggctactaggggaagaaaaaatagatcctctggcaagacccctgaaacacttgtccccacagcccctaagctcgagccttccacttccacagaccaacctgtcactcctgagcccacatctcaggccaccaggggcaggacaaataggtcctctgtgaagacccctgaaacagttgtccccacagcccctgagctccagccttccacctccacagaccagcctgttacccctgagcctacgtctcaggctactaggggaagaacagatagatcctctgtcaagactcctgaaacagttgtccccacagcccctgagctacaggcttccgcctccacagaccagcctgtcacctctgagcccacatctcggaccactaggggaagaaaaaatcggtcctctgtcaagacccctgaaacagttgtgcccgcagcccctgcgctccagccttccacctccacagaccaacctgtcacccctgagcccacatctcgggccactaggggcaggacaaataggtcctctgtcaagacccctgaatcaattgtccctatagcccctgagcttcagccttccacctccagaaaccagcttgtcacccctgagcccacatctcgggccactaggtgcaggacaaataggtcctctgtcaagacccctgagccagttgtccccacagcccctgagccccatcctaccacctccacagaccagcctgtcacccccaagctcacatctagggccactaggagaaagacaaataggtcctctgtcaagactcccaaaccagttgaaccagcagcctctgatcttgagccttttacccccacagaccagtccgtcacccctgaggccatagctcagggtggtcagagcaaaacactgaggtcttccacagtaagagctatgccggttcctaccacccctgaattccaatctcctgtcaccacagaccagcctatttcccctgagcctattactcaacccagttgcatcaagaggcagagagccgctgggaaccctggctccctcgcagctcccattgaccataagccttgctctgcacccttggaacctaaatcccaggcctcaaggaaccaaagatggggagcagtgagagcagctgaatcccttacagccattcctgagcctgcctctccccagcttcttgagacaccaattcatgcctcccagatccaaaaggtggaaccagcaggtagatctaggttcaccccggagctccagcctaaggcctctcaaagccgcaagaggtctttagctaccatggattcaccaccacatcaaaaacagccccaaagaggggaagtctcccagaagacagtgattatcaaggaagaggaagaagatactgcagagaagccagggaaggaagaggatgtcgtgactccaaaaccaggcaagagaaagagagaccaggcagaggaggagcccaacagaataccaagccgcagcctccgacggaccaaacttaaccaagaatcaacagcccccaaagtgctcttcacaggagtggtggatgctcggggagagcgggctgtgctggcactggggggaagtctggctggttcagcggcagaggcttcccacctggtcactgatcgcatccgccggacagtcaagttcctgtgtgccctggggcggggaatccccattctgtccctggactggctgcatcagtcccgcaaggctggtttcttcttacccccggatgaatatgtggtgaccgaccctgagcaagagaagaactttggctttagccttcaagacgcactgagcagggctcgggagcgaaggctgctagagggctatgagatctatgtgacccctggagtccagccaccaccacctcagatgggagagattattagctgctgtggaggcacatacctacccagcatgcctcggtcctataagcctcagagagttgtgatcacatgccctcaggacttccctcattgctccattccactacgggttgggctgcccctcctctcgcctgagttcctgctgactggagtgctgaagcaggaagccaagccagaggcctttgtcctctcccctttggagatgtcatccacctgagaactccactacccttttccctcccagaccacgaattagaagatatgtggaagaaagaactcagggcgttagaaaggattggggtatattgatacaacttgtcctggaacatgggtgggaccagaaatctttatgaataaatgaaaagataagggatttggaagccacaggttgttttttgtttgtttgtttgtttttttaatggccattttattttatttgtatttatagttttttatttgtatagatttaggggatacaagatttcttacatgcatgtattaaatggccattttaaaattagctagtttcatgctcagatgtcataagtggcagctatctttagccagactgttgcagttattgctcgatgccactcatggtgtcctacctcctatttggaaaccatctctatttttttcttactgagattcttactttggggtcaggaacttgaagggatgcttggagtgagtagatttgagggtccagttatggagtgctactaaaacattttcttctctcctggcctctggaagcatctttagctttgactttgggcaagtctctgtacttttctggccagcttttccaggatttataaaattagagcttcggcttgacctctgtgataaataaatattcactctgtgcctta

SEQ ID NO: 152340 - DNA, 582 bp, Homo sapiens; identical to SEQ ID NO: 152317
  Payload ID: 9967
  Gene Symbol: MDC1
  Gene Name: mediator of DNA-damage checkpoint 1
  ENST ID: ENST00000455729
  CDS Start-End: 203-582

SEQ ID NO: 152341 - DNA, 583 bp, Homo sapiens; identical to SEQ ID NO: 152318
  Payload ID: 9967
  Gene Symbol: MDC1
  Gene Name: mediator of DNA-damage checkpoint 1
  ENST ID: ENST00000456589
  CDS Start-End: 244-583

SEQ ID NO: 152342 - DNA, 916 bp, Homo sapiens; identical to SEQ ID NO: 152327
  Payload ID: 9967
  Gene Symbol: MDC1
  Gene Name: mediator of DNA-damage checkpoint 1
  ENST ID: ENST00000447192
  CDS Start-End: 1-916

SEQ ID NO: 152343 - DNA, 582 bp, Homo sapiens; identical to SEQ ID NO: 152317
  Payload ID: 9967
  Gene Symbol: MDC1
  Gene Name: mediator of DNA-damage checkpoint 1
  ENST ID: ENST00000432998
  CDS Start-End: 203-582

SEQ ID NO: 152344 - DNA, 582 bp, Homo sapiens; identical to SEQ ID NO: 152319
  Payload ID: 9967
  Gene Symbol: MDC1
  Gene Name: mediator of DNA-damage checkpoint 1
  ENST ID: ENST00000422195
  CDS Start-End: 96-582

SEQ ID NO: 152345 - DNA, 583 bp, Homo sapiens; identical to SEQ ID NO: 152318
  Payload ID: 9967
  Gene Symbol: MDC1
  Gene Name: mediator of DNA-damage checkpoint 1
  ENST ID: ENST00000413973
  CDS Start-End: 244-583

SEQ ID NO: 152346 - DNA, 916 bp, Homo sapiens; identical to SEQ ID NO: 152327
  Payload ID: 9967
  Gene Symbol: MDC1
  Gene Name: mediator of DNA-damage checkpoint 1
  ENST ID: ENST00000417033
  CDS Start-End: 1-916

SEQ ID NO: 152347 - DNA, 7576 bp, Homo sapiens; identical to SEQ ID NO: 152330
  Payload ID: 9967
  Gene Symbol: MDC1
  Gene Name: mediator of DNA-damage checkpoint 1
  Uniprot ID: Q14676
  ENST ID: ENST00000449153
  CDS Start-End: 649-6918

SEQ ID NO: 152348 - DNA, 582 bp, Homo sapiens; identical to SEQ ID NO: 152317
  Payload ID: 9967
  Gene Symbol: MDC1
  Gene Name: mediator of DNA-damage checkpoint 1
  ENST ID: ENST00000416368
  CDS Start-End: 203-582

SEQ ID NO: 152349 - DNA, 583 bp, Homo sapiens; identical to SEQ ID NO: 152318
  Payload ID: 9967
  Gene Symbol: MDC1
  Gene Name: mediator of DNA-damage checkpoint 1
  ENST ID: ENST00000422266
  CDS Start-End: 244-583

SEQ ID NO: 152350 - DNA, 916 bp, Homo sapiens; identical to SEQ ID NO: 152327
  Payload ID: 9967
  Gene Symbol: MDC1
  Gene Name: mediator of DNA-damage checkpoint 1
  ENST ID: ENST00000444412
  CDS Start-End: 1-916

SEQ ID NO: 152351 - DNA, 583 bp, Homo sapiens; identical to SEQ ID NO: 152318
  Payload ID: 9967
  Gene Symbol: MDC1
  Gene Name: mediator of DNA-damage checkpoint 1
  ENST ID: ENST00000430358
  CDS Start-End: 244-583

SEQ ID NO: 152352 - DNA, 7576 bp, Homo sapiens; identical to SEQ ID NO: 152330
  Payload ID: 9967
  Gene Symbol: MDC1
  Gene Name: mediator of DNA-damage checkpoint 1
  Uniprot ID: Q14676
  ENST ID: ENST00000440369
  CDS Start-End: 649-6918

SEQ ID NO: 152353 - DNA, 7576 bp, Homo sapiens; identical to SEQ ID NO: 152316
  Payload ID: 9967
  Gene Symbol: MDC1
  Gene Name: mediator of DNA-damage checkpoint 1
  Uniprot ID: Q14676
  ENST ID: ENST00000420320
  CDS Start-End: 649-6918

SEQ ID NO: 152354 - DNA, 830 bp, Homo sapiens
  Payload ID: 9967
  Gene Symbol: MDC1
  Gene Name: mediator of DNA-damage checkpoint 1
  ENST ID: ENST00000552474
  CDS Start-End: 198-626
acacagggagacgtcgggccacaagggaacccactgaggtggggaccaaagatggtggctctttgaattggagccaagcgtggtgggcacccgctgagttggcctgtcataaagacggagttgacactttatccatggggcatcctactttccctacctgtcaacagtttccctctagagtggcatattttcagatcatggaggacacccaggctattgactgggatgttgaagaagaggaggagacagagcaatccagtgaatccttgaggtgtaacgtggagccagtagggcggctacatatctttagtggtgcccatggaccagaaaaagatttcccactacacctcgggaagaatgtggtaggccgaatgcctgactgctctgtggccctgccctttccatctatctccaaacaacatgcagagattgaaatcttagcctgggacaaggcacctatcctccgagactgtgggagccttaatgtaccatcgcctggatgtctctctgccctttgtctcccggggccctctgacagtagaagagacacccagagtacagggagaaactcaaccccagaggcttctgttggcggactcggaggaggaagtagattttctttctgaaaggcgtatggtaaaaaaatcaaggaccacatcttcctctgtgatagttccagagagtgatgaagaggggcattccccggtcctgggcggccttgggccgccttttgccttcaatttgaacagtgacacagatgtggaagaaggtcagcaaccagccacagaggaggcctcctcagctgccagaagaggtgccactgtagaggc

SEQ ID NO: 152355 - DNA, 830 bp, Homo sapiens; identical to SEQ ID NO: 152354
  Payload ID: 9967
  Gene Symbol: MDC1
  Gene Name: mediator of DNA-damage checkpoint 1
  ENST ID: ENST00000547681
  CDS Start-End: 198-626

SEQ ID NO: 152356 - DNA, 830 bp, Homo sapiens; identical to SEQ ID NO: 152354
  Payload ID: 9967
  Gene Symbol: MDC1
  Gene Name: mediator of DNA-damage checkpoint 1
  ENST ID: ENST00000547353
  CDS Start-End: 198-626

SEQ ID NO: 152357 - DNA, 830 bp, Homo sapiens; identical to SEQ ID NO: 152354
  Payload ID: 9967
  Gene Symbol: MDC1
  Gene Name: mediator of DNA-damage checkpoint 1
  ENST ID: ENST00000550688
  CDS Start-End: 198-626

SEQ ID NO: 152358 - DNA, 830 bp, Homo sapiens; identical to SEQ ID NO: 152354
  Payload ID: 9967
  Gene Symbol: MDC1
  Gene Name: mediator of DNA-damage checkpoint 1
  ENST ID: ENST00000546539
  CDS Start-End: 198-626

SEQ ID NO: 152359 - DNA, 830 bp, Homo sapiens; identical to SEQ ID NO: 152354
  Payload ID: 9967
  Gene Symbol: MDC1
  Gene Name: mediator of DNA-damage checkpoint 1
  ENST ID: ENST00000552522
  CDS Start-End: 198-626

SEQ ID NO: 152360 - DNA, 830 bp, Homo sapiens
  Payload ID: 9967
  Gene Symbol: MDC1
  Gene Name: mediator of DNA-damage checkpoint 1
  ENST ID: ENST00000550500
  CDS Start-End: 198-626
acacagggagacgtcgggccacaagggaacccactgaggtggggaccaaagatggtggctctttgaattggagccaagcgtggtgggcacccgctgagttggcctgtcataaagacggagttgacactttatccatggggcatcctactttccctacctgtcaacaatttccctctagagtggcatattttcagatcatggaggacacccaggctattgactgggatgttgaagaagaggaggagacagagcaatccagtgaatccttgaggtgtaacgtggagccagtagggcggctacatatctttagtggtgcccatggaccagaaaaagatttcccactacacctcgggaagaatgtggtaggccgaatgcctgactgctctgtggccctgccctttccatctatctccaaacaacatgcagagattgaaatcttagcctgggacaaggcacctatcctccgagactgtgggagccttaatgtaccatcgcctggatgtctctctgccctttgtctcccggggccctctgacagtagaagagacacccagagtacagggagaaactcaaccccagaggcttctgttggcggactcggaggaggaagtagattttctttctgaaaggcgtatggtaaaaaaatcaaggaccacatcttcctctgtgatagttccagagagtgatgaagaggggcattccccggtcctgggcggccttgggccgccttttgccttcaatttgaacagtgacacagatgtggaagaaggtcagcaaccagccacagaggaggcctcctcagctgccagaagaggtgccactgtagaggc

SEQ ID NO: 152361 - DNA, 830 bp, Homo sapiens; identical to SEQ ID NO: 152354
  Payload ID: 9967
  Gene Symbol: MDC1
  Gene Name: mediator of DNA-damage checkpoint 1
  ENST ID: ENST00000613547
  CDS Start-End: 198-626

SEQ ID NO: 152362 - DNA, 3499 bp, Homo sapiens
  Payload ID: 9968
  Gene Symbol: MEFV
  Gene Name: Mediterranean fever
  Uniprot ID: O15553
  ENST ID: ENST00000219596
  CDS Start-End: 41-2386
gaagccagacagctggctcgagcctctcctgctcagcaccatggctaagacccctagtgaccatctgctgtccaccctggaggagctggtgccctatgacttcgagaagttcaagttcaagctgcagaacaccagtgtgcagaaggagcactccaggatcccccggagccagatccagagagccaggccggtgaagatggccactctgctggtcacctactatggggaagagtacgccgtgcagctcaccctgcaggtcctgcgggccatcaaccagcgcctgctggccgaggagctccacagggcagccattcaggaatattccacacaagaaaacggcacagatgattccgcagcgtccagctccctgggggagaacaagcccaggagcctgaagactccagaccaccccgaggggaacgaggggaacggccctcggccgtacgggggcggagctgccagcctgcggtgcagccagcccgaggccgggagggggctgtcgaggaagcccctgagcaaacgcagagagaaggcctcggagggcctggacgcgcagggcaagcctcggacccggagcccggccctgccgggcgggagaagccccggcccctgcagggcgctagaggggggccaggccgaggtccggctgcgcagaaacgccagctccgcggggaggctgcaggggctggcggggggcgccccggggcagaaggagtgcaggcccttcgaagtgtacctgccctcgggaaagatgcgacctagaagccttgaggtcaccatttctacaggggagaaggcgcccgcaaatccagaaattctcctgactctagaggaaaagacagctgcgaatctggactcggcaacagaaccccgggcaaggcccactccggatggaggggcatctgcggacctgaaggaaggccctggaaatccagaacattcggtcaccggaaggccaccagacacggctgcgagtccccgctgccacgcccaggaaggagacccagttgacggtacctgtgtgcgtgattcctgcagcttccccgaggcagtttctgggcacccccaggcctcaggcagccgctcacctggctgcccccggtgccaggactcccatgaaaggaagagcccgggaagcctaagcccccagcccctgccacagtgtaagcgccacctgaagcaggtccagctgctcttctgtgaggatcacgatgagcccatctgcctcatctgcagtctgagtcaggagcaccaaggccaccgggtgcgccccattgaggaggtcgccctggaacacaagaagaaaattcagaagcagctggagcatctgaagaagctgagaaaatcaggggaggagcagcgatcctatggggaggagaaggcagtgagctttctgaaacaaactgaagcgctgaagcagcgggtgcagaggaagctggagcaggtgtactacttcctggagcagcaagagcatttctttgtggcctcactggaggacgtgggccagatggttgggcagatcaggaaggcatatgacacccgcgtatcccaggacatcgccctgctcgatgcgctgattggggaactggaggccaaggagtgccagtcagaatgggaacttctgcaggacattggagacatcttgcacagggctaagacagtgcctgtccctgaaaagtggaccactcctcaagagataaaacaaaagatccaactcctccaccagaagtcagagtttgtggagaagagcacaaagtacttctcagaaaccctgcgttcagaaatggaaatgttcaatgttccggagctgattggcgctcaggcacatgctgttaatgtgattctggatgcagaaaccgcttaccccaacctcatcttctctgatgatctgaagagtgttagacttggaaacaagtgggagaggctgcctgatggcccgcaaagatttgacagctgtatcattgttctgggctctccgagtttcctctctggccgccgttactgggaggtggaggttggagacaagacagcatggatcctgggagcctgcaagacatccataagcaggaaagggaacatgactctgtcgccagagaatggctactgggtggtgataatgatgaaggaaaatgagtaccaggcgtccagcgttcccccgacccgcctgctaataaaggagcctcccaagcgtgtgggcatcttcgtggactacagagttggaagcatctccttttacaatgtgacagccagatcccacatctatacattcgccagctgctctttctctgggccccttcaacctatcttcagccctgggacacgtgatggagggaagaacacagctcctctgactatctgtccagtgggtggtcaggggcctgactgaatgcccaacactgcatctctcttcctgcttctggccttgtatcttgcattcacactcaatagtcacggaatgccgactaggtgctagctgctatgggaaatgcaaaaataacaaaatagttactgtgcccacggagcctacccgattatagcagaggtaagttaggaacgaacatgttagtcaatccgggtgaagacatgtactgatgacacaccatggatttcagaggaggaagtacggagtcgttgcataatccgcccctggtgggtggcactctcaggtgctcctgaacagaagatttggccctcattttccctcagaaccccacggcaaggatatatgtccccttgttctctctgcttctgtcttgaggatatgggaagcctagagaaacgcaagcagactggattgggatagaagtatttgtgtacctggattaatgaactatgattttttttttttttttttgagaccaaatcttgctctgtggcccaggctggagtgcagtggcacgatctcagctcactgcaacctccacctcccaggttcaagcgattctcctgcctcagcctcctgagcagctgggattacaggtgcgtgccaccacaccaggctggttttcttgtatttttagtagagacgggggtttcaccatgttagccaggctggtctcgaactcctgacctcaggtgatccacccgcctcagcctcccaaagtgctgggattacaggcatgagccactgtgcccggcctatgattcttttttttttttttttttgagacaaagttttgctcttgtcacccaggctggagtgcagtggtgcaatcttggctcgcaacctccgcctcccaggttcaagagattctcctgcctcagcctccgaagtagctgggattacaggcgcccgccaccatgcccggctaattttttgcatttttagtagacatgaggtttcatcatgttggccaggccggtctcaaactcctgacctcaggtgatgcacccacctcagcctcccaaagtgcagggattacaggcatgagccaccatgccgggccatgattcttaagagaattgactgggcctcatgaataaaaaaattagaaaatct

SEQ ID NO: 152363 - DNA, 2959 bp, Homo sapiens
  Payload ID: 9968
  Gene Symbol: MEFV
  Gene Name: Mediterranean fever
  ENST ID: ENST00000339854
  CDS Start-End: 41-1846
gaagccagacagctggctcgagcctctcctgctcagcaccatggctaagacccctagtgaccatctgctgtccaccctggaggagctggtgccctatgacttcgagaagttcaagttcaagctgcagaacaccagtgtgcagaaggagcactccaggatcccccggagccagatccagagagccaggccggtgaagatggccactctgctggtcacctactatggggaagagtacgccgtgcagctcaccctgcaggtcctgcgggccatcaaccagcgcctgctggccgaggagctccacagggcagccattcaggatatggggtcttgctatgttgcccaggttggtctcgaactcctgatctcaaacaatcctcccatctttgcctccgaaactgctgggattacaggaaggccaccagacacggctgcgagtccccgctgccacgcccaggaaggagacccagttgacggtacctgtgtgcgtgattcctgcagcttccccgaggcagtttctgggcacccccaggcctcaggcagccgctcacctggctgcccccggtgccaggactcccatgaaaggaagagcccgggaagcctaagcccccagcccctgccacagtgtaagcgccacctgaagcaggtccagctgctcttctgtgaggatcacgatgagcccatctgcctcatctgcagtctgagtcaggagcaccaaggccaccgggtgcgccccattgaggaggtcgccctggaacacaagaagaaaattcagaagcagctggagcatctgaagaagctgagaaaatcaggggaggagcagcgatcctatggggaggagaaggcagtgagctttctgaaacaaactgaagcgctgaagcagcgggtgcagaggaagctggagcaggtgtactacttcctggagcagcaagagcatttctttgtggcctcactggaggacgtgggccagatggttgggcagatcaggaaggcatatgacacccgcgtatcccaggacatcgccctgctcgatgcgctgattggggaactggaggccaaggagtgccagtcagaatgggaacttctgcaggacattggagacatcttgcacagggctaagacagtgcctgtccctgaaaagtggaccactcctcaagagataaaacaaaagatccaactcctccaccagaagtcagagtttgtggagaagagcacaaagtacttctcagaaaccctgcgttcagaaatggaaatgttcaatgttccggagctgattggcgctcaggcacatgctgttaatgtgattctggatgcagaaaccgcttaccccaacctcatcttctctgatgatctgaagagtgttagacttggaaacaagtgggagaggctgcctgatggcccgcaaagatttgacagctgtatcattgttctgggctctccgagtttcctctctggccgccgttactgggaggtggaggttggagacaagacagcatggatcctgggagcctgcaagacatccataagcaggaaagggaacatgactctgtcgccagagaatggctactgggtggtgataatgatgaaggaaaatgagtaccaggcgtccagcgttcccccgacccgcctgctaataaaggagcctcccaagcgtgtgggcatcttcgtggactacagagttggaagcatctccttttacaatgtgacagccagatcccacatctatacattcgccagctgctctttctctgggccccttcaacctatcttcagccctgggacacgtgatggagggaagaacacagctcctctgactatctgtccagtgggtggtcaggggcctgactgaatgcccaacactgcatctctcttcctgcttctggccttgtatcttgcattcacactcaatagtcacggaatgccgactaggtgctagctgctatgggaaatgcaaaaataacaaaatagttactgtgcccacggagcctacccgattatagcagaggtaagttaggaacgaacatgttagtcaatccgggtgaagacatgtactgatgacacaccatggatttcagaggaggaagtacggagtcgttgcataatccgcccctggtgggtggcactctcaggtgctcctgaacagaagatttggccctcattttccctcagaaccccacggcaaggatatatgtccccttgttctctctgcttctgtcttgaggatatgggaagcctagagaaacgcaagcagactggattgggatagaagtatttgtgtacctggattaatgaactatgattttttttttttttttttgagaccaaatcttgctctgtggcccaggctggagtgcagtggcacgatctcagctcactgcaacctccacctcccaggttcaagcgattctcctgcctcagcctcctgagcagctgggattacaggtgcgtgccaccacaccaggctggttttcttgtatttttagtagagacgggggtttcaccatgttagccaggctggtctcgaactcctgacctcaggtgatccacccgcctcagcctcccaaagtgctgggattacaggcatgagccactgtgcccggcctatgattcttttttttttttttttttgagacaaagttttgctcttgtcacccaggctggagtgcagtggtgcaatcttggctcgcaacctccgcctcccaggttcaagagattctcctgcctcagcctccgaagtagctgggattacaggcgcccgccaccatgcccggctaattttttgcatttttagtagacatgaggtttcatcatgttggccaggccggtctcaaactcctgacctcaggtgatgcacccacctcagcctcccaaagtgcagggattacaggcatgagccaccatgccgggccatgattcttaagagaattgactgggcctcatgaataaaaaaattagaaaatct

SEQ ID NO: 152364 - DNA, 3597 bp, Homo sapiens
  Payload ID: 9968
  Gene Symbol: MEFV
  Gene Name: Mediterranean fever
  ENST ID: ENST00000538326
  CDS Start-End: 41-1513
gaagccagacagctggctcgagcctctcctgctcagcaccatggctaagacccctagtgaccatctgctgtccaccctggaggagctggtgccctatgacttcgagaagttcaagttcaagctgcagaacaccagtgtgcagaaggagcactccaggatcccccggagccagatccagagagccaggccggtgaagatggccactctgctggtcacctactatggggaagagtacgccgtgcagctcaccctgcaggtcctgcgggccatcaaccagcgcctgctggccgaggagctccacagggcagccattcaggaatattccacacaagaaaacggcacagatgattccgcagcgtccagctccctgggggagaacaagcccaggagcctgaagactccagaccaccccgaggggaacgaggggaacggccctcggccgtacgggggcggagctgccagcctgcggtgcagccagcccgaggccgggagggggctgtcgaggaagcccctgagcaaacgcagagagaaggcctcggagggcctggacgcgcagggcaagcctcggacccggagcccggccctgccgggcgggagaagccccggcccctgcagggcgctagaggggggccaggccgaggtccggctgcgcagaaacgccagctccgcggggaggctgcaggggctggcggggggcgccccggggcagaaggagtgcaggcccttcgaagtgtacctgccctcgggaaagatgcgacctagaagccttgaggtcaccatttctacaggggagaaggcgcccgcaaatccagaaattctcctgactctagaggaaaagacagctgcgaatctggactcggcaacagaaccccgggcaaggcccactccggatggaggggcatctgcggacctgaaggaaggccctggaaatccagaacattcggtcaccggaaggccaccagacacggctgcgagtccccgctgccacgcccaggaaggagacccagttgacggtacctgtgtgcgtgattcctgcagcttccccgaggcagtttctgggcacccccaggcctcaggcagccgctcacctggctgcccccggtgccaggactcccatgaaaggaagagcccgggaagcctaagcccccagcccctgccacagtgtaagcgccacctgaagcaggtccagctgctcttctgtgaggatcacgatgagcccatctgcctcatctgcagtctgagtcaggagcaccaaggccaccgggtgcgccccattgaggaggtcgccctggaacacaagaagaaaattcagaagcagctggagcatctgaagaagctgagaaaatcaggggaggagcagcgatcctatggggaggagaaggcagtgagctttctggttgtagtgcagtggtgtgatcttggctcactgcaacctctgcctcccgggttcaagcgattctcctgcctcagcctcctgagtagctgggattatagaaacaaactgaagcgctgaagcagcgggtgcagaggaagctggagcaggtgtactacttcctggagcagcaagagcatttctttgtggcctcactggaggacgtgggccagatggttgggcagatcaggaaggcatatgacacccgcgtatcccaggacatcgccctgctcgatgcgctgattggggaactggaggccaaggagtgccagtcagaatgggaacttctgcaggacattggagacatcttgcacagggctaagacagtgcctgtccctgaaaagtggaccactcctcaagagataaaacaaaagatccaactcctccaccagaagtcagagtttgtggagaagagcacaaagtacttctcagaaaccctgcgttcagaaatggaaatgttcaatgttccggagctgattggcgctcaggcacatgctgttaatgtgattctggatgcagaaaccgcttaccccaacctcatcttctctgatgatctgaagagtgttagacttggaaacaagtgggagaggctgcctgatggcccgcaaagatttgacagctgtatcattgttctgggctctccgagtttcctctctggccgccgttactgggaggtggaggttggagacaagacagcatggatcctgggagcctgcaagacatccataagcaggaaagggaacatgactctgtcgccagagaatggctactgggtggtgataatgatgaaggaaaatgagtaccaggcgtccagcgttcccccgacccgcctgctaataaaggagcctcccaagcgtgtgggcatcttcgtggactacagagttggaagcatctccttttacaatgtgacagccagatcccacatctatacattcgccagctgctctttctctgggccccttcaacctatcttcagccctgggacacgtgatggagggaagaacacagctcctctgactatctgtccagtgggtggtcaggggcctgactgaatgcccaacactgcatctctcttcctgcttctggccttgtatcttgcattcacactcaatagtcacggaatgccgactaggtgctagctgctatgggaaatgcaaaaataacaaaatagttactgtgcccacggagcctacccgattatagcagaggtaagttaggaacgaacatgttagtcaatccgggtgaagacatgtactgatgacacaccatggatttcagaggaggaagtacggagtcgttgcataatccgcccctggtgggtggcactctcaggtgctcctgaacagaagatttggccctcattttccctcagaaccccacggcaaggatatatgtccccttgttctctctgcttctgtcttgaggatatgggaagcctagagaaacgcaagcagactggattgggatagaagtatttgtgtacctggattaatgaactatgattttttttttttttttttgagaccaaatcttgctctgtggcccaggctggagtgcagtggcacgatctcagctcactgcaacctccacctcccaggttcaagcgattctcctgcctcagcctcctgagcagctgggattacaggtgcgtgccaccacaccaggctggttttcttgtatttttagtagagacgggggtttcaccatgttagccaggctggtctcgaactcctgacctcaggtgatccacccgcctcagcctcccaaagtgctgggattacaggcatgagccactgtgcccggcctatgattcttttttttttttttttttgagacaaagttttgctcttgtcacccaggctggagtgcagtggtgcaatcttggctcgcaacctccgcctcccaggttcaagagattctcctgcctcagcctccgaagtagctgggattacaggcgcccgccaccatgcccggctaattttttgcatttttagtagacatgaggtttcatcatgttggccaggccggtctcaaactcctgacctcaggtgatgcacccacctcagcctcccaaagtgcagggattacaggcatgagccaccatgccgggccatgattcttaagagaattgactgggcctcatgaataaaaaaattagaaaatct

SEQ ID NO: 152365 - DNA, 3617 bp, Homo sapiens
  Payload ID: 9968
  Gene Symbol: MEFV
  Gene Name: Mediterranean fever
  ENST ID: ENST00000537682
  CDS Start-End: 41-1882
gaagccagacagctggctcgagcctctcctgctcagcaccatggctaagacccctagtgaccatctgctgtccaccctggaggagctggtgccctatgacttcgagaagttcaagttcaagctgcagaacaccagtgtgcagaaggagcactccaggatcccccggagccagatccagagagccaggccggtgaagatggccactctgctggtcacctactatggggaagagtacgccgtgcagctcaccctgcaggtcctgcgggccatcaaccagcgcctgctggccgaggagctccacagggcagccattcaggaatattccacacaagaaaacggcacagatgattccgcagcgtccagctccctgggggagaacaagcccaggagcctgaagactccagaccaccccgaggggaacgaggggaacggccctcggccgtacgggggcggagctgccagcctgcggtgcagccagcccgaggccgggagggggctgtcgaggaagcccctgagcaaacgcagagagaaggcctcggagggcctggacgcgcagggcaagcctcggacccggagcccggccctgccgggcgggagaagccccggcccctgcagggcgctagaggggggccaggccgaggtccggctgcgcagaaacgccagctccgcggggaggctgcaggggctggcggggggcgccccggggcagaaggagtgcaggcccttcgaagtgtacctgccctcgggaaagatgcgacctagaagccttgaggtcaccatttctacaggggagaaggcgcccgcaaatccagaaattctcctgactctagaggaaaagacagctgcgaatctggactcggcaacagaaccccgggcaaggcccactccggatggaggggcatctgcggacctgaaggaaggccctggaaatccagaacattcggtcaccggaaggccaccagacacggctgcgagtccccgctgccacgcccaggaaggagacccagttgacggtacctgtgtgcgtgattcctgcagcttccccgaggcagtttctgggcacccccaggcctcaggcagccgctcacctggctgcccccggtgccaggactcccatgaaaggaagagcccgggaagcctaagcccccagcccctgccacagtgtaagcgccacctgaagcaggtccagctgctcttctgtgaggatcacgatgagcccatctgcctcatctgcagtctgagtcaggagcaccaaggccaccgggtgcgccccattgaggaggtcgccctggaacacaagaagaaaattcagaagcagctggagcatctgaagaagctgagaaaatcaggggaggagcagcgatcctatggggaggagaaggcagtgagctttctgaaacaaactgaagcgctgaagcagcgggtgcagaggaagctggagcaggtgtactacttcctggagcagcaagagcatttctttgtggcctcactggaggacgtgggccagatggttgggcagatcaggaaggcatatgacacccgcgtatcccaggacatcgccctgctcgatgcgctgattggggaactggaggccaaggagtgccagtcagaatgggaacttctgcaggacattggagacatcttgcacagggctaagacagtgcctgtccctgaaaagtggaccactcctcaagagataaaacaaaagatccaactcctccaccagaagtcagagtttgtggagaagagcacaaagtacttctcagaaaccctgcgttcagaaatggaaatgttcaatggtgagtccagcggtaatggtgtgtgctggcctggggttgttgcagtgttcccttgtgctgttgacttgaggggccctatttagaagacaaaaaaaaaaaccaaacacctggagcaaagttccggagctgattggcgctcaggcacatgctgttaatgtgattctggatgcagaaaccgcttaccccaacctcatcttctctgatgatctgaagagtgttagacttggaaacaagtgggagaggctgcctgatggcccgcaaagatttgacagctgtatcattgttctgggctctccgagtttcctctctggccgccgttactgggaggtggaggttggagacaagacagcatggatcctgggagcctgcaagacatccataagcaggaaagggaacatgactctgtcgccagagaatggctactgggtggtgataatgatgaaggaaaatgagtaccaggcgtccagcgttcccccgacccgcctgctaataaaggagcctcccaagcgtgtgggcatcttcgtggactacagagttggaagcatctccttttacaatgtgacagccagatcccacatctatacattcgccagctgctctttctctgggccccttcaacctatcttcagccctgggacacgtgatggagggaagaacacagctcctctgactatctgtccagtgggtggtcaggggcctgactgaatgcccaacactgcatctctcttcctgcttctggccttgtatcttgcattcacactcaatagtcacggaatgccgactaggtgctagctgctatgggaaatgcaaaaataacaaaatagttactgtgcccacggagcctacccgattatagcagaggtaagttaggaacgaacatgttagtcaatccgggtgaagacatgtactgatgacacaccatggatttcagaggaggaagtacggagtcgttgcataatccgcccctggtgggtggcactctcaggtgctcctgaacagaagatttggccctcattttccctcagaaccccacggcaaggatatatgtccccttgttctctctgcttctgtcttgaggatatgggaagcctagagaaacgcaagcagactggattgggatagaagtatttgtgtacctggattaatgaactatgattttttttttttttttttgagaccaaatcttgctctgtggcccaggctggagtgcagtggcacgatctcagctcactgcaacctccacctcccaggttcaagcgattctcctgcctcagcctcctgagcagctgggattacaggtgcgtgccaccacaccaggctggttttcttgtatttttagtagagacgggggtttcaccatgttagccaggctggtctcgaactcctgacctcaggtgatccacccgcctcagcctcccaaagtgctgggattacaggcatgagccactgtgcccggcctatgattcttttttttttttttttttgagacaaagttttgctcttgtcacccaggctggagtgcagtggtgcaatcttggctcgcaacctccgcctcccaggttcaagagattctcctgcctcagcctccgaagtagctgggattacaggcgcccgccaccatgcccggctaattttttgcatttttagtagacatgaggtttcatcatgttggccaggccggtctcaaactcctgacctcaggtgatgcacccacctcagcctcccaaagtgcagggattacaggcatgagccaccatgccgggccatgattcttaagagaattgactgggcctcatgaataaaaaaattagaaaatct

SEQ ID NO: 152366 - DNA, 1888 bp, Homo sapiens
  Payload ID: 9968
  Gene Symbol: MEFV
  Gene Name: Mediterranean fever
  Uniprot ID: O15553
  ENST ID: ENST00000541159
  CDS Start-End: 1-1338
atggctaagacccctagtgaccatctgctgtccaccctggaggagctggtgccctatgacttcgagaagttcaagttcaagctgcagaacaccagtgtgcagaaggagcactccaggatcccccggagccagatccagagagccaggccggtgaagatggccactctgctggtcacctactatggggaagagtacgccgtgcagctcaccctgcaggtcctgcgggccatcaaccagcgcctgctggccgaggagctccacagggcagccattcagggaaggccaccagacacggctgcgagtccccgctgccacgcccaggaaggagacccagttgacggtacctgtgtgcgtgattcctgcagcttccccgaggcagtttctgggcacccccaggcctcaggcagccgctcacctggctgcccccggtgccaggactcccatgaaaggaagagcccgggaagcctaagcccccagcccctgccacagtgtaagcgccacctgaagcaggtccagctgctcttctgtgaggatcacgatgagcccatctgcctcatctgcagtctgagtcaggagcaccaaggccaccgggtgcgccccattgaggaggtcgccctggaacacaagaagaaaattcagaagcagctggagcatctgaagaagctgagaaaatcaggggaggagcagcgatcctatggggaggagaaggcagtgagctttctgaaacaaactgaagcgctgaagcagcgggtgcagaggaagctggagcaggtgtactacttcctggagcagcaagagcatttctttgtggcctcactggaggacgtgggccagatggttgggcagatcaggaaggcatatgacacccgcgtatcccaggacatcgccctgctcgatgcgctgattggggaactggaggccaaggagtgccagtcagaatgggaacttctgcaggacattggagacatcttgcacagggctaagacagtgcctgtccctgaaaagtggaccactcctcaagagataaaacaaaagatccaactcctccaccagaagtcagagtttgtggagaagagcacaaagtacttctcagaaaccctgcgttcagaaatggaaatgttcaatgaccacagtccccaacatggcctgggttcctgggaggaacgggattatacccaacatagcatgcagggccctaagcagggggttccttgtctttccttgttgtcaggacagtgtaatttagcccctcttaatgctaatgctcaggatttttttccctatctgatttttctccgtagttccggagctgattggcgctcaggcacatgctgttaatgtgattctggatgcagaaaccgcttaccccaacctcatcttctctgatgatctgaagagtgttagacttggaaacaagtgggagaggctgcctgatggcccgcaaagatttgacagctgtatcattgttctgggctctccgagtttcctctctggccgccgttactgggaggtggaggttggagacaagacagcatggatcctgggagcctgcaagacatccataagcaggaaagggaacatgactctgtcgccagagaatggctactgggtggtgataatgatgaaggaaaatgagtaccaggcgtccagcgttcccccgacccgcctgctaataaaggagcctcccaagcgtgtgggcatcttcgtggactacagagttggaagcatctccttttacaatgtgacagccagatcccacatctatacattcgccagctgctctttctctgggccccttcaacctatcttcagccctgggacacgtgatggagggaagaacacagctcctctgactatctgtccagtgggtggtcaggggcctgactga

SEQ ID NO: 152367 - DNA, 2984 bp, Homo sapiens
  Payload ID: 9968
  Gene Symbol: MEFV
  Gene Name: Mediterranean fever
  ENST ID: ENST00000536980
  CDS Start-End: 41-1249
gaagccagacagctggctcgagcctctcctgctcagcaccatggctaagacccctagtgaccatctgctgtccaccctggaggagctggtgccctatgacttcgagaagttcaagttcaagctgcagaacaccagtgtgcagaaggagcactccaggatcccccggagccagatccagagagccaggccggtgaagatggccactctgctggtcacctactatggggaagagtacgccgtgcagctcaccctgcaggtcctgcgggccatcaaccagcgcctgctggccgaggagctccacagggcagccattcagggaaggccaccagacacggctgcgagtccccgctgccacgcccaggaaggagacccagttgacggtacctgtgtgcgtgattcctgcagcttccccgaggcagtttctgggcacccccaggcctcaggcagccgctcacctggctgcccccggtgccaggactcccatgaaaggaagagcccgggaagcctaagcccccagcccctgccacagtgtaagcgccacctgaagcaggtccagctgctcttctgtgaggatcacgatgagcccatctgcctcatctgcagtctgagtcaggagcaccaaggccaccgggtgcgccccattgaggaggtcgccctggaacacaagaagaaaattcagaagcagctggagcatctgaagaagctgagaaaatcaggggaggagcagcgatcctatggggaggagaaggcagtgagctttctgaaacaaactgaagcgctgaagcagcgggtgcagaggaagctggagcaggtgtactacttcctggagcagcaagagcatttctttgtggcctcactggaggacgtgggccagatggttgggcagatcaggaaggcatatgacacccgcgtatcccaggacatcgccctgctcgatgcgctgattggggaactggaggccaaggagtgccagtcagaatgggaacttctgcaggacattggagacatcttgcacagggctaagacagtgcctgtccctgaaaagtggaccactcctcaagagataaaacaaaagatccaactcctccaccagaagtcagagtttgtggagaagagcacaaagtacttctcagaaaccctgcgttcagaaatggaaatgttcaatggtgagtccagcggtaatggtgtgtgctggcctggggttgttgcagtgttcccttgtgctgttgacttgaggggccctatttagaagacaaaaaaaaaaaccaaacacctggagcaaagttccggagctgattggcgctcaggcacatgctgttaatgtgattctggatgcagaaaccgcttaccccaacctcatcttctctgatgatctgaagagtgttagacttggaaacaagtgggagaggctgcctgatggcccgcaaagatttgacagctgtatcattgttctgggctctccgagtttcctctctggccgccgttactgggaggtggaggttggagacaagacagcatggatcctgggagcctgcaagacatccataagcaggaaagggaacatgactctgtcgccagagaatggctactgggtggtgataatgatgaaggaaaatgagtaccaggcgtccagcgttcccccgacccgcctgctaataaaggagcctcccaagcgtgtgggcatcttcgtggactacagagttggaagcatctccttttacaatgtgacagccagatcccacatctatacattcgccagctgctctttctctgggccccttcaacctatcttcagccctgggacacgtgatggagggaagaacacagctcctctgactatctgtccagtgggtggtcaggggcctgactgaatgcccaacactgcatctctcttcctgcttctggccttgtatcttgcattcacactcaatagtcacggaatgccgactaggtgctagctgctatgggaaatgcaaaaataacaaaatagttactgtgcccacggagcctacccgattatagcagaggtaagttaggaacgaacatgttagtcaatccgggtgaagacatgtactgatgacacaccatggatttcagaggaggaagtacggagtcgttgcataatccgcccctggtgggtggcactctcaggtgctcctgaacagaagatttggccctcattttccctcagaaccccacggcaaggatatatgtccccttgttctctctgcttctgtcttgaggatatgggaagcctagagaaacgcaagcagactggattgggatagaagtatttgtgtacctggattaatgaactatgattttttttttttttttttgagaccaaatcttgctctgtggcccaggctggagtgcagtggcacgatctcagctcactgcaacctccacctcccaggttcaagcgattctcctgcctcagcctcctgagcagctgggattacaggtgcgtgccaccacaccaggctggttttcttgtatttttagtagagacgggggtttcaccatgttagccaggctggtctcgaactcctgacctcaggtgatccacccgcctcagcctcccaaagtgctgggattacaggcatgagccactgtgcccggcctatgattcttttttttttttttttttgagacaaagttttgctcttgtcacccaggctggagtgcagtggtgcaatcttggctcgcaacctccgcctcccaggttcaagagattctcctgcctcagcctccgaagtagctgggattacaggcgcccgccaccatgcccggctaattttttgcatttttagtagacatgaggtttcatcatgttggccaggccggtctcaaactcctgacctcaggtgatgcacccacctcagcctcccaaagtgcagggattacaggcatgagccaccatgccgggccatgattcttaagagaattgactgggcctcatgaataaaaaaattagaaaatct

SEQ ID NO: 152368 - DNA, 1267 bp, Homo sapiens
  Payload ID: 9968
  Gene Symbol: MEFV
  Gene Name: Mediterranean fever
  ENST ID: ENST00000539145
  CDS Start-End: 1-288
atggctaagacccctagtgaccatctgctgtccaccctggaggagctggtgccctatgacttcgagaagttcaagttcaagctgcagaacaccagtgtgcagaaggagcactccaggatcccccggagccagatccagagagccaggccggtgaagatggccactctgctggtcacctactatggggaagagtacgccgtgcagctcaccctgcaggtcctgcgggccatcaaccagcgcctgctggccgaggagctccacagggcagccattcaggaaacaaactgaagcgctgaagcagcgggtgcagaggaagctggagcaggtgtactacttcctggagcagcaagagcatttctttgtggcctcactggaggacgtgggccagatggttgggcagatcaggaaggcatatgacacccgcgtatcccaggacatcgccctgctcgatgcgctgattggggaactggaggccaaggagtgccagtcagaatgggaacttctgcaggacattggagacatcttgcacagggctaagacagtgcctgtccctgaaaagtggaccactcctcaagagataaaacaaaagatccaactcctccaccagaagtcagagtttgtggagaagagcacaaagtacttctcagaaaccctgcgttcagaaatggaaatgttcaatgttccggagctgattggcgctcaggcacatgctgttaatgtgattctggatgcagaaaccgcttaccccaacctcatcttctctgatgatctgaagagtgttagacttggaaacaagtgggagaggctgcctgatggcccgcaaagatttgacagctgtatcattgttctgggctctccgagtttcctctctggccgccgttactgggaggtggaggttggagacaagacagcatggatcctgggagcctgcaagacatccataagcaggaaagggaacatgactctgtcgccagagaatggctactgggtggtgataatgatgaaggaaaatgagtaccaggcgtccagcgttcccccgacccgcctgctaataaaggagcctcccaagcgtgtgggcatcttcgtggactacagagttggaagcatctccttttacaatgtgacagccagatcccacatctatacattcgccagctgctctttctctgggccccttcaacctatcttcagccctgggacacgtgatggagggaagaacacagctcctctgactatctgtccagtgggtggtcaggggcctgactga

SEQ ID NO: 152369 - DNA, 3710 bp, Homo sapiens
  Payload ID: 9968
  Gene Symbol: MEFV
  Gene Name: Mediterranean fever
  ENST ID: ENST00000542898
  CDS Start-End: 41-1975
gaagccagacagctggctcgagcctctcctgctcagcaccatggctaagacccctagtgaccatctgctgtccaccctggaggagctggtgccctatgacttcgagaagttcaagttcaagctgcagaacaccagtgtgcagaaggagcactccaggatcccccggagccagatccagagagccaggccggtgaagatggccactctgctggtcacctactatggggaagagtacgccgtgcagctcaccctgcaggtcctgcgggccatcaaccagcgcctgctggccgaggagctccacagggcagccattcaggaatattccacacaagaaaacggcacagatgattccgcagcgtccagctccctgggggagaacaagcccaggagcctgaagactccagaccaccccgaggggaacgaggggaacggccctcggccgtacgggggcggagctgccagcctgcggtgcagccagcccgaggccgggagggggctgtcgaggaagcccctgagcaaacgcagagagaaggcctcggagggcctggacgcgcagggcaagcctcggacccggagcccggccctgccgggcgggagaagccccggcccctgcagggcgctagaggggggccaggccgaggtccggctgcgcagaaacgccagctccgcggggaggctgcaggggctggcggggggcgccccggggcagaaggagtgcaggcccttcgaagtgtacctgccctcgggaaagatgcgacctagaagccttgaggtcaccatttctacaggggagaaggcgcccgcaaatccagaaattctcctgactctagaggaaaagacagctgcgaatctggactcggcaacagaaccccgggcaaggcccactccggatggaggggcatctgcggacctgaaggaaggccctggaaatccagaacattcggtcaccgatatggggtcttgctatgttgcccaggttggtctcgaactcctgatctcaaacaatcctcccatctttgcctccgaaactgctgggattacaggaaggccaccagacacggctgcgagtccccgctgccacgcccaggaaggagacccagttgacggtacctgtgtgcgtgattcctgcagcttccccgaggcagtttctgggcacccccaggcctcaggcagccgctcacctggctgcccccggtgccaggactcccatgaaaggaagagcccgggaagcctaagcccccagcccctgccacagtgtaagcgccacctgaagcaggtccagctgctcttctgtgaggatcacgatgagcccatctgcctcatctgcagtctgagtcaggagcaccaaggccaccgggtgcgccccattgaggaggtcgccctggaacacaagaagaaaattcagaagcagctggagcatctgaagaagctgagaaaatcaggggaggagcagcgatcctatggggaggagaaggcagtgagctttctgaaacaaactgaagcgctgaagcagcgggtgcagaggaagctggagcaggtgtactacttcctggagcagcaagagcatttctttgtggcctcactggaggacgtgggccagatggttgggcagatcaggaaggcatatgacacccgcgtatcccaggacatcgccctgctcgatgcgctgattggggaactggaggccaaggagtgccagtcagaatgggaacttctgcaggacattggagacatcttgcacagggctaagacagtgcctgtccctgaaaagtggaccactcctcaagagataaaacaaaagatccaactcctccaccagaagtcagagtttgtggagaagagcacaaagtacttctcagaaaccctgcgttcagaaatggaaatgttcaatggtgagtccagcggtaatggtgtgtgctggcctggggttgttgcagtgttcccttgtgctgttgacttgaggggccctatttagaagacaaaaaaaaaaaccaaacacctggagcaaagttccggagctgattggcgctcaggcacatgctgttaatgtgattctggatgcagaaaccgcttaccccaacctcatcttctctgatgatctgaagagtgttagacttggaaacaagtgggagaggctgcctgatggcccgcaaagatttgacagctgtatcattgttctgggctctccgagtttcctctctggccgccgttactgggaggtggaggttggagacaagacagcatggatcctgggagcctgcaagacatccataagcaggaaagggaacatgactctgtcgccagagaatggctactgggtggtgataatgatgaaggaaaatgagtaccaggcgtccagcgttcccccgacccgcctgctaataaaggagcctcccaagcgtgtgggcatcttcgtggactacagagttggaagcatctccttttacaatgtgacagccagatcccacatctatacattcgccagctgctctttctctgggccccttcaacctatcttcagccctgggacacgtgatggagggaagaacacagctcctctgactatctgtccagtgggtggtcaggggcctgactgaatgcccaacactgcatctctcttcctgcttctggccttgtatcttgcattcacactcaatagtcacggaatgccgactaggtgctagctgctatgggaaatgcaaaaataacaaaatagttactgtgcccacggagcctacccgattatagcagaggtaagttaggaacgaacatgttagtcaatccgggtgaagacatgtactgatgacacaccatggatttcagaggaggaagtacggagtcgttgcataatccgcccctggtgggtggcactctcaggtgctcctgaacagaagatttggccctcattttccctcagaaccccacggcaaggatatatgtccccttgttctctctgcttctgtcttgaggatatgggaagcctagagaaacgcaagcagactggattgggatagaagtatttgtgtacctggattaatgaactatgattttttttttttttttttgagaccaaatcttgctctgtggcccaggctggagtgcagtggcacgatctcagctcactgcaacctccacctcccaggttcaagcgattctcctgcctcagcctcctgagcagctgggattacaggtgcgtgccaccacaccaggctggttttcttgtatttttagtagagacgggggtttcaccatgttagccaggctggtctcgaactcctgacctcaggtgatccacccgcctcagcctcccaaagtgctgggattacaggcatgagccactgtgcccggcctatgattcttttttttttttttttttgagacaaagttttgctcttgtcacccaggctggagtgcagtggtgcaatcttggctcgcaacctccgcctcccaggttcaagagattctcctgcctcagcctccgaagtagctgggattacaggcgcccgccaccatgcccggctaattttttgcatttttagtagacatgaggtttcatcatgttggccaggccggtctcaaactcctgacctcaggtgatgcacccacctcagcctcccaaagtgcagggattacaggcatgagccaccatgccgggccatgattcttaagagaattgactgggcctcatgaataaaaaaattagaaaatct

SEQ ID NO: 152370 - DNA, 1713 bp, Homo sapiens
  Payload ID: 9968
  Gene Symbol: MEFV
  Gene Name: Mediterranean fever
  Uniprot ID: O15553
  ENST ID: ENST00000536379
  CDS Start-End: 1-1713
atggctaagacccctagtgaccatctgctgtccaccctggaggagctggtgccctatgacttcgagaagttcaagttcaagctgcagaacaccagtgtgcagaaggagcactccaggatcccccggagccagatccagagagccaggccggtgaagatggccactctgctggtcacctactatggggaagagtacgccgtgcagctcaccctgcaggtcctgcgggccatcaaccagcgcctgctggccgaggagctccacagggcagccattcagggaaggccaccagacacggctgcgagtccccgctgccacgcccaggaaggagacccagttgacggtacctgtgtgcgtgattcctgcagcttccccgaggcagtttctgggcacccccaggcctcaggcagccgctcacctggctgcccccggtgccaggactcccatgaaaggaagagcccgggaagcctaagcccccagcccctgccacagtgtaagcgccacctgaagcaggtccagctgctcttctgtgaggatcacgatgagcccatctgcctcatctgcagtctgagtcaggagcaccaaggccaccgggtgcgccccattgaggaggtcgccctggaacacaagaagaaaattcagaagcagctggagcatctgaagaagctgagaaaatcaggggaggagcagcgatcctatggggaggagaaggcagtgagctttctgaaacaaactgaagcgctgaagcagcgggtgcagaggaagctggagcaggtgtactacttcctggagcagcaagagcatttctttgtggcctcactggaggacgtgggccagatggttgggcagatcaggaaggcatatgacacccgcgtatcccaggacatcgccctgctcgatgcgctgattggggaactggaggccaaggagtgccagtcagaatgggaacttctgcaggacattggagacatcttgcacagggctaagacagtgcctgtccctgaaaagtggaccactcctcaagagataaaacaaaagatccaactcctccaccagaagtcagagtttgtggagaagagcacaaagtacttctcagaaaccctgcgttcagaaatggaaatgttcaatgttccggagctgattggcgctcaggcacatgctgttaatgtgattctggatgcagaaaccgcttaccccaacctcatcttctctgatgatctgaagagtgttagacttggaaacaagtgggagaggctgcctgatggcccgcaaagatttgacagctgtatcattgttctgggctctccgagtttcctctctggccgccgttactgggaggtggaggttggagacaagacagcatggatcctgggagcctgcaagacatccataagcaggaaagggaacatgactctgtcgccagagaatggctactgggtggtgataatgatgaaggaaaatgagtaccaggcgtccagcgttcccccgacccgcctgctaataaaggagcctcccaagcgtgtgggcatcttcgtggactacagagttggaagcatctccttttacaatgtgacagccagatcccacatctatacattcgccagctgctctttctctgggccccttcaacctatcttcagccctgggacacgtgatggagggaagaacacagctcctctgactatctgtccagtgggtggtcaggggcctgactga

SEQ ID NO: 152371 - DNA, 1751 bp, Homo sapiens
  Payload ID: 9968
  Gene Symbol: MEFV
  Gene Name: Mediterranean fever
  ENST ID: ENST00000570511
  CDS Start-End: 1-921
atggctaagacccctagtgaccatctgctgtccaccctggaggagctggtgccctatgacttcgagaagttcaagttcaagctgcagaacaccagtgtgcagaaggagcactccaggatcccccggagccagatccagagagccaggccggtgaagatggccactctgctggtcacctactatggggaagagtacgccgtgcagctcaccctgcaggtcctgcgggccatcaaccagcgcctgctggccgaggagctccacagggcagccattcaggaatattccacacaagaaaacggcacagatgattccgcagcgtccagctccctgggggagaacaagcccaggagcctgaagactccagaccaccccgaggggaacgaggggaacggccctcggccgtacgggggcggagctgccagcctgcggtgcagccagcccgaggccgggagggggctgtcgaggaagcccctgagcaaacgcagagagaaggcctcggagggcctggacgcgcagggcaagcctcggacccggagcccggccctgccgggcgggagaagccccggcccctgcagggcgctagaggggggccaggccgaggtccggctgcgcagaaacgccagctccgcggggaggctgcaggggctggcggggggcgccccggggcagaaggagtgcaggcccttcgaagtgtacctgccctcgggaaagatgcgacctagaagccttgaggtcaccatttctacaggggagaaggcgcccgcaaatccagaaattctcctgactctagaggaaaagacagctgcgaatctggactcggcaacagaaccccgggcaaggcccactccggatggaggggcatctgcggacctgaaggaaggccctggaaatccagaacattcggtcaccgaaacaaactgaagcgctgaagcagcgggtgcagaggaagctggagcaggtgtactacttcctggagcagcaagagcatttctttgtggcctcactggaggacgtgggccagatggttgggcagatcaggaaggcatatgacacccgcgtatcccaggacatcgccctgctcgatgcgctgattggggaactggaggccaaggagtgccagtcagaatgggaacttctgcaggacattggagacatcttgcacagttccggagctgattggcgctcaggcacatgctgttaatgtgattctggatgcagaaaccgcttaccccaacctcatcttctctgatgatctgaagagtgttagacttggaaacaagtgggagaggctgcctgatggcccgcaaagatttgacagctgtatcattgttctgggctctccgagtttcctctctggccgccgttactgggaggtggaggttggagacaagacagcatggatcctgggagcctgcaagacatccataagcaggaaagggaacatgactctgtcgccagagaatggctactgggtggtgataatgatgaaggaaaatgagtaccaggcgtccagcgttcccccgacccgcctgctaataaaggagcctcccaagcgtgtgggcatcttcgtggactacagagttggaagcatctccttttacaatgtgacagccagatcccacatctatacattcgccagctgctctttctctgggccccttcaacctatcttcagccctgggacacgtgatggagggaagaacacagctcctctgactatctgtccagtgggtggtcaggggcctgactga

SEQ ID NO: 152372 - DNA, 1118 bp, Homo sapiens
  Payload ID: 9968
  Gene Symbol: MEFV
  Gene Name: Mediterranean fever
  ENST ID: ENST00000574583
  CDS Start-End: 1-288
atggctaagacccctagtgaccatctgctgtccaccctggaggagctggtgccctatgacttcgagaagttcaagttcaagctgcagaacaccagtgtgcagaaggagcactccaggatcccccggagccagatccagagagccaggccggtgaagatggccactctgctggtcacctactatggggaagagtacgccgtgcagctcaccctgcaggtcctgcgggccatcaaccagcgcctgctggccgaggagctccacagggcagccattcaggaaacaaactgaagcgctgaagcagcgggtgcagaggaagctggagcaggtgtactacttcctggagcagcaagagcatttctttgtggcctcactggaggacgtgggccagatggttgggcagatcaggaaggcatatgacacccgcgtatcccaggacatcgccctgctcgatgcgctgattggggaactggaggccaaggagtgccagtcagaatgggaacttctgcaggacattggagacatcttgcacagttccggagctgattggcgctcaggcacatgctgttaatgtgattctggatgcagaaaccgcttaccccaacctcatcttctctgatgatctgaagagtgttagacttggaaacaagtgggagaggctgcctgatggcccgcaaagatttgacagctgtatcattgttctgggctctccgagtttcctctctggccgccgttactgggaggtggaggttggagacaagacagcatggatcctgggagcctgcaagacatccataagcaggaaagggaacatgactctgtcgccagagaatggctactgggtggtgataatgatgaaggaaaatgagtaccaggcgtccagcgttcccccgacccgcctgctaataaaggagcctcccaagcgtgtgggcatcttcgtggactacagagttggaagcatctccttttacaatgtgacagccagatcccacatctatacattcgccagctgctctttctctgggccccttcaacctatcttcagccctgggacacgtgatggagggaagaacacagctcctctgactatctgtccagtgggtggtcaggggcctgactga

SEQ ID NO: 152373 - DNA, 1151 bp, Homo sapiens
  Payload ID: 9968
  Gene Symbol: MEFV
  Gene Name: Mediterranean fever
  ENST ID: ENST00000576315
  CDS Start-End: 1-288
atggctaagacccctagtgaccatctgctgtccaccctggaggagctggtgccctatgacttcgagaagttcaagttcaagctgcagaacaccagtgtgcagaaggagcactccaggatcccccggagccagatccagagagccaggccggtgaagatggccactctgctggtcacctactatggggaagagtacgccgtgcagctcaccctgcaggtcctgcgggccatcaaccagcgcctgctggccgaggagctccacagggcagccattcaggaaacaaactgaagcgctgaagcagcgggtgcagaggaagctggagcaggtgtactacttcctggagcagcaagagcatttctttgtggcctcactggaggacgtgggccagatggttgggcagatcaggaaggcatatgacacccgcgtatcccaggacatcgccctgctcgatgcgctgattggggaactggaggccaaggagtgccagtcagaatgggaacttctgcaggacattggagacatcttgcacagaaaccctgcgttcagaaatggaaatgttcaatgttccggagctgattggcgctcaggcacatgctgttaatgtgattctggatgcagaaaccgcttaccccaacctcatcttctctgatgatctgaagagtgttagacttggaaacaagtgggagaggctgcctgatggcccgcaaagatttgacagctgtatcattgttctgggctctccgagtttcctctctggccgccgttactgggaggtggaggttggagacaagacagcatggatcctgggagcctgcaagacatccataagcaggaaagggaacatgactctgtcgccagagaatggctactgggtggtgataatgatgaaggaaaatgagtaccaggcgtccagcgttcccccgacccgcctgctaataaaggagcctcccaagcgtgtgggcatcttcgtggactacagagttggaagcatctccttttacaatgtgacagccagatcccacatctatacattcgccagctgctctttctctgggccccttcaacctatcttcagccctgggacacgtgatggagggaagaacacagctcctctgactatctgtccagtgggtggtcaggggcctgactga

SEQ ID NO: 152374 - DNA, 1036 bp, Homo sapiens
  Payload ID: 9968
  Gene Symbol: MEFV
  Gene Name: Mediterranean fever
  ENST ID: ENST00000572244
  CDS Start-End: 1-306
atggctaagacccctagtgaccatctgctgtccaccctggaggagctggtgccctatgacttcgagaagttcaagttcaagctgcagaacaccagtgtgcagaaggagcactccaggatcccccggagccagatccagagagccaggccggtgaagatggccactctgctggtcacctactatggggaagagtacgccgtgcagctcaccctgcaggtcctgcgggccatcaaccagcgcctgctggccgaggagctccacagggcagccattcagggacattggagacatcttgcacagggctaagacagtgcctgtccctgaaaagtggaccactcctcaagagataaaacaaaagatccaactcctccaccagaagtcagagtttgtggagaagagcacaaagtacttctcagaaaccctgcgttcagaaatggaaatgttcaatgttccggagctgattggcgctcaggcacatgctgttaatgtgattctggatgcagaaaccgcttaccccaacctcatcttctctgatgatctgaagagtgttagacttggaaacaagtgggagaggctgcctgatggcccgcaaagatttgacagctgtatcattgttctgggctctccgagtttcctctctggccgccgttactgggaggtggaggttggagacaagacagcatggatcctgggagcctgcaagacatccataagcaggaaagggaacatgactctgtcgccagagaatggctactgggtggtgataatgatgaaggaaaatgagtaccaggcgtccagcgttcccccgacccgcctgctaataaaggagcctcccaagcgtgtgggcatcttcgtggactacagagttggaagcatctccttttacaatgtgacagccagatcccacatctatacattcgccagctgctctttctctgggccccttcaacctatcttcagccctgggacacgtgatggagggaagaacacagctcctctgactatctgtccagtgggtggtcaggggcctgactga

SEQ ID NO: 152375 - DNA, 1883 bp, Homo sapiens
  Payload ID: 9968
  Gene Symbol: MEFV
  Gene Name: Mediterranean fever
  ENST ID: ENST00000621655
  CDS Start-End: 1-1236
atggctaagacccctagtgaccatctgctgtccaccctggaggagctggtgccctatgacttcgagaagttcaagttcaagctgcagaacaccagtgtgcagaaggagcactccaggatcccccggagccagatccagagagccaggccggtgaagatggccactctgctggtcacctactatggggaagagtacgccgtgcagctcaccctgcaggtcctgcgggccatcaaccagcgcctgctggccgaggagctccacagggcagccattcagggaaggccaccagacacggctgcgagtccccgctgccacgcccaggaaggagacccagttgacggtacctgtgtgcgtgattcctgcagcttccccgaggcagtttctgggcacccccaggcctcaggcagccgctcacctggctgcccccggtgccaggactcccatgaaaggaagagcccgggaagcctaagcccccagcccctgccacagtgtaagcgccacctgaagcaggtccagctgctcttctgtgaggatcacgatgagcccatctgcctcatctgcagtctgagtcaggagcaccaaggccaccgggtgcgccccattgaggaggtcgccctggaacacaagaagaaaattcagaagcagctggagcatctgaagaagctgagaaaatcaggggaggagcagcgatcctatggggaggagaaggcagtgagctttctgaaacaaactgaagcgctgaagcagcgggtgcagaggaagctggagcaggtgtactacttcctggagcagcaagagcatttctttgtggcctcactggaggacgtgggccagatggttgggcagatcaggaaggcatatgacacccgcgtatcccaggacatcgccctgctcgatgcgctgattggggaactggaggccaaggagtgccagtcagaatgggaacttctgcaggacattggagacatcttgcacagggctaagacagtgcctgtccctgaaaagtggaccactcctcaagagataaaacaaaagatccaactcctccaccagaagtcagagtttgtggagaagagcacaaagtacttctcagaaaccctgcgttcagaaatggaaatgttcaatgaccacagtccccaacatggcctgggttcctgggaggaacgggattatacccaacatagcatgcagggccctaagcagggggttccttgtcttgttgtcaggacagtgtaatttagcccctcttaatgctaatgctcaggatttttttccctatctgatttttctccgtagttccggagctgattggcgctcaggcacatgctgttaatgtgattctggatgcagaaaccgcttaccccaacctcatcttctctgatgatctgaagagtgttagacttggaaacaagtgggagaggctgcctgatggcccgcaaagatttgacagctgtatcattgttctgggctctccgagtttcctctctggccgccgttactgggaggtggaggttggagacaagacagcatggatcctgggagcctgcaagacatccataagcaggaaagggaacatgactctgtcgccagagaatggctactgggtggtgataatgatgaaggaaaatgagtaccaggcgtccagcgttcccccgacccgcctgctaataaaggagcctcccaagcgtgtgggcatcttcgtggactacagagttggaagcatctccttttacaatgtgacagccagatcccacatctatacattcgccagctgctctttctctgggccccttcaacctatcttcagccctgggacacgtgatggagggaagaacacagctcctctgactatctgtccagtgggtggtcaggggcctgactga

SEQ ID NO: 152376 - DNA, 1837 bp, Homo sapiens
  Payload ID: 9969
  Gene Symbol: MAMSTR
  Gene Name: MEF2 activating motif and SAP domain containing transcriptional regulator
  Uniprot ID: Q6ZN01
  ENST ID: ENST00000318083
  CDS Start-End: 65-1312
agactcaacccgccccagagcacagcttcgccgagcccacctggtccccatcccggccttggcaatgaccctggcggcttcctcccagcgttcccaaatcattcgctccaagttccgatctgtcctccagcttcggatccacagacggaatcaggagcagatctcggatccggacccgtggatctcagcctcagaccctcctctggccccggccttgccctcgggcacggcccctttcctcttcagccctggggtcctgctccccgagccagaatattgtcctccttggaggtccccaaagaaggagtctcccaagatctcccaacgttggagggagtccaagcccagggggaacttgacataccaccagtacatgcccccagagccgagacagggatccagggcggacccccaagccgaggggtccgccctgggtcctcctgggccatctctgtgggaagggacagactcgcagcagccacatcctaggatgaagccctctcccctcactccctgcccaccaggagtccctagcccctcgccccccccacacaagttggaacttcagacccttaaactggaggagctgacggtctcagagctccggcagcagctgcgcctgcggggcctcccagtgtcggggaccaagtctatgctcctggagcgcatgcgcggcggcgcgccgccccgcgagcggccgaagccgcggcgcgaggacagtcccgcgggtgctccctggccgcgcctcaagcccaaggccctggcagccgcccggcgtcagggctcggtcaagcccagcgcagcatctcacaggccacctcttccacgtgccgcggataccccggggacggctccggctccaactcccactccggctcctgctgcagctccagccctgaccccttcctcagggccgggctcagcggctctgactctggaggaggagctgcaggaagcgatccggagggcgcagttgcttcctaaccggggcatcgatgacatcctggaggatcaggtggagcctgatgaccccctgccccctattcccctggacttccctggctccttcgacgtgctgtccccctccccggactctgaaggcctctcatctgttttctcctcttcactcccgtctcccacgaactcctcctccccttctcccagggaccccacggactccctggactggctggaggccctgagcgggggtcctcctctgggttctggtcccccaccccccagcatcttctccgctgacttatctgactccagcagcagccggctgtgggacctgctggaggatccatggtgatggattctaggatttacagagacagagaactgatgggggtggagagaagctccttgtgggaggagagggaactaccagcagagcccctcctaccgcagacacaggatcggagacaacctccaaccccacctgcctcctgaagtgctgctgacatgcaactgccttaactttgcctacctggcctccttatgatccccctccggcgtggtatggttggggggcttcttttgctgctggccacggcaaacaagctgcttgctgcttccttcagagacctcatggatgttcttacatgcccccgaccccggtagatggctccctgttgtttggggagcctggaaggtggttatgccttttggatgcaggagaggagcaagaaagagtggagagggagaatgggggagccggaccctgacctccctgggttctggttggagatgaaaaaattagaagcatcaggtctaagatcagcttctcttggaagcagagcctgagacaagatataaatgccagtcatttattaaa

SEQ ID NO: 152377 - DNA, 1825 bp, Homo sapiens
  Payload ID: 9969
  Gene Symbol: MAMSTR
  Gene Name: MEF2 activating motif and SAP domain containing transcriptional regulator
  Uniprot ID: Q6ZN01
  ENST ID: ENST00000356751
  CDS Start-End: 616-1554
gaatggcgctggcccgcggcgctgcgctggcagggagcaggcgggaggcccgaggaagggagcctgctgcccgcccacccgcctgcacaggctgtgtaagggggctgggcacgcatatcccgccaacaactgcagctcccaccagcctgccaggccaggctcctggacactcccttcccgccttcctcctcccacctccctcctccctccacagtcctccagcttcggatccacagacggaatcaggagcagaatccagttcaggcgcccatctcccagcaatcaagtcttgctccctggcctgccctccggcaccctggagccccgctttccacacagccttgctcctcccggcctggcttgctgcctgcaggcctctcagggtccttcaccgtctctccagtctcggatccggacccgtggatctcagcctcagaccctcctctggccccggccttgccctcgggcacggcccctttcctcttcagccctggggtcctgctccccgagccagaatattgtcctccttggaggtccccaaagaaggagtctcccaagatctcccaacgttggagggagtccaagcccagggggaacttgacataccaccagtacatgcccccagagccgagacagggatccagggcggacccccaagccgaggggtccgccctgggtcctcctgggccatctctgtgggaagggacagactcgcagcagccacatcctaggatgaagccctctcccctcactccctgcccaccaggagtccctagcccctcgccccccccacacaagttggaacttcagacccttaaactggaggagctgacggtctcagagctccggcagcagctgcgcctgcggggcctcccagtgtcggggaccaagtctatgctcctggagcgcatgcgcggcggcgcgccgccccgcgagcggccgaagccgcggcgcgaggacagtcccgcgggtgctccctggccgcgcctcaagcccaaggccctggcagccgcccggcgtcagggctcggtcaagcccagcgcagcatctcacaggccacctcttccacgtgccgcggataccccggggacggctccggctccaactcccactccggctcctgctgcagctccagccctgaccccttcctcagggccgggctcagcggctctgactctggaggaggagctgcaggaagcgatccggagggcgcagttgcttcctaaccggggcatcgatgacatcctggaggatcaggtggagcctgatgaccccctgccccctattcccctggacttccctggctccttcgacgtgctgtccccctccccggactctgaaggcctctcatctgttttctcctcttcactcccgtctcccacgaactcctcctccccttctcccagggaccccacggactccctggactggctggaggccctgagcgggggtcctcctctgggttctggtcccccaccccccagcatcttctccgctgacttatctgactccagcagcagccggctgtgggacctgctggaggatccatggtgatggattctaggatttacagagacagagaactgatgggggtggagagaagctccttgtgggaggagagggaactaccagcagagcccctcctaccgcagacacaggatcggagacaacctccaaccccacctgcctcctgaagtgctgctgacatgcaactgccttaactttgcctacctggcctccttatgatccccctccggcgtggtatggttggggggcttcttttgctgctggccacggcaaacaagctgcttgctgcttccttcag

SEQ ID NO: 152378 - DNA, 415 bp, Homo sapiens
  Payload ID: 9969
  Gene Symbol: MAMSTR
  Gene Name: MEF2 activating motif and SAP domain containing transcriptional regulator
  ENST ID: ENST00000595591
  CDS Start-End: 382-415
atatcccgccaacaactgcagctcccaccagcctgccaggccaggctcctggacactcccttcccgccttcctcctcccacctccctcctccctccacagtcctccagcttcggatccacagacggaatcaggagcagagcctctcagggtccttcaccgtctctccagtctcggatccggacccgtggatctcagcctcagaccctcctctggccccggccttgccctcgggcacggcccctttcctcttcagccctggggtcctgctccccgagccagaatattgtcctccttggaggtccccaaagaaggagtctcccaagatctcccaacgttggagggagtccaagcccagggggaacttgacataccaccagtacatgcccccagagccgagacagggatccagggcgg

SEQ ID NO: 152379 - DNA, 714 bp, Homo sapiens
  Payload ID: 9969
  Gene Symbol: MAMSTR
  Gene Name: MEF2 activating motif and SAP domain containing transcriptional regulator
  ENST ID: ENST00000599703
  CDS Start-End: 57-714
cccgccccagagcacagcttcgccgagcccacctggtccccatcccggccttggcaatgaccctggcggcttcctcccagcgttcccaaatcattcgctccaagttccgatctgtcctccagcttcggatccacagacggaatcaggagcagaatccagttcaggcgcccatctcccagcaatcaagtcttgctccctggcctgccctccggcaccctggagccccgctttccacacagccttgctcctcccggcctggcttgctgcctgcaggcctctcagggtccttcaccgtctctccagtctcggatccggacccgtggatctcagcctcagaccctcctctggccccggccttgccctcgggcacggcccctttcctcttcagccctggggtcctgctccccgagccagaatattgtcctccttggaggtccccaaagaaggagtctcccaagatctcccaacgttggagggagtccaagcccagggggaacttgacataccaccagtacatgcccccagagccgagacagggatccagggcggacccccaagccgaggggtccgccctgggtcctcctgggccatctctgtgggaagggacagactcgcagcagccacatcctaggatgaagccctctcccctcactccctgcccaccaggagtccctagcccctcgccccccccacacaagttggaacttcagaccc

SEQ ID NO: 152380 - DNA, 1693 bp, Homo sapiens
  Payload ID: 9969
  Gene Symbol: MAMSTR
  Gene Name: MEF2 activating motif and SAP domain containing transcriptional regulator
  Uniprot ID: Q6ZN01
  ENST ID: ENST00000594582
  CDS Start-End: 680-1423
gggggcaggtggagccgggggcagggctgcctccagcctgcacgctggctggctcgtagccccagaatggcgctggcccgcggcgctgcgctggcagggagcaggcgggaggcccgaggaagggagcctgctgcccgcccacccgcctgcacaggctgtgtaagggggctgggcacgcatatcccgccaacaactgcagctcccaccagcctgccaggccaggctcctggacactcccttcccgccttcctcctcccacctccctcctccctccacagtcctccagcttcggatccacagacggaatcaggagcagaatccagttcaggcgcccatctcccagcaatcaagtcttgctccctggcctgccctccggcaccctggagccccgctttccacacagccttgctcctcccggcctggcttgctgcctgcaggcctctcagggtccttcaccgtctctccagtctcggatccggacccgtggatctcagcctcagaccctcctctggccccggccttgccctcgggcacggcccctttcctcttcagccctggggtcctgctccccgagccagaatattgtcctccttggaggtccccaaagaaggagtctcccaagatctcccaacgttggagggagtccaagcccagggggaacttgacataccaccagtacatgcccccagagccgagacagggatccagggcggacccccaagccgaggggtccgccctgggtcctcctgggccatctctgtgggaagggacagactcgcagcagccacatcctaggatgaagccctctcccctcactccctgcccaccaggagtccctagcccctcgccccccccacacaagttggaacttcagacccttaaactggaggagctgacggtcaagcccagcgcagcatctcacaggccacctcttccacgtgccgcggataccccggggacggctccggctccaactcccactccggctcctgctgcagctccagccctgaccccttcctcagggccgggctcagcggctctgactctggaggaggagctgcaggaagcgatccggagggcgcagttgcttcctaaccggggcatcgatgacatcctggaggatcaggtggagcctgatgaccccctgccccctattcccctggacttccctggctccttcgacgtgctgtccccctccccggactctgaaggcctctcatctgttttctcctcttcactcccgtctcccacgaactcctcctccccttctcccagggaccccacggactccctggactggctggaggccctgagcgggggtcctcctctgggttctggtcccccaccccccagcatcttctccgctgacttatctgactccagcagcagccggctgtgggacctgctggaggatccatggtgatggattctaggatttacagagacagagaactgatgggggtggagagaagctccttgtgggaggagagggaactaccagcagagcccctcctaccgcagacacaggatcggagacaacctccaaccccacctgcctcctgaagtgctgctgacatgcaactgccttaactttgcctacctggcctccttatgatccccctccggcgtggtatggttggggggcttcttttgctgctggccacggcaaacaagctgcttgctgcttccttca

SEQ ID NO: 152381 - DNA, 4496 bp, Homo sapiens
  Payload ID: 9970
  Gene Symbol: MKL1
  Gene Name: megakaryoblastic leukemia (translocation) 1
  Uniprot ID: Q969V6
  ENST ID: ENST00000355630
  CDS Start-End: 592-3387
ggcggcagtgtctgtggtggccgcggcggcgagagcgacggtcccatctttcccaccctcttggttgccgctggccacacgccctccgctggcggcgacttctcagctccgtgcgcccgggctggacagtgagcctcgagaggagacgcgggcggctagagccggagtggggcgagccgcggaacccggccgggagccgcgcgaggcgtgatcggagggtatggttggcatggaattgaatttcatctgtctgtgggaattgtaagcaagattgccatcacgaaagccaaagtggatttctccagtgtggtgtgcctgcccccttccgtcattgctgtgaatgggctggacggaggaggggccggcgaaaatgatgatgaaccagtgctcgtgtccttatctgcggcacccagtccccagagtgaagctgttgccaatgaactgcaggagctctccttgcagcccgagctgaccctaggcctccaccctggcaggaatcccaatttgcctccacttagtgagcggaagaatgtgctacagttgaaactccagcagcgccggacccgggaagaactggtgagccaagggatcatgccgcctttgaaaagtccagccgcatttcatgagcagagaaggagcttggagcgggccaggacagaggactatctcaaacggaagattcgttcccggccggagagatcggagctggtcaggatgcacattttggaagagacctcggctgagccatccctccaggccaagcagctgaagctgaagagagccagactagccgatgacctcaatgagaagattgcacagaggcctggccccatggagctggtggagaagaacatccttcctgttgagtccagcctgaaggaagccatcattgtgggccaggtgaactatcccaaagtagcagacagctcttccttcgatgaggacagcagcgatgccttatcccccgagcagcctgccagccatgagtcccagggttctgtgccgtcacccctggaggcccgagtcagcgaaccactgctcagtgccacctctgcatcccccacccaggttgtgtctcaacttccgatgggccgggattccagagaaatgcttttcctggcagagcagcctcctctgcctcccccacctctgctgcctcccagcctcaccaatggaaccactatccccactgccaagtccacccccacactcattaagcaaagccaacccaagtctgccagtgagaagtcacagcgcagcaagaaggccaaggagctgaagccaaaggtgaagaagctcaagtaccaccagtacatccccccggaccagaagcaggacaggggggcaccccccatggactcatcctacgccaagatcctgcagcagcagcagctcttcctccagctgcagatcctcaaccagcagcagcagcagcaccacaactaccaggccatcctgcctgccccgccaaagtcagcaggcgaggccctgggaagcagcgggacccccccagtacgcagcctctccactaccaatagcagctccagctcgggcgcccctgggccctgtgggctggcacgtcagaacagcacctcactgactggcaagccgggagccctgccggccaacctggacgacatgaaggtggcagagctgaagcaggagctgaagttgcgatcactgcctgtctcgggcaccaaaactgagctgattgagcgccttcgagcctatcaagaccaaatcagccctgtgccaggagcccccaaggcccctgccgccacctctatcctgcacaaggctggcgaggtggtggtagccttcccagcggcccggctgagcacggggccagccctggtggcagcaggcctggctccagctgaggtggtggtggccacggtggccagcagtggggtggtgaagtttggcagcacgggctccacgccccccgtgtctcccaccccctcggagcgctcactgctcagcacgggcgatgaaaactccacccccggggacacctttggtgagatggtgacatcacctctgacgcagctgaccctgcaggcctcgccactgcagatcctcgtgaaggaggagggcccccgggccgggtcctgttgcctgagccctggggggcgggcggagctagaggggcgcgacaaggaccagatgctgcaggagaaagacaagcagatcgaggcgctgacgcgcatgctccggcagaagcagcagctggtggagcggctcaagctgcagctggagcaggagaagcgagcccagcagcccgcccccgcccccgcccccctcggcacccccgtgaagcaggagaacagcttctccagctgccagctgagccagcagcccctgggccccgctcacccattcaaccccagcctggcggccccagccaccaaccacatagacccttgtgctgtggccccggggcccccgtccgtggtggtgaagcaggaagccttgcagcctgagcccgagccggtccccgccccccagttgcttctggggcctcagggccccagcctcatcaagggggttgcacctcccaccctcatcaccgactccacagggacccaccttgtcctcaccgtgaccaataagaatgcagacagccctggcctgtccagtgggagcccccagcagccctcgtcccagcctggctctccagcgcctgccccctctgcccagatggacctggagcacccactgcagcccctctttgggacccccacttctctgctgaagaaggaaccacctggctatgaggaagccatgagccagcagcccaaacagcaggaaaatggttcctcaagccagcagatggacgacctgtttgacattctcattcagagcggagaaatttcagcagatttcaaggagccgccatccctgccagggaaggagaagccatccccgaagacagtctgtgggtcccccctggcagcacagccatcaccttctgctgagctcccccaggctgccccacctcctccaggctcaccctccctccctggacgcctggaggacttcctggagagcagcacggggctgcccctgctgaccagtgggcatgacgggccagagcccctttccctcattgacgacctccatagccagatgctgagcagcactgccatcctggaccaccccccgtcacccatggacacctcggaattgcactttgttcctgagcccagcagcaccatgggcctggacctggctgatggccacctggacagcatggactggctggagctgtcgtcaggtggtcccgtgctgagcctagcccccctcagcaccacagcccccagcctcttctccacagacttcctcgatggccatgatttgcagctgcactgggattcctgcttgtagctctctggctcaagacggggtggggaaggggctgggagccagggtactccaatgcgtggctctcctgcgtgattcggcctctccacatggttgtgagtcttgacaatcacagcccctgctttttcccttccctgggaggctagaacagagaagcccttactcctggttcagtgccacgcagggcagaggagagcagctgtcaagaagcagccctggctctcacgctggggttttggacacacggtcagggtcagggccatttcagcttgacctccttttttgaggtcagggggcactgtctgtctggctacaatttggctaaggtaggtgaagcctggccaggcgggaggcttctcttctgacccagggctgagacaggttaaggggtgaatctccttcctttctctccctgctttgctgtgaagggagaaattagcctgggcctctaccccctattccctgtgtctgccaaccccaggatcccagggctccctgccattttagtgtcttggtgtagtgtaaccatttagtggttggtggcaacaattttatgtacaggtgtatatacctctatattatatatcgacatacatatatatttttgggggggggcggacaggagatgggtgcaactccctcccatcctactctcacagaagggcctggatgcaaggttacccttgagctgtgtgccacagtctggtgcccagtctggcatgcagctacccaggcccacccatcacgtgtgattgacatgtaggtaccctgccacggcctatgccccacctgccctgcttcctggctccttatcagtgccatgagggcagaggtgctacctggccttcctgccaggagctctccacccactcacattccgtccccgccgcctcactgcagccagcgtggccctaggacaggaggagcttcgggcccagcttcaccctgcggtggggctgaggggtggccatctcctgccctggggccactggcttcacattctgggctgactcataggggagtaggggtggagtcaccaaaaccagtgctgggacaaagatggggaaggtgtgtgaactttttaaaataaacacaaaaacacaggcctgtta

SEQ ID NO: 152382 - DNA, 4505 bp, Homo sapiens
  Payload ID: 9970
  Gene Symbol: MKL1
  Gene Name: megakaryoblastic leukemia (translocation) 1
  ENST ID: ENST00000396617
  CDS Start-End: 592-2988
ggcggcagtgtctgtggtggccgcggcggcgagagcgacggtcccatctttcccaccctcttggttgccgctggccacacgccctccgctggcggcgacttctcagctccgtgcgcccgggctggacagtgagcctcgagaggagacgcgggcggctagagccggagtggggcgagccgcggaacccggccgggagccgcgcgaggcgtgatcggagggtatggttggcatggaattgaatttcatctgtctgtgggaattgtaagcaagattgccatcacgaaagccaaagtggatttctccagtgtggtgtgcctgcccccttccgtcattgctgtgaatgggctggacggaggaggggccggcgaaaatgatgatgaaccagtgctcgtgtccttatctgcggcacccagtccccagagtgaagctgttgccaatgaactgcaggagctctccttgcagcccgagctgaccctaggcctccaccctggcaggaatcccaatttgcctccacttagtgagcggaagaatgtgctacagttgaaactccagcagcgccggacccgggaagaactggtgagccaagggatcatgccgcctttgaaaagtccagccgcatttcatgagcagagaaggagcttggagcgggccaggacagaggactatctcaaacggaagattcgttcccggccggagagatcggagctggtcaggatgcacattttggaagagacctcggctgagccatccctccaggccaagcagctgaagctgaagagagccagactagccgatgacctcaatgagaagattgcacagaggcctggccccatggagctggtggagaagaacatccttcctgttgagtccagcctgaaggaagccatcattgtgggccaggtgaactatcccaaagtagcagacagctcttccttcgatgaggacagcagcgatgccttatcccccgagcagcctgccagccatgagtcccagggttctgtgccgtcacccctggaggcccgagtcagcgaaccactgctcagtgccacctctgcatcccccacccaggttgtgtctcaacttccgatgggccgggattccagagaaatgcttttcctggcagagcagcctcctctgcctcccccacctctgctgcctcccagcctcaccaatggaaccactatccccactgccaagtccacccccacactcattaagcaaagccaacccaagtctgccagtgagaagtcacagcgcagcaagaaggccaaggagctgaagccaaaggtgaagaagctcaagtaccaccagtacatccccccggaccagaagcaggacaggggggcaccccccatggactcatcctacgccaagatcctgcagcagcagcagctcttcctccagctgcagatcctcaaccagcagcagcagcagcaccacaactaccaggccatcctgcctgccccgccaaagtcagcaggcgaggccctgggaagcagcgggacccccccagtacgcagcctctccactaccaatagcagctccagctcgggcgcccctgggccctgtgggctggcacgtcagaacagcacctcactgactggcaagccgggagccctgccggccaacctggacgacatgaaggtggcagagctgaagcaggagctgaagttgcgatcactgcctgtctcgggcaccaaaactgagctgattgagcgccttcgagcctatcaagaccaaatcagccctgtgccaggagcccccaaggcccctgccgccacctctatcctgcacaaggctggcgaggtggtggtagccttcccagcggcccggctgagcacggggccagccctggtggcagcaggcctggctccagctgaggtggtggtggccacggtggccagcagtggggtggtgaagtttggcagcacgggctccacgccccccgtgtctcccaccccctcggagcgctcactgctcagcacgggcgatgaaaactccacccccggggacacctttggtgagatggtgacatcacctctgacgcagctgaccctgcaggcctcgccactgcagatcctcgtgaaggaggagggcccccgggccgggtcctgttgcctgagccctggggggcgggcggagctagaggggcgcgacaaggaccagatgctgcaggagaaagacaagcagatcgaggcgctgacgcgcatgctccggcagaagcagcagctggtggagcggctcaagctgcagctggagcaggagaagcgagcccagcagcccgcccccgcccccgcccccctcggcacccccgtgaagcaggagaacagcttctccagctgccagctgagccagcagcccctgggccccgctcacccattcaaccccagcctggcggccccagccaccaaccacatagacccttgtgctgtggccccggggcccccgtccgtggtggtgaagcaggaagccttgcagcctgagcccgagccggtccccgccccccagttgcttctggggcctcagggccccagcctcatcaagggggttgcacctcccaccctcatcaccgactccacagggacccaccttgtcctcaccgtgaccaataagaatgcagacagccctggcctgtccagtgggagcccccagcagccctcgtcccagcctggctctccagcgcctgccccctctgcccagatggacctggagcacccactgcagcccctctttgggacccccacttctctgctgaagaaggaaccacctggctatgaggaagccatgagccagcagcccaaacagcaggaaaatggttcctcaagccagcagatggacgacctgtttgacattctcattcagagcggaggtaaccccagaaatttcagcagatttcaaggagccgccatccctgccagggaaggagaagccatccccgaagacagtctgtgggtcccccctggcagcacagccatcaccttctgctgagctcccccaggctgccccacctcctccaggctcaccctccctccctggacgcctggaggacttcctggagagcagcacggggctgcccctgctgaccagtgggcatgacgggccagagcccctttccctcattgacgacctccatagccagatgctgagcagcactgccatcctggaccaccccccgtcacccatggacacctcggaattgcactttgttcctgagcccagcagcaccatgggcctggacctggctgatggccacctggacagcatggactggctggagctgtcgtcaggtggtcccgtgctgagcctagcccccctcagcaccacagcccccagcctcttctccacagacttcctcgatggccatgatttgcagctgcactgggattcctgcttgtagctctctggctcaagacggggtggggaaggggctgggagccagggtactccaatgcgtggctctcctgcgtgattcggcctctccacatggttgtgagtcttgacaatcacagcccctgctttttcccttccctgggaggctagaacagagaagcccttactcctggttcagtgccacgcagggcagaggagagcagctgtcaagaagcagccctggctctcacgctggggttttggacacacggtcagggtcagggccatttcagcttgacctccttttttgaggtcagggggcactgtctgtctggctacaatttggctaaggtaggtgaagcctggccaggcgggaggcttctcttctgacccagggctgagacaggttaaggggtgaatctccttcctttctctccctgctttgctgtgaagggagaaattagcctgggcctctaccccctattccctgtgtctgccaaccccaggatcccagggctccctgccattttagtgtcttggtgtagtgtaaccatttagtggttggtggcaacaattttatgtacaggtgtatatacctctatattatatatcgacatacatatatatttttgggggggggcggacaggagatgggtgcaactccctcccatcctactctcacagaagggcctggatgcaaggttacccttgagctgtgtgccacagtctggtgcccagtctggcatgcagctacccaggcccacccatcacgtgtgattgacatgtaggtaccctgccacggcctatgccccacctgccctgcttcctggctccttatcagtgccatgagggcagaggtgctacctggccttcctgccaggagctctccacccactcacattccgtccccgccgcctcactgcagccagcgtggccctaggacaggaggagcttcgggcccagcttcaccctgcggtggggctgaggggtggccatctcctgccctggggccactggcttcacattctgggctgactcataggggagtaggggtggagtcaccaaaaccagtgctgggacaaagatggggaaggtgtgtgaactttttaaaataaacacaaaaacacaggcctgtt

SEQ ID NO: 152383 - DNA, 747 bp, Homo sapiens
  Payload ID: 9970
  Gene Symbol: MKL1
  Gene Name: megakaryoblastic leukemia (translocation) 1
  ENST ID: ENST00000402630
  CDS Start-End: 192-677
gcacttcaaggggacccttctttcacactacatccttctgtttttagactttttttgcgtttgaaaatgtgttttttgaggtggaatacccaactgacccctcatctctcctctctctctgctgccctgcagtgctacagttgaaactccagcagcgccggacccgggaagaactggtgagccaagggatcatgccgcctttgaaaagtccagccgcatttcatgagcagagaaggagcttggagcgggccaggacagaggactatctcaaacggaagattcgttcccggccggagagatcggagctggtcaggatgcacattttggaagagacctcggctgagccatccctccaggccaagcagctgaagctgaagagagccagactagccgatgacctcaatgagaagattgcacagaggcctggccccatggagctggtggagaagaacatccttcctgttgagtccagcctgaaggaagccatcattggtgaggaggacccagccaccctgtgtgagaggcagctgagatgcaggaggggagggagtgccaggctgaagcagaattgggctgaggctcttgacttcttaatctttgacttcctgcttagccttgggagaaccaaggcacagagtttgagagcctcatgcacaggttgtatgaacttgggatagtgcctgttgctttaagaaacagggacatacaacaataaataataacagaggccttgctctgttcactttc

SEQ ID NO: 152384 - DNA, 4343 bp, Homo sapiens
  Payload ID: 9970
  Gene Symbol: MKL1
  Gene Name: megakaryoblastic leukemia (translocation) 1
  ENST ID: ENST00000402042
  CDS Start-End: 598-3243
gccggcggcggcagtgtctgtggtggccgcggcggcgagagcgacggtcccatctttcccaccctcttggttgccgctggccacacgccctccgctggcggcgacttctcagctccgtgcgcccgggctggacagtgagcctcgagaggagacgcgggcggctagagccggagtggggcgagccgcggaacccggccgggagccgcgcgaggcgtgatcggagggtatggttggcatggaattgaatttcatctgtctgtgggaattgtaagcaagattgccatcacgaaagccaaagtggatttctccagtgtggtgtgcctgcccccttccgtcattgctgtgaatgggctggacggaggaggggccggcgaaaatgatgatgaaccagtgctcgtgtccttatctgcggcacccagtccccagagtgaagctgttgccaatgaactgcaggagctctccttgcagcccgagctgaccctaggcctccaccctggcaggaatcccaatttgcctccacttagtgagcggaagaatgtgctacagttgaaactccagcagcgccggacccgggaagaactggtgagccaagggatcatgccgcctttgaaaagtccagccgcatttcatgagcagagaaggagcttggagcgggccaggacagaggactatctcaaacggaagattcgttcccggccggagagatcggagctggtcaggatgcacattttggaagagacctcggctgagccatccctccaggccaagcagctgaagctgaagagagccagactagccgatgacctcaatgagaagattgcacagaggcctggccccatggagctggtggagaagaacatccttcctgttgagtccagcctgaaggaagccatcattgtgggccaggtgaactatcccaaagtagcagacagctcttccttcgatgaggacagcagcgatgccttatcccccgagcagcctgccagccatgagtcccagggttctgtgccgtcacccctggaggcccgagtcagcgaaccactgctcagtgccacctctgcatcccccacccagcaaagccaacccaagtctgccagtgagaagtcacagcgcagcaagaaggccaaggagctgaagccaaaggtgaagaagctcaagtaccaccagtacatccccccggaccagaagcaggacaggggggcaccccccatggactcatcctacgccaagatcctgcagcagcagcagctcttcctccagctgcagatcctcaaccagcagcagcagcagcaccacaactaccaggccatcctgcctgccccgccaaagtcagcaggcgaggccctgggaagcagcgggacccccccagtacgcagcctctccactaccaatagcagctccagctcgggcgcccctgggccctgtgggctggcacgtcagaacagcacctcactgactggcaagccgggagccctgccggccaacctggacgacatgaaggtggcagagctgaagcaggagctgaagttgcgatcactgcctgtctcgggcaccaaaactgagctgattgagcgccttcgagcctatcaagaccaaatcagccctgtgccaggagcccccaaggcccctgccgccacctctatcctgcacaaggctggcgaggtggtggtagccttcccagcggcccggctgagcacggggccagccctggtggcagcaggcctggctccagctgaggtggtggtggccacggtggccagcagtggggtggtgaagtttggcagcacgggctccacgccccccgtgtctcccaccccctcggagcgctcactgctcagcacgggcgatgaaaactccacccccggggacacctttggtgagatggtgacatcacctctgacgcagctgaccctgcaggcctcgccactgcagatcctcgtgaaggaggagggcccccgggccgggtcctgttgcctgagccctggggggcgggcggagctagaggggcgcgacaaggaccagatgctgcaggagaaagacaagcagatcgaggcgctgacgcgcatgctccggcagaagcagcagctggtggagcggctcaagctgcagctggagcaggagaagcgagcccagcagcccgcccccgcccccgcccccctcggcacccccgtgaagcaggagaacagcttctccagctgccagctgagccagcagcccctgggccccgctcacccattcaaccccagcctggcggccccagccaccaaccacatagacccttgtgctgtggccccggggcccccgtccgtggtggtgaagcaggaagccttgcagcctgagcccgagccggtccccgccccccagttgcttctggggcctcagggccccagcctcatcaagggggttgcacctcccaccctcatcaccgactccacagggacccaccttgtcctcaccgtgaccaataagaatgcagacagccctggcctgtccagtgggagcccccagcagccctcgtcccagcctggctctccagcgcctgccccctctgcccagatggacctggagcacccactgcagcccctctttgggacccccacttctctgctgaagaaggaaccacctggctatgaggaagccatgagccagcagcccaaacagcaggaaaatggttcctcaagccagcagatggacgacctgtttgacattctcattcagagcggagaaatttcagcagatttcaaggagccgccatccctgccagggaaggagaagccatccccgaagacagtctgtgggtcccccctggcagcacagccatcaccttctgctgagctcccccaggctgccccacctcctccaggctcaccctccctccctggacgcctggaggacttcctggagagcagcacggggctgcccctgctgaccagtgggcatgacgggccagagcccctttccctcattgacgacctccatagccagatgctgagcagcactgccatcctggaccaccccccgtcacccatggacacctcggaattgcactttgttcctgagcccagcagcaccatgggcctggacctggctgatggccacctggacagcatggactggctggagctgtcgtcaggtggtcccgtgctgagcctagcccccctcagcaccacagcccccagcctcttctccacagacttcctcgatggccatgatttgcagctgcactgggattcctgcttgtagctctctggctcaagacggggtggggaaggggctgggagccagggtactccaatgcgtggctctcctgcgtgattcggcctctccacatggttgtgagtcttgacaatcacagcccctgctttttcccttccctgggaggctagaacagagaagcccttactcctggttcagtgccacgcagggcagaggagagcagctgtcaagaagcagccctggctctcacgctggggttttggacacacggtcagggtcagggccatttcagcttgacctccttttttgaggtcagggggcactgtctgtctggctacaatttggctaaggtaggtgaagcctggccaggcgggaggcttctcttctgacccagggctgagacaggttaaggggtgaatctccttcctttctctccctgctttgctgtgaagggagaaattagcctgggcctctaccccctattccctgtgtctgccaaccccaggatcccagggctccctgccattttagtgtcttggtgtagtgtaaccatttagtggttggtggcaacaattttatgtacaggtgtatatacctctatattatatatcgacatacatatatatttttgggggggggcggacaggagatgggtgcaactccctcccatcctactctcacagaagggcctggatgcaaggttacccttgagctgtgtgccacagtctggtgcccagtctggcatgcagctacccaggcccacccatcacgtgtgattgacatgtaggtaccctgccacggcctatgccccacctgccctgcttcctggctccttatcagtgccatgagggcagaggtgctacctggccttcctgccaggagctctccacccactcacattccgtccccgccgcctcactgcagccagcgtggccctaggacaggaggagcttcgggcccagcttcaccctgcggtggggctgaggggtggccatctcctgccctggggccactggcttcacattctgggctgactcataggggagtaggggtggagtcaccaaaaccagtgctgggacaaagatggggaaggtgtgtgaactttttaaaataaacacaaaaacaca

SEQ ID NO: 152385 - DNA, 4091 bp, Homo sapiens
  Payload ID: 9970
  Gene Symbol: MKL1
  Gene Name: megakaryoblastic leukemia (translocation) 1
  Uniprot ID: Q969V6
  ENST ID: ENST00000407029
  CDS Start-End: 208-3003
gcaattacagacagttgcacttcaaggggacccttctttcacactacatccttctgtttttagactttttttgcgtttgaaaatgtgttttttgaggtggaatacccaactgacccctcatctctcctctctctctgctgccctgcagtgctacagttgaaactccagcagcgccggacccgggaagaactggtgagccaagggatcatgccgcctttgaaaagtccagccgcatttcatgagcagagaaggagcttggagcgggccaggacagaggactatctcaaacggaagattcgttcccggccggagagatcggagctggtcaggatgcacattttggaagagacctcggctgagccatccctccaggccaagcagctgaagctgaagagagccagactagccgatgacctcaatgagaagattgcacagaggcctggccccatggagctggtggagaagaacatccttcctgttgagtccagcctgaaggaagccatcattgtgggccaggtgaactatcccaaagtagcagacagctcttccttcgatgaggacagcagcgatgccttatcccccgagcagcctgccagccatgagtcccagggttctgtgccgtcacccctggaggcccgagtcagcgaaccactgctcagtgccacctctgcatcccccacccaggttgtgtctcaacttccgatgggccgggattccagagaaatgcttttcctggcagagcagcctcctctgcctcccccacctctgctgcctcccagcctcaccaatggaaccactatccccactgccaagtccacccccacactcattaagcaaagccaacccaagtctgccagtgagaagtcacagcgcagcaagaaggccaaggagctgaagccaaaggtgaagaagctcaagtaccaccagtacatccccccggaccagaagcaggacaggggggcaccccccatggactcatcctacgccaagatcctgcagcagcagcagctcttcctccagctgcagatcctcaaccagcagcagcagcagcaccacaactaccaggccatcctgcctgccccgccaaagtcagcaggcgaggccctgggaagcagcgggacccccccagtacgcagcctctccactaccaatagcagctccagctcgggcgcccctgggccctgtgggctggcacgtcagaacagcacctcactgactggcaagccgggagccctgccggccaacctggacgacatgaaggtggcagagctgaagcaggagctgaagttgcgatcactgcctgtctcgggcaccaaaactgagctgattgagcgccttcgagcctatcaagaccaaatcagccctgtgccaggagcccccaaggcccctgccgccacctctatcctgcacaaggctggcgaggtggtggtagccttcccagcggcccggctgagcacggggccagccctggtggcagcaggcctggctccagctgaggtggtggtggccacggtggccagcagtggggtggtgaagtttggcagcacgggctccacgccccccgtgtctcccaccccctcggagcgctcactgctcagcacgggcgatgaaaactccacccccggggacacctttggtgagatggtgacatcacctctgacgcagctgaccctgcaggcctcgccactgcagatcctcgtgaaggaggagggcccccgggccgggtcctgttgcctgagccctggggggcgggcggagctagaggggcgcgacaaggaccagatgctgcaggagaaagacaagcagatcgaggcgctgacgcgcatgctccggcagaagcagcagctggtggagcggctcaagctgcagctggagcaggagaagcgagcccagcagcccgcccccgcccccgcccccctcggcacccccgtgaagcaggagaacagcttctccagctgccagctgagccagcagcccctgggccccgctcacccattcaaccccagcctggcggccccagccaccaaccacatagacccttgtgctgtggccccggggcccccgtccgtggtggtgaagcaggaagccttgcagcctgagcccgagccggtccccgccccccagttgcttctggggcctcagggccccagcctcatcaagggggttgcacctcccaccctcatcaccgactccacagggacccaccttgtcctcaccgtgaccaataagaatgcagacagccctggcctgtccagtgggagcccccagcagccctcgtcccagcctggctctccagcgcctgccccctctgcccagatggacctggagcacccactgcagcccctctttgggacccccacttctctgctgaagaaggaaccacctggctatgaggaagccatgagccagcagcccaaacagcaggaaaatggttcctcaagccagcagatggacgacctgtttgacattctcattcagagcggagaaatttcagcagatttcaaggagccgccatccctgccagggaaggagaagccatccccgaagacagtctgtgggtcccccctggcagcacagccatcaccttctgctgagctcccccaggctgccccacctcctccaggctcaccctccctccctggacgcctggaggacttcctggagagcagcacggggctgcccctgctgaccagtgggcatgacgggccagagcccctttccctcattgacgacctccatagccagatgctgagcagcactgccatcctggaccaccccccgtcacccatggacacctcggaattgcactttgttcctgagcccagcagcaccatgggcctggacctggctgatggccacctggacagcatggactggctggagctgtcgtcaggtggtcccgtgctgagcctagcccccctcagcaccacagcccccagcctcttctccacagacttcctcgatggccatgatttgcagctgcactgggattcctgcttgtagctctctggctcaagacggggtggggaaggggctgggagccagggtactccaatgcgtggctctcctgcgtgattcggcctctccacatggttgtgagtcttgacaatcacagcccctgctttttcccttccctgggaggctagaacagagaagcccttactcctggttcagtgccacgcagggcagaggagagcagctgtcaagaagcagccctggctctcacgctggggttttggacacacggtcagggtcagggccatttcagcttgacctccttttttgaggtcagggggcactgtctgtctggctacaatttggctaaggtaggtgaagcctggccaggcgggaggcttctcttctgacccagggctgagacaggttaaggggtgaatctccttcctttctctccctgctttgctgtgaagggagaaattagcctgggcctctaccccctattccctgtgtctgccaaccccaggatcccagggctccctgccattttagtgtcttggtgtagtgtaaccatttagtggttggtggcaacaattttatgtacaggtgtatatacctctatattatatatcgacatacatatatatttttgggggggggcggacaggagatgggtgcaactccctcccatcctactctcacagaagggcctggatgcaaggttacccttgagctgtgtgccacagtctggtgcccagtctggcatgcagctacccaggcccacccatcacgtgtgattgacatgtaggtaccctgccacggcctatgccccacctgccctgcttcctggctccttatcagtgccatgagggcagaggtgctacctggccttcctgccaggagctctccacccactcacattccgtccccgccgcctcactgcagccagcgtggccctaggacaggaggagcttcgggcccagcttcaccctgcggtggggctgaggggtggccatctcctgccctggggccactggcttcacattctgggctgactcataggggagtaggggtggagtcaccaaaaccagtgctgggacaaagatggggaaggtgtgtgaactttttaaaataaa

SEQ ID NO: 152386 - DNA, 569 bp, Homo sapiens
  Payload ID: 9970
  Gene Symbol: MKL1
  Gene Name: megakaryoblastic leukemia (translocation) 1
  ENST ID: ENST00000422851
  CDS Start-End: 350-569
gactcgcctgaagggtggataaattggtaactgcactgagaaggggatattctcacagtctgatttgagcataaggcatcagattgaatttgtgaaagctttcaagacagcttttctcctgtgactttgactttcttcattatatttgtggatttttgtttctggaagaatccgtcatgactctactggaacctgagatgttaatgatggcagtacagtcagaaaaatgtctcaaattgggtataacaaatcagcgtgattgcctttcacctccactttggagtgctttgagccagtttggacacaaggaggttggagttaaaatgactcctgaaggaagtaagcaagcatgagaagagagggcagcactgtgctacagttgaaactccagcagcgccggacccgggaagaactggtgagccaagggatcatgccgcctttgaaaagtccagccgcatttcatgagcagagaaggagcttggagcgggccaggacagaggactatctcaaacggaagattcgttcccggccggagagatcggagctggtcaggatgcacattttggaag

SEQ ID NO: 152387 - DNA, 3757 bp, Homo sapiens
  Payload ID: 9970
  Gene Symbol: MKL1
  Gene Name: megakaryoblastic leukemia (translocation) 1
  ENST ID: ENST00000620651
  CDS Start-End: 1-2649
atgattcctcctttgaaaagtccagccgcatttcatgagcagagaaggagcttggagcgggccaggacagaggactatctcaaacggaagattcgttcccggccggagagatcggagctggtcaggatgcacattttggaagagacctcggctgagccatccctccaggccaagcagctgaagctgaagagagccagactagccgatgacctcaatgagaagattgcacagaggcctggccccatggagctggtggagaagaacatccttcctgttgagtccagcctgaaggaagccatcattgtgggccaggtgaactatcccaaagtagcagacagctcttccttcgatgaggacagcagcgatgccttatcccccgagcagcctgccagccatgagtcccagggttctgtgccgtcacccctggaggcccgagtcagcgaaccactgctcagtgccacctctgcatcccccacccagcaaagccaacccaagtctgccagtgagaagtcacagcgcagcaagaaggccaaggagctgaagccaaaggtgaagaagctcaagtaccaccagtacatccccccggaccagaagcaggacaggggggcaccccccatggactcatcctacgccaagatcctgcagcagcagcagctcttcctccagctgcagatcctcaaccagcagcagcagcagcaccacaactaccaggccatcctgcctgccccgccaaagtcagcaggcgaggccctgggaagcagcgggacccccccagtacgcagcctctccactaccaatagcagctccagctcgggcgcccctgggccctgtgggctggcacgtcagaacagcacctcactgactggcaagccgggagccctgccggccaacctggacgacatgaaggtggcagagctgaagcaggagctgaagttgcgatcactgcctgtctcgggcaccaaaactgagctgattgagcgccttcgagcctatcaagaccaaatcagccctgtgccaggagcccccaaggcccctgccgccacctctatcctgcacaaggctggcgaggtggtggtagccttcccagcggcccggctgagcacggggccagccctggtggcagcaggcctggctccagctgaggtggtggtggccacggtggccagcagtggggtggtgaagtttggcagcacgggctccacgccccccgtgtctcccaccccctcggagcgctcactgctcagcacgggcgatgaaaactccacccccggggacacctttggtgagatggtgacatcacctctgacgcagctgaccctgcaggcctcgccactgcagatcctcgtgaaggaggagggcccccgggccgggtcctgttgcctgagccctggggggcgggcggagctagaggggcgcgacaaggaccagatgctgcaggagaaagacaagcagatcgaggcgctgacgcgcatgctccggcagaagcagcagctggtggagcggctcaagctgcagctggagcaggagaagcgagcccagcagcccgcccccgcccccgcccccctcggcacccccgtgaagcaggagaacagcttctccagctgccagctgagccagcagcccctgggccccgctcacccattcaaccccagcctggcggccccagccaccaaccacatagacccttgtgctgtggccccggggcccccgtccgtggtggtgaagcaggaagccttgcagcctgagcccgagccggtccccgccccccagttgcttctggggcctcagggccccagcctcatcaagggggttgcacctcccaccctcatcaccgactccacagggacccaccttgtcctcaccgtgaccaataagaatgcagacagccctggcctgtccagtgggagcccccagcagccctcgtcccagcctggctctccagcgcctgccccctctgcccagatggacctggagcacccactgcagcccctctttgggacccccacttctctgctgaagaaggaaccacctggctatgaggaagccatgagccagcagcccaaacagcaggaaaatggttcctcaagccagcagatggacgacctgtttgacattctcattcagagcggagaaatttcagcagatttcaaggagccgccatccctgccagggaaggagaagccatccccgaagacagtctgtgggtcccccctggcagcacagccatcaccttctgctgagctcccccaggctgccccacctcctccaggctcaccctccctccctggacgcctggaggacttcctggagagcagcacggggctgcccctgctgaccagtgggcatgacgggccagagcccctttccctcattgacgacctccatagccagatgctgagcagcactgccatcctggaccaccccccgtcacccatggacacctcggaattgcactttgttcctgagcccagcagcaccatgggcctggacctggctgatggccacctggacagcatggactggctggagctgtcgtcaggtggtcccgtgctgagcctagcccccctcagcaccacagcccccagcctcttctccacagacttcctcgatggccatgatttgcagctgcactgggattcctgcttgtagctctctggctcaagacggggtggggaaggggctgggagccagggtactccaatgcgtggctctcctgcgtgattcggcctctccacatggttgtgagtcttgacaatcacagcccctgctttttcccttccctgggaggctagaacagagaagcccttactcctggttcagtgccacgcagggcagaggagagcagctgtcaagaagcagccctggctctcacgctggggttttggacacacggtcagggtcagggccatttcagcttgacctccttttttgaggtcagggggcactgtctgtctggctacaatttggctaaggtaggtgaagcctggccaggcgggaggcttctcttctgacccagggctgagacaggttaaggggtgaatctccttcctttctctccctgctttgctgtgaagggagaaattagcctgggcctctaccccctattccctgtgtctgccaaccccaggatcccagggctccctgccattttagtgtcttggtgtagtgtaaccatttagtggttggtggcaacaattttatgtacaggtgtatatacctctatattatatatcgacatacatatatatttttgggggggggcggacaggagatgggtgcaactccctcccatcctactctcacagaagggcctggatgcaaggttacccttgagctgtgtgccacagtctggtgcccagtctggcatgcagctacccaggcccacccatcacgtgtgattgacatgtaggtaccctgccacggcctatgccccacctgccctgcttcctggctccttatcagtgccatgagggcagaggtgctacctggccttcctgccaggagctctccacccactcacattccgtccccgccgcctcactgcagccagcgtggccctaggacaggaggagcttcgggcccagcttcaccctgcggtggggctgaggggtggccatctcctgccctggggccactggcttcacattctgggctgactcataggggagtaggggtggagtcaccaaaaccagtgctgggacaaagatggggaaggtgtgtgaactttttaaaataaacacaaaaacacaggcctgtt

SEQ ID NO: 152388 - DNA, 4248 bp, Homo sapiens
  Payload ID: 9970
  Gene Symbol: MKL1
  Gene Name: megakaryoblastic leukemia (translocation) 1
  ENST ID: ENST00000618196
  CDS Start-End: 246-3146
cacttagtatgtcttaactggagagctttttggtttcctgtcggcagtaattcaaatctgtgtcatcttgactcgcctgaagggtggataaattggtaactgcactgagaaggggatattctcacagtctgatttgagcataaggcatcagattgaatttgtgaaagctttcaagacagcttttctcctgtgactttgactttcttcattatatttgtggatttttgtttctggaagaatccgtcatgactctactggaacctgagatgttaatgatggcagtacagtcagtgctacagttgaaactccagcagcgccggacccgggaagaactggtgagccaagggatcatgccgcctttgaaaagtccagccgcatttcatgagcagagaaggagcttggagcgggccaggacagaggactatctcaaacggaagattcgttcccggccggagagatcggagctggtcaggatgcacattttggaagagacctcggctgagccatccctccaggccaagcagctgaagctgaagagagccagactagccgatgacctcaatgagaagattgcacagaggcctggccccatggagctggtggagaagaacatccttcctgttgagtccagcctgaaggaagccatcattgtgggccaggtgaactatcccaaagtagcagacagctcttccttcgatgaggacagcagcgatgccttatcccccgagcagcctgccagccatgagtcccagggttctgtgccgtcacccctggaggcccgagtcagcgaaccactgctcagtgccacctctgcatcccccacccaggttgtgtctcaacttccgatgggccgggattccagagaaatgcttttcctggcagagcagcctcctctgcctcccccacctctgctgcctcccagcctcaccaatggaaccactatccccactgccaagtccacccccacactcattaagcaaagccaacccaagtctgccagtgagaagtcacagcgcagcaagaaggccaaggagctgaagccaaaggtgaagaagctcaagtaccaccagtacatccccccggaccagaagcaggacaggggggcaccccccatggactcatcctacgccaagatcctgcagcagcagcagctcttcctccagctgcagatcctcaaccagcagcagcagcagcaccacaactaccaggccatcctgcctgccccgccaaagtcagcaggcgaggccctgggaagcagcgggacccccccagtacgcagcctctccactaccaatagcagctccagctcgggcgcccctgggccctgtgggctggcacgtcagaacagcacctcactgactggcaagccgggagccctgccggccaacctggacgacatgaaggtggcagagctgaagcaggagctgaagttgcgatcactgcctgtctcgggcaccaaaactgagctgattgagcgccttcgagcctatcaagaccaaatcagccctgtgccaggagcccccaaggcccctgccgccacctctatcctgcacaaggctggcgaggtggtggtagccttcccagcggcccggctgagcacggggccagccctggtggcagcaggcctggctccagctgaggtggtggtggccacggtggccagcagtggggtggtgaagtttggcagcacgggctccacgccccccgtgtctcccaccccctcggagcgctcactgctcagcacgggcgatgaaaactccacccccggggacacctttggtgagatggtgacatcacctctgacgcagctgaccctgcaggcctcgccactgcagatcctcgtgaaggaggagggcccccgggccgggtcctgttgcctgagccctggggggcgggcggagctagaggggcgcgacaaggaccagatgctgcaggagaaagacaagcagatcgaggcgctgacgcgcatgctccggcagaagcagcagctggtggagcggctcaagctgcagctggagcaggagaagcgagcccagcagcccgcccccgcccccgcccccctcggcacccccgtgaagcaggagaacagcttctccagctgccagctgagccagcagcccctgggccccgctcacccattcaaccccagcctggcggccccagccaccaaccacatagacccttgtgctgtggccccggggcccccgtccgtggtggtgaagcaggaagccttgcagcctgagcccgagccggtccccgccccccagttgcttctggggcctcagggccccagcctcatcaagggggttgcacctcccaccctcatcaccgactccacagggacccaccttgtcctcaccgtgaccaataagaatgcagacagccctggcctgtccagtgggagcccccagcagccctcgtcccagcctggctctccagcgcctgccccctctgcccagatggacctggagcacccactgcagcccctctttgggacccccacttctctgctgaagaaggaaccacctggctatgaggaagccatgagccagcagcccaaacagcaggaaaatggttcctcaagccagcagatggacgacctgtttgacattctcattcagagcggagaaatttcagcagatttcaaggagccgccatccctgccagggaaggagaagccatccccgaagacagtctgtgggtcccccctggcagcacagccatcaccttctgctgagctcccccaggctgccccacctcctccaggctcaccctccctccctggacgcctggaggacttcctggagagcagcacggggctgcccctgctgaccagtgggcatgacgggccagagcccctttccctcattgacgacctccatagccagatgctgagcagcactgccatcctggaccaccccccgtcacccatggacacctcggaattgcactttgttcctgagcccagcagcaccatgggcctggacctggctgatggccacctggacagcatggactggctggagctgtcgtcaggtggtcccgtgctgagcctagcccccctcagcaccacagcccccagcctcttctccacagacttcctcgatggccatgatttgcagctgcactgggattcctgcttgtagctctctggctcaagacggggtggggaaggggctgggagccagggtactccaatgcgtggctctcctgcgtgattcggcctctccacatggttgtgagtcttgacaatcacagcccctgctttttcccttccctgggaggctagaacagagaagcccttactcctggttcagtgccacgcagggcagaggagagcagctgtcaagaagcagccctggctctcacgctggggttttggacacacggtcagggtcagggccatttcagcttgacctccttttttgaggtcagggggcactgtctgtctggctacaatttggctaaggtaggtgaagcctggccaggcgggaggcttctcttctgacccagggctgagacaggttaaggggtgaatctccttcctttctctccctgctttgctgtgaagggagaaattagcctgggcctctaccccctattccctgtgtctgccaaccccaggatcccagggctccctgccattttagtgtcttggtgtagtgtaaccatttagtggttggtggcaacaattttatgtacaggtgtatatacctctatattatatatcgacatacatatatatttttgggggggggcggacaggagatgggtgcaactccctcccatcctactctcacagaagggcctggatgcaaggttacccttgagctgtgtgccacagtctggtgcccagtctggcatgcagctacccaggcccacccatcacgtgtgattgacatgtaggtaccctgccacggcctatgccccacctgccctgcttcctggctccttatcagtgccatgagggcagaggtgctacctggccttcctgccaggagctctccacccactcacattccgtccccgccgcctcactgcagccagcgtggccctaggacaggaggagcttcgggcccagcttcaccctgcggtggggctgaggggtggccatctcctgccctggggccactggcttcacattctgggctgactcataggggagtaggggtggagtcaccaaaaccagtgctgggacaaagatggggaaggtgtgtgaactttttaaaataaacacaaaaacacagg

SEQ ID NO: 152389 - DNA, 1842 bp, Homo sapiens
  Payload ID: 9970
  Gene Symbol: MKL1
  Gene Name: megakaryoblastic leukemia (translocation) 1
  ENST ID: ENST00000618417
  CDS Start-End: 1339-1596
cgtcattgctgtgaatgggctggacggaggaggggccggcgaaaatgatgatgaaccagtgctcgtgtccttatctgcggcacccagtccccaaagtgctgggattacagacgtgagccactgcacccagcccattgtaactaaccatttttaagtgtatggttcagtggtattaaatacattcataatgtgtacagccatcactgccatccatctccctttcttttgatctcgtaaaactgaaactatccccattaaacagtaacttcccatttggcccttccgccagcctgtagcaactgccattctactttctgtctctatgattttgactaagtgcaatcatgaattgtcttttgtgacaggctgttgcactaagcatagtatcacttccttcatccattgatggacataggttgcttccacattctactgttgtgaatgcacttatcaacacctgtgtacaaatacctgagaccctgcttccaattcttttgggtatatgcccagcagtggaattgctagatcatatggtaattctatttttaagtaagtaagtgttggaggaacctccatactgtttttcatagcagctgcaccattttgcatttctaccacagggcacaagggctccagtttctctgtatcctcaccaatactttcttaaaaatttaattttacagtagccactccagtgggtttgaggtgtatctcactgtggtctccctcatgactagtgatattgagctcttttcatgtgctgttggccatttgtatatcatctttggaaaaatgtctgttcaaatctttcttttacctattcttgagtcaagtttggttttttgttgttgagttttagaagttctctgtgtattccggatatcacttctttatcaaatatgtgatttgcaaatatttttaaagagttttatagtcttagctcttacatttaagtaagtctttgatccgttttatttttgtaaatggtgtgacgttggggggtccaccttcattcttttgcatgtagatatacaggcttggcttctgatatccatttactctcttgattgattggcagaaatttcagcagatttcaaggagccgccatccctgccagggaaggagaagccatccccgaagacagtctgtgggtcccccctggcagcacagccatcaccttctgctgagctcccccaggctgccccacctcctccaggctcaccctccctccctggacgcctggaggacttcctggagagcagcacggggctgcccctgctgaccagtgggcatgacgggccagagcccctttccctcattgacgacctccatagccagatgctgagcagcactgccatcctggaccaccccccgtcacccatggacacctcggaattgcactttgttcctgagcccagcagcaccatgggcctggacctggctgatggccacctggacagcatggactggctggagctgtcgtcaggtggtcccgtgctgagcctagcccccctcagcaccacagcccccagcctcttctccacagacttcctcgatggccatgatttgcagctgcactgggattcctgcttgtagctctctggctcaagacggggtggggaaggggctgggagccagggtactccaatgcgtggctctcctgcgtgattcggcctctccacatggttgtgagtcttgacaatcacagcccctgctttttcccttccctgggaggctagaacagagaagcccttactcctggttcagtgccacgcagggcagaggagagcagctgtcaagaagcagccctggctctcacgctggggttttggacacacggtc

SEQ ID NO: 152390 - DNA, 3917 bp, Homo sapiens
  Payload ID: 9970
  Gene Symbol: MKL1
  Gene Name: megakaryoblastic leukemia (translocation) 1
  ENST ID: ENST00000614754
  CDS Start-End: 1-2400
atgattcctcctttgaaaagtccagccgcatttcatgagcagagaaggagcttggagcgggccaggacagaggactatctcaaacggaagattcgttcccggccggagagatcggagctggtcaggatgcacattttggaagagacctcggctgagccatccctccaggccaagcagctgaagctgaagagagccagactagccgatgacctcaatgagaagattgcacagaggcctggccccatggagctggtggagaagaacatccttcctgttgagtccagcctgaaggaagccatcattgtgggccaggtgaactatcccaaagtagcagacagctcttccttcgatgaggacagcagcgatgccttatcccccgagcagcctgccagccatgagtcccagggttctgtgccgtcacccctggaggcccgagtcagcgaaccactgctcagtgccacctctgcatcccccacccaggttgtgtctcaacttccgatgggccgggattccagagaaatgcttttcctggcagagcagcctcctctgcctcccccacctctgctgcctcccagcctcaccaatggaaccactatccccactgccaagtccacccccacactcattaagcaaagccaacccaagtctgccagtgagaagtcacagcgcagcaagaaggccaaggagctgaagccaaaggtgaagaagctcaagtaccaccagtacatccccccggaccagaagcaggacaggggggcaccccccatggactcatcctacgccaagatcctgcagcagcagcagctcttcctccagctgcagatcctcaaccagcagcagcagcagcaccacaactaccaggccatcctgcctgccccgccaaagtcagcaggcgaggccctgggaagcagcgggacccccccagtacgcagcctctccactaccaatagcagctccagctcgggcgcccctgggccctgtgggctggcacgtcagaacagcacctcactgactggcaagccgggagccctgccggccaacctggacgacatgaaggtggcagagctgaagcaggagctgaagttgcgatcactgcctgtctcgggcaccaaaactgagctgattgagcgccttcgagcctatcaagaccaaatcagccctgtgccaggagcccccaaggcccctgccgccacctctatcctgcacaaggctggcgaggtggtggtagccttcccagcggcccggctgagcacggggccagccctggtggcagcaggcctggctccagctgaggtggtggtggccacggtggccagcagtggggtggtgaagtttggcagcacgggctccacgccccccgtgtctcccaccccctcggagcgctcactgctcagcacgggcgatgaaaactccacccccggggacacctttggtgagatggtgacatcacctctgacgcagctgaccctgcaggcctcgccactgcagatcctcgtgaaggaggagggcccccgggccgggtcctgttgcctgagccctggggggcgggcggagctagaggggcgcgacaaggaccagatgctgcaggagaaagacaagcagatcgaggcgctgacgcgcatgctccggcagaagcagcagctggtggagcggctcaagctgcagctggagcaggagaagcgagcccagcagcccgcccccgcccccgcccccctcggcacccccgtgaagcaggagaacagcttctccagctgccagctgagccagcagcccctgggccccgctcacccattcaaccccagcctggcggccccagccaccaaccacatagacccttgtgctgtggccccggggcccccgtccgtggtggtgaagcaggaagccttgcagcctgagcccgagccggtccccgccccccagttgcttctggggcctcagggccccagcctcatcaagggggttgcacctcccaccctcatcaccgactccacagggacccaccttgtcctcaccgtgaccaataagaatgcagacagccctggcctgtccagtgggagcccccagcagccctcgtcccagcctggctctccagcgcctgccccctctgcccagatggacctggagcacccactgcagcccctctttgggacccccacttctctgctgaagaaggaaccacctggctatgaggaagccatgagccagcagcccaaacagcaggaaaatggttcctcaagccagcagatggacgacctgtttgacattctcattcagagcggaggtaaccccagaaatttcagcagatttcaaggagccgccatccctgccagggaaggagaagccatccccgaagacagtctgtgggtcccccctggcagcacagccatcaccttctgctgagctcccccaggctgccccacctcctccaggctcaccctccctccctggacgcctggaggacttcctggagagcagcacggggctgcccctgctgaccagtgggcatgacgggccagagcccctttccctcattgacgacctccatagccagatgctgagcagcactgccatcctggaccaccccccgtcacccatggacacctcggaattgcactttgttcctgagcccagcagcaccatgggcctggacctggctgatggccacctggacagcatggactggctggagctgtcgtcaggtggtcccgtgctgagcctagcccccctcagcaccacagcccccagcctcttctccacagacttcctcgatggccatgatttgcagctgcactgggattcctgcttgtagctctctggctcaagacggggtggggaaggggctgggagccagggtactccaatgcgtggctctcctgcgtgattcggcctctccacatggttgtgagtcttgacaatcacagcccctgctttttcccttccctgggaggctagaacagagaagcccttactcctggttcagtgccacgcagggcagaggagagcagctgtcaagaagcagccctggctctcacgctggggttttggacacacggtcagggtcagggccatttcagcttgacctccttttttgaggtcagggggcactgtctgtctggctacaatttggctaaggtaggtgaagcctggccaggcgggaggcttctcttctgacccagggctgagacaggttaaggggtgaatctccttcctttctctccctgctttgctgtgaagggagaaattagcctgggcctctaccccctattccctgtgtctgccaaccccaggatcccagggctccctgccattttagtgtcttggtgtagtgtaaccatttagtggttggtggcaacaattttatgtacaggtgtatatacctctatattatatatcgacatacatatatatttttgggggggggcggacaggagatgggtgcaactccctcccatcctactctcacagaagggcctggatgcaaggttacccttgagctgtgtgccacagtctggtgcccagtctggcatgcagctacccaggcccacccatcacgtgtgattgacatgtaggtaccctgccacggcctatgccccacctgccctgcttcctggctccttatcagtgccatgagggcagaggtgctacctggccttcctgccaggagctctccacccactcacattccgtccccgccgcctcactgcagccagcgtggccctaggacaggaggagcttcgggcccagcttcaccctgcggtggggctgaggggtggccatctcctgccctggggccactggcttcacattctgggctgactcataggggagtaggggtggagtcaccaaaaccagtgctgggacaaagatggggaaggtgtgtgaactttttaaaataaacacaaaaacacaggcctgtt

SEQ ID NO: 152391 - DNA, 2133 bp, Homo sapiens
  Payload ID: 9971
  Gene Symbol: MATK
  Gene Name: megakaryocyte-associated tyrosine kinase
  Uniprot ID: P42679
  ENST ID: ENST00000310132
  CDS Start-End: 400-1923
ggccggcggcggcggcggcgcgcggaggagaccgcagtgcggccggcgctaggacccgcgggggcctcccaggccgcggcgcctcccgctttcccccactccccgacccttcttcgcccccaaaatgaggaaacggagcaactcgctccaagttgtgcagccgggaccgcctcggggtgtgcagccggctcgcggaggccctcctgggggcgggcgcggggcgcggctcgggggcgccccctgagcagaaaacaggaagaaccaggctcggtccagtggcacccagctccctacctcctgtgccagccgactggcctgtggcaggccattcccagcgtccccgactgtgaccacttgctcagtgtgcctctcacctgcctcagtttccctctgggggcgatggcggggcgaggctctctggtttcctggcgggcatttcacggctgtgattctgctgaggaacttccccgggtgagcccccgcttcctccgagcctggcacccccctcccgtctcagccaggatgccaacgaggcgctgggccccgggcacccagtgtatcaccaaatgcgagcacacccgccccaagccaggggagctggccttccgcaagggcgacgtggtcaccatcctggaggcctgcgagaacaagagctggtaccgcgtcaagcaccacaccagtggacaggaggggctgctggcagctggggcgctgcgggagcgggaggccctctccgcagaccccaagctcagcctcatgccgtggttccacgggaagatctcgggccaggaggctgtccagcagctgcagcctcccgaggatgggctgttcctggtgcgggagtccgcgcgccaccccggcgactacgtcctgtgcgtgagctttggccgcgacgtcatccactaccgcgtgctgcaccgcgacggccacctcacaatcgatgaggccgtgttcttctgcaacctcatggacatggtggagcattacagcaaggacaagggcgctatctgcaccaagctggtgagaccaaagcggaaacacgggaccaagtcggccgaggaggagctggccagggcgggctggttactgaacctgcagcatttgacattgggagcacagatcggagagggagagtttggagctgtcctgcagggtgagtacctggggcaaaaggtggccgtgaagaatatcaagtgtgatgtgacagcccaggccttcctggacgagacggccgtcatgacgaagatgcaacacgagaacctggtgcgtctcctgggcgtgatcctgcaccaggggctgtacattgtcatggagcacgtgagcaagggcaacctggtgaactttctgcggacccggggtcgagccctcgtgaacaccgctcagctcctgcagttttctctgcacgtggccgagggcatggagtacctggagagcaagaagcttgtgcaccgcgacctggccgcccgcaacatcctggtctcagaggacctggtggccaaggtcagcgactttggcctggccaaagccgagcggaaggggctagactcaagccggctgcccgtcaagtggacggcgcccgaggctctcaaacacgggaagttcaccagcaagtcggatgtctggagttttggggtgctgctctgggaggtcttctcatatggacgggctccgtaccctaaaatgtcactgaaagaggtgtcggaggccgtggagaaggggtaccgcatggaaccccccgagggctgtccaggccccgtgcacgtcctcatgagcagctgctgggaggcagagcccgcccgccggccacccttccgcaaactggccgagaagctggcccgggagctacgcagtgcaggtgccccagcctccgtctcagggcaggacgccgacggctccacctcgccccgaagccaggagccctgaccccacccggtggggcccttggccccagaggaccgagagagtggagagtgcggcgtgggggcactgaccaggcccaaggagggtccaggcgggcaagtcatcctcctggtgcccacagcaggggctggcccacgtagggggctctgggcggcccgtggacaccccagacctgcgaaggatgatcgcccgataaagacggattctaaggac

SEQ ID NO: 152392 - DNA, 1907 bp, Homo sapiens
  Payload ID: 9971
  Gene Symbol: MATK
  Gene Name: megakaryocyte-associated tyrosine kinase
  Uniprot ID: P42679
  ENST ID: ENST00000395040
  CDS Start-End: 297-1697
cggcggcggcggcggcgcgcggaggagaccgcagtgcggccggcgctaggacccgcgggggcctcccaggccgcggcgcctcccgctttcccccactccccgacccttcttcgcccccaaaatgaggaaacggagcaactcgctccaagttgtgcagccgggaccgcctcggggtgtgcagccggctcgcggaggccctcctgggggcgggcgcggggcgcggctcgggggcgccccctgagcaggtgagcccccgcttcctccgagcctggcacccccctcccgtctcagccaggatgccaacgaggcgctgggccccgggcacccagtgtatcaccaaatgcgagcacacccgccccaagccaggggagctggccttccgcaagggcgacgtggtcaccatcctggaggcctgcgagaacaagagctggtaccgcgtcaagcaccacaccagtggacaggaggggctgctggcagctggggcgctgcgggagcgggaggccctctccgcagaccccaagctcagcctcatgccgtggttccacgggaagatctcgggccaggaggctgtccagcagctgcagcctcccgaggatgggctgttcctggtgcgggagtccgcgcgccaccccggcgactacgtcctgtgcgtgagctttggccgcgacgtcatccactaccgcgtgctgcaccgcgacggccacctcacaatcgatgaggccgtgttcttctgcaacctcatggacatggtggagcattacagcaaggacaagggcgctatctgcaccaagctggtgagaccaaagcggaaacacgggaccaagtcggccgaggaggagctggccagggcgggctggttactgaacctgcagcatttgacattgggagcacagatcggagagggagagtttggagctgtcctgcagggtgagtacctggggcaaaaggtggccgtgaagaatatcaagtgtgatgtgacagcccaggccttcctggacgagacggccgtcatgacgaagatgcaacacgagaacctggtgcgtctcctgggcgtgatcctgcaccaggggctgtacattgtcatggagcacgtgagcaagggcaacctggtgaactttctgcggacccggggtcgagccctcgtgaacaccgctcagctcctgcagttttctctgcacgtggccgagggcatggagtacctggagagcaagaagcttgtgcaccgcgacctggccgcccgcaacatcctggtctcagaggacctggtggccaaggtcagcgactttggcctggccaaagccgagcggaaggggctagactcaagccggctgcccgtcaagtggacggcgcccgaggctctcaaacacgggaagttcaccagcaagtcggatgtctggagttttggggtgctgctctgggaggtcttctcatatggacgggctccgtaccctaaaatgtcactgaaagaggtgtcggaggccgtggagaaggggtaccgcatggaaccccccgagggctgtccaggccccgtgcacgtcctcatgagcagctgctgggaggcagagcccgcccgccggccacccttccgcaaactggccgagaagctggcccgggagctacgcagtgcaggtgccccagcctccgtctcagggcaggacgccgacggctccacctcgccccgaagccaggagccctgaccccacccggtggggcccttggccccagaggaccgagagagtggagagtgcggcgtgggggcactgaccaggcccaaggagggtccaggcgggcaagtcatcctcctggtgcccacagcaggggctggcccacgtagggggctctgggcggcccgtggacaccccagacctgcgaaggatgatcgcccgataaagacggattctaaggac

SEQ ID NO: 152393 - DNA, 2073 bp, Homo sapiens
  Payload ID: 9971
  Gene Symbol: MATK
  Gene Name: megakaryocyte-associated tyrosine kinase
  Uniprot ID: P42679
  ENST ID: ENST00000395045
  CDS Start-End: 339-1865
agcaaaatcaagcagttggttagcgaagggattcggtgcagatggatggaccgtctgggctgcggagtccacgggcctgaaacgcggtcgctcctgacccgtcctccgcaaccctcgtcccaccaggccgcggttcccggagcaggccggcgggtggcaggaagacaccaggctgcagggggctggagaagcaacacccctctccctccccgccagagaactggagcgcggggacctcggttgcggatgctagctgcgagccgggttgctaggcgacatcgagagaggaagaggagaaagtcttcatggggtgctagagcatcttaaatgtccctctcatgcagggacatttccctgctgaacgaagagaaggcagacctcggcgagggacccgtggtcagcagcagcttctggtgagcccccgcttcctccgagcctggcacccccctcccgtctcagccaggatgccaacgaggcgctgggccccgggcacccagtgtatcaccaaatgcgagcacacccgccccaagccaggggagctggccttccgcaagggcgacgtggtcaccatcctggaggcctgcgagaacaagagctggtaccgcgtcaagcaccacaccagtggacaggaggggctgctggcagctggggcgctgcgggagcgggaggccctctccgcagaccccaagctcagcctcatgccgtggttccacgggaagatctcgggccaggaggctgtccagcagctgcagcctcccgaggatgggctgttcctggtgcgggagtccgcgcgccaccccggcgactacgtcctgtgcgtgagctttggccgcgacgtcatccactaccgcgtgctgcaccgcgacggccacctcacaatcgatgaggccgtgttcttctgcaacctcatggacatggtggagcattacagcaaggacaagggcgctatctgcaccaagctggtgagaccaaagcggaaacacgggaccaagtcggccgaggaggagctggccagggcgggctggttactgaacctgcagcatttgacattgggagcacagatcggagagggagagtttggagctgtcctgcagggtgagtacctggggcaaaaggtggccgtgaagaatatcaagtgtgatgtgacagcccaggccttcctggacgagacggccgtcatgacgaagatgcaacacgagaacctggtgcgtctcctgggcgtgatcctgcaccaggggctgtacattgtcatggagcacgtgagcaagggcaacctggtgaactttctgcggacccggggtcgagccctcgtgaacaccgctcagctcctgcagttttctctgcacgtggccgagggcatggagtacctggagagcaagaagcttgtgcaccgcgacctggccgcccgcaacatcctggtctcagaggacctggtggccaaggtcagcgactttggcctggccaaagccgagcggaaggggctagactcaagccggctgcccgtcaagtggacggcgcccgaggctctcaaacacgggaagttcaccagcaagtcggatgtctggagttttggggtgctgctctgggaggtcttctcatatggacgggctccgtaccctaaaatgtcactgaaagaggtgtcggaggccgtggagaaggggtaccgcatggaaccccccgagggctgtccaggccccgtgcacgtcctcatgagcagctgctgggaggcagagcccgcccgccggccacccttccgcaaactggccgagaagctggcccgggagctacgcagtgcaggtgccccagcctccgtctcagggcaggacgccgacggctccacctcgccccgaagccaggagccctgaccccacccggtggggcccttggccccagaggaccgagagagtggagagtgcggcgtgggggcactgaccaggcccaaggagggtccaggcgggcaagtcatcctcctggtgcccacagcaggggctggcccacgtagggggctctgggcggcccgtggacaccccagacctgcgaaggatgatcgcccgataaagacggattctaagg

SEQ ID NO: 152394 - DNA, 594 bp, Homo sapiens
  Payload ID: 9971
  Gene Symbol: MATK
  Gene Name: megakaryocyte-associated tyrosine kinase
  ENST ID: ENST00000591059
  CDS Start-End: 556-594
ctggggcggagggtgctcagaggcgatcggaccccgcgtggtggtggctggggtttcctgggtgcgggtgtgcgcggctacgagccccgggcgtgtgtacccgcgcgtccacgtggagggctgtgcgcgtgtggccgaaaagcgtgtgcgcggccctgcgtagcgccctgcgtgcccgagtggcccggcgctggcgcccaggtgttccagtgtggggcggctgtgtgtgtgccgggggcgggggacaggtgcgcacgttcccaggtgtggagcgcttgtgcgcgcggatgcgcggggacgtgtgcgcacacctgtttccacgtggacgtggtcctttgcttgtctgcgcgcagctgtgtccgagccctgtgtgtttctgtgcgtgtgcatgcatccgtatgcgtaaaacaggaagaaccaggctcggtccagtggcacccagctccctacctcctgtgccagccgactggcctgtggcaggccattcccagcgtccccgactgtgaccacttgctcagtgtgcctctcacctgcctcagtttccctctgggggcgatggcggggcgaggctctctggtttcctggcgggcattt

SEQ ID NO: 152395 - DNA, 711 bp, Homo sapiens
  Payload ID: 9971
  Gene Symbol: MATK
  Gene Name: megakaryocyte-associated tyrosine kinase
  ENST ID: ENST00000588983
  CDS Start-End: 1-711
gtgagctttggccgcgacgtcatccactaccgcgtgctgcaccgcgacggccacctcacaatcgatgaggccgtgttcttctgcaacctcatggacatggtggagaggccacccgggaacggaacaggatgctggggttcccctccctggggctgggctcatggctgtcccaccatcctgcagcattacagcaaggacaagggcgctatctgcaccaagctggtgagaccaaagcggaaacacgggaccaagtcggccgaggaggagctggccaggggtccccagcttcgccactcatctgtcaccatcatccaccatctgagccagaaacctggccccgaacctccacccaccccatcctccagcattccctccttggccaggttcccaagacctgcgggctggttactgaacctgcagcatttgacattgggagcacagatcggagagggagagtttggagctgtcctgcagggtgagtacctggggcaaaaggtggccgtgaagaatatcaagtgtgatgtgacagcccaggccttcctggacgagacggccgtcatgacgaagatgcaacacgagaacctggtgcgtctcctgggcgtgatcctgcaccaggggctgtacattgtcatggagcacgtgagcaagggcaacctggtgaactttctgcggacccggggtcgagccctcgtgaacaccgctcagctcctg

SEQ ID NO: 152396 - DNA, 724 bp, Homo sapiens
  Payload ID: 9971
  Gene Symbol: MATK
  Gene Name: megakaryocyte-associated tyrosine kinase
  ENST ID: ENST00000590028
  CDS Start-End: 201-724
aggaagggccggtgtgtgcgcgagtgtgcgcgtcccgggcgcgcagcggaaaacaggaagaaccaggctcggtccagtggcacccagctccctacctcctgtgccagccgactggcctgtggcaggccattcccagcgtccccgactgtgaccacttgctcagtgtgcctctcacctgcctcagtttccctctgggggcgatggcggggcgaggctctctggtttcctggcgggcatttcacggctgtgattctgctgaggaacttccccgggtgagcccccgcttcctccgagcctggcacccccctcccgtctcagccaggatgccaacgaggcgctgggccccgggcacccagtgtatcaccaaatgcgagcacacccgccccaagccaggggagctggccttccgcaagggcgacgtggtcaccatcctggaggcctgcgagaacaagagctggtaccgcgtcaagcaccacaccagtggacaggaggggctgctggcagctggggcgctgcgggagcgggaggccctctccgcagaccccaagctcagcctcatgccgtggttccacgggaagatctcgggccaggaggctgtccagcagctgcagcctcccgaggatgggctgttcctggtgcgggagtccgcgcgccaccccggcgactacgtcctgtgcgtgagctttggccgcgacgtcatccactaccgcgtgctgcaccgcga

SEQ ID NO: 152397 - DNA, 562 bp, Homo sapiens
  Payload ID: 9971
  Gene Symbol: MATK
  Gene Name: megakaryocyte-associated tyrosine kinase
  ENST ID: ENST00000590980
  CDS Start-End: 448-562
aaggctgtggggacagagggaagggacaggggaaggggcacaccctggcaggcctggcgatcacagcagcccctggtgggaggcacctcgtcccctgctgtgaaccccaggcggtacctgcagccccgcttccttccttatgccccgggagaggcggctctcggaagcctcccacccacagttcccgttcccatccctggctcccggggaaggcaaacaggattcctgccaccaggccgcggttcccggagcaggccggcgggtggcaggaagacaccaggctgcagggggctggagaagcaacacccctctccctccccgccagagaactggagcgcggggacctcggttgcggatgctagctgcgagccgggttgctaggcgacatcgagagaggaagaggagaaagtcttcatggggtgctagagcatcttaaatgtccctctcatgcagggacatttccctgctgaacgaagagaaggcagacctcggcgagggacccgtggtcagcagcagcttctgaaaacaggaagaaccaggctcggtccagtggcacccagct

SEQ ID NO: 152398 - DNA, 571 bp, Homo sapiens
  Payload ID: 9971
  Gene Symbol: MATK
  Gene Name: megakaryocyte-associated tyrosine kinase
  ENST ID: ENST00000590849
  CDS Start-End: 320-571
agttggttagcgaagggattcggtgcagatggatggaccgtctgggctgcggagtccacgggcctgaaacgcggtcgctcctgacccgtcctccgcaaccctcgtcccaccaggccgcggttcccggagcaggccggcgggtggcaggaagacaccaggctgcagggggctggagaagcaacacccctctccctccccgccagagaactggagcgcggggacctcggttgcggatgctagctgcgagccgggttgctaggcgacatcggtgagcccccgcttcctccgagcctggcacccccctcccgtctcagccaggatgccaacgaggcgctgggccccgggcacccagtgtatcaccaaatgcgagcacacccgccccaagccaggggagctggccttccgcaagggcgacgtggtcaccatcctggaggcctgcgagaacaagagctggtaccgcgtcaagcaccacaccagtggacaggaggggctgctggcagctggggcgctgcgggagcgggaggccctctccgcagaccccaagctcagcctcatgccgtggttccacggg

SEQ ID NO: 152399 - DNA, 1994 bp, Homo sapiens
  Payload ID: 9971
  Gene Symbol: MATK
  Gene Name: megakaryocyte-associated tyrosine kinase
  ENST ID: ENST00000585778
  CDS Start-End: 266-1786
ggagcaactcgctccaagttgtgcagccgggaccgcctcggggtgtgcagccggctcgcggaggccctcctgggggcgggcgcggggcgcggctcgggggcgccccctgagcagaaaacaggaagaaccaggctcggtccagtggcacccagctccctacctcctgtgccagccgactggcctgtggcaggccattcccagcgtccccgactgtgaccacttgctcagtgtgcctctcacctgcctcagtttccctctgggggcgatggcggggcgaggctctctggtttcctggcgggcatttcacggctgtgattctgctgaggaacttccccgggtgagcccccgcttcctccgagcctggcacccccctcccgtctcagccaggatgccaacgaggcgctgggccccgggcacccagtgtatcaccaaatgcgagcacacccgccccaagccaggggagctggccttccgcaagggcgacgtggtcaccatcctggaggcctgcgagaacaagagctggtaccgcgtcaagcaccacaccagtggacaggaggggctgctggcagctggggcgctgcgggagcgggaggccctctccgcagaccccaagctcagcctcatgccgtggttccacgggaagatctcgggccaggaggctgtccagcagctgcagcctcccgaggatgggctgttcctggtgcgggagtccgcgcgccaccccggcgactacgtcctgtgcgtgagctttggccgcgacgtcatccactaccgcgtgctgcaccgcgacggccacctcacaatcgatgaggccgtgttcttctgcaacctcatggacatggtggagcattacagcaaggacaagggcgctatctgcaccaagctggtgagaccaaagcggaaacacgggaccaagtcggccgaggaggagctggccagggcgggctggttactgaacctgcagcatttgacattgggagcacagatcggagagggagagtttggagctgtcctgcagggtgagtacctggggcaaaaggtggccgtgaagaatatcaagtgtgatgtgacagcccaggccttcctggacgagacggccgtcatgacgaagatgcaacacgagaacctggtgcgtctcctgggcgtgatcctgcaccaggggctgtacattgtcatggagcacgtgagcaagggcaacctggtgaactttctgcggacccggggtcgagccctcgtgaacaccgctcagctcctgcagttttctctgcacgtggccgagggcatggagtacctggagagcaagaagcttgtgcaccgcgacctggccgcccgcaacatcctggtctcagaggacctggtggccaaggtcagcgactttggcctggccaaagccgagcggaaggggctagactcaagccggctgcccgtcaagtggacggcgcccgaggctctcaaacacgggttcaccagcaagtcggatgtctggagttttggggtgctgctctgggaggtcttctcatatggacgggctccgtaccctaaaatgtcactgaaagaggtgtcggaggccgtggagaaggggtaccgcatggaaccccccgagggctgtccaggccccgtgcacgtcctcatgagcagctgctgggaggcagagcccgcccgccggccacccttccgcaaactggccgagaagctggcccgggagctacgcagtgcaggtgccccagcctccgtctcagggcaggacgccgacggctccacctcgccccgaagccaggagccctgaccccacccggtggggcccttggccccagaggaccgagagagtggagagtgcggcgtgggggcactgaccaggcccaaggagggtccaggcgggcaagtcatcctcctggtgcccacagcaggggctggcccacgtagggggctctgggcggcccgtggacaccccagacctgcgaaggatgatcgcccgataaagacggattctaagg

SEQ ID NO: 152400 - DNA, 741 bp, Homo sapiens
  Payload ID: 9971
  Gene Symbol: MATK
  Gene Name: megakaryocyte-associated tyrosine kinase
  ENST ID: ENST00000587180
  CDS Start-End: 348-741
cctctccgctcttttccaatctctatacctttctccctcctgtcctctttcccctcccgtgcctctgctccccacatctccgtgatgtcctccctttgcccctctcccggccccctctgcagaggcgctgggccccgggcacccagtgtatcaccaaatgcgagcacacccgccccaagccaggggagctggccttccgcaagggcgacgtggtcaccatcctggaggcctgcgagaacaagagctggtaccgcgtcaagcaccacaccagtggacaggaggggctgctggcagctggggcgctgcgggagcgggaggccctctccgcagaccccaagctcagcctcatgccgtggttccacgggaagatctcgggccaggaggctgtccagcagctgcagcctcccgaggatgggctgttcctggtgcgggagtccgcgcgccaccccggcgactacgtcctgtgcgtgagctttggccgcgacgtcatccactaccgcgtgctgcaccgcgacggccacctcacaatcgatgaggccgtgttcttctgcaacctcatggacatggtggagcattacagcaaggacaagggcgctatctgcaccaagctggtgagaccaaagcggaaacacgggaccaagtcggccgaggaggagctggccagggcgggctggttactgaacctgcagcatttgacattgggagcacagatcggagagggagagtttggagctgtcctgc

SEQ ID NO: 152401 - DNA, 801 bp, Homo sapiens
  Payload ID: 9971
  Gene Symbol: MATK
  Gene Name: megakaryocyte-associated tyrosine kinase
  ENST ID: ENST00000590493
  CDS Start-End: 1-801
tccgcagaccccaagctcagcctcatgccgtggttccacgggaagatctcgggccaggaggctgtccagcagctgcagcctcccgaggatgggctgttcctggtgcgggagtccgcgcgccaccccggcgactacgtcctgtgcgtgagctttggccgcgacgtcatccactaccgcgtgctgcaccgcgacggccacctcacaatcgatgaggccgtgttcttctgcaacctcatggacatggtggagaggccacccgggaacggaacaggatgctggggttcccctccctggggctgggctcatggctgtcccaccatcctgcagcattacagcaaggacaagggcgctatctgcaccaagctggtgagaccaaagcggaaacacgggaccaagtcggccgaggaggagctggccagggcgggctggttactgaacctgcagcatttgacattgggagcacagatcggagagggagagtttggagctgtcctgcagggtgagtacctggggcaaaaggtggccgtgaagaatatcaagtgtgatgtgacagcccaggccttcctggacgagacggccgtcatgacgaagatgcaacacgagaacctggtgcgtctcctgggcgtgatcctgcaccaggggctgtacattgtcatggagcacgtgagcaagggcaacctggtgaactttctgcggacccggggtcgagccctcgtgaacaccgctcagctcctgcagttttctctgcacgtggccgagggcatggagtacctggagagcaagaagcttgtgcaccgcgac

SEQ ID NO: 152402 - DNA, 1990 bp, Homo sapiens
  Payload ID: 9971
  Gene Symbol: MATK
  Gene Name: megakaryocyte-associated tyrosine kinase
  ENST ID: ENST00000612526
  CDS Start-End: 266-1849
ggagcaactcgctccaagttgtgcagccgggaccgcctcggggtgtgcagccggctcgcggaggccctcctgggggcgggcgcggggcgcggctcgggggcgccccctgagcagaaaacaggaagaaccaggctcggtccagtggcacccagctccctacctcctgtgccagccgactggcctgtggcaggccattcccagcgtccccgactgtgaccacttgctcagtgtgcctctcacctgcctcagtttccctctgggggcgatggcggggcgaggctctctggtttcctggcgggcatttcacggctgtgattctgctgaggaacttccccgggtgagcccccgcttcctccgagcctggcacccccctcccgtctcagccaggatgccaacgaggcgctgggccccgggcacccagtgtatcaccaaatgcgagcacacccgccccaagccaggggagctggccttccgcaagggcgacgtggtcaccatcctggaggcctgcgagaacaagagctggtaccgcgtcaagcaccacaccagtggacaggaggggctgctggcagctggggcgctgcgggagcgggaggccctctccgcagaccccaagctcagcctcatgccgtggttccacgggaagatctcgggccaggaggctgtccagcagctgcagcctcccgaggatgggctgttcctggtgcgggagtccgcgcgccaccccggcgactacgtcctgtgcgtgagctttggccgcgacgtcatccactaccgcgtgctgcaccgcgacggccacctcacaatcgatgaggccgtgttcttctgcaacctcatggacatggtggagcattacagcaaggacaagggcgctatctgcaccaagctggtgagaccaaagcggaaacacgggaccaagtcggccgaggaggagctggccagggcgggctggttactgaacctgcagcatttgacattgggagcacagatcggagagggagagtttggagctgtcctgcagggtgagtacctggggcaaaaggtggccgtgaagaatatcaagtgtgatgtgacagcccaggccttcctggacgagacggccgtcatgacgaagatgcaacacgagaacctggtgcgtctcctgggcgtgatcctgcaccaggggctgtacattgtcatggagcacgtgagcaagggcaacctggtgaactttctgcggacccggggtcgagccctcgtgaacaccgctcagctcctgcagttttctctgcacgtggccgagggcatggagtacctggagagcaagaagcttgtgcaccgcgacctggccgcccgcaacatcctggtctcagaggacctggtggccaaggtcagcgactttggcctggccaaagccgagcggaaggggctagactcaagccggctgcccgtcaagtggacggcgcccgaggctctcaaacacgggttcaccagcaagtcggatgtctggagttttggggtgctgctctgggaggtcttctcatatggacgggctccgtaccctaaaatgtcactgaaagaggtgtcggaggccgtggagaaggggtaccgcatggaaccccccgagggctgtccaggccccgtgcacgtcctcatgagcagctgctgggaggcagagccgcccgccggccacccttccgcaaactggccgagaagctggcccgggagctacgcagtgcaggtgccccagcctccgtctcagggcaggacgccgacgctccacctcgccccgaagccaggagccctgaccccacccggtggcccttggccccagaggaccgagagagtggagagtgcggcgtgggggcactgaccaggcccaaggagggtccaggcgggcaagtcatcctcctggtgcccacagcaggggctggcccacgtagggggctctgggcggcccgtggacaccccagacctgcgaaggatgatcgcccgataaagacggattctaagg

SEQ ID NO: 152403 - DNA, 1740 bp, Homo sapiens
  Payload ID: 9971
  Gene Symbol: MATK
  Gene Name: megakaryocyte-associated tyrosine kinase
  Uniprot ID: P42679
  ENST ID: ENST00000619596
  CDS Start-End: 1-1527
atgcagggacatttccctgctgaacgaagagaaggcagacctcggcgagggacccgtggtcagcagcagcttctggtgagcccccgcttcctccgagcctggcacccccctcccgtctcagccaggatgccaacgaggcgctgggccccgggcacccagtgtatcaccaaatgcgagcacacccgccccaagccaggggagctggccttccgcaagggcgacgtggtcaccatcctggaggcctgcgagaacaagagctggtaccgcgtcaagcaccacaccagtggacaggaggggctgctggcagctggggcgctgcgggagcgggaggccctctccgcagaccccaagctcagcctcatgccgtggttccacgggaagatctcgggccaggaggctgtccagcagctgcagcctcccgaggatgggctgttcctggtgcgggagtccgcgcgccaccccggcgactacgtcctgtgcgtgagctttggccgcgacgtcatccactaccgcgtgctgcaccgcgacggccacctcacaatcgatgaggccgtgttcttctgcaacctcatggacatggtggagcattacagcaaggacaagggcgctatctgcaccaagctggtgagaccaaagcggaaacacgggaccaagtcggccgaggaggagctggccagggcgggctggttactgaacctgcagcatttgacattgggagcacagatcggagagggagagtttggagctgtcctgcagggtgagtacctggggcaaaaggtggccgtgaagaatatcaagtgtgatgtgacagcccaggccttcctggacgagacggccgtcatgacgaagatgcaacacgagaacctggtgcgtctcctgggcgtgatcctgcaccaggggctgtacattgtcatggagcacgtgagcaagggcaacctggtgaactttctgcggacccggggtcgagccctcgtgaacaccgctcagctcctgcagttttctctgcacgtggccgagggcatggagtacctggagagcaagaagcttgtgcaccgcgacctggccgcccgcaacatcctggtctcagaggacctggtggccaaggtcagcgactttggcctggccaaagccgagcggaaggggctagactcaagccggctgcccgtcaagtggacggcgcccgaggctctcaaacacgggaagttcaccagcaagtcggatgtctggagttttggggtgctgctctgggaggtcttctcatatggacgggctccgtaccctaaaatgtcactgaaagaggtgtcggaggccgtggagaaggggtaccgcatggaaccccccgagggctgtccaggccccgtgcacgtcctcatgagcagctgctgggaggcagagcccgcccgccggccacccttccgcaaactggccgagaagctggcccgggagctacgcagtgcaggtgccccagcctccgtctcagggcaggacgccgacggctccacctcgccccgaagccaggagccctgaccccacccggtggggcccttggccccagaggaccgagagagtggagagtgcggcgtgggggcactgaccaggcccaaggagggtccaggcgggcaagtcatcctcctggtgcccacagcaggggctggcccacgtagggggctctgggcggcccgtggacaccccagacctgcgaaggatgatcgcccgataaagacggattctaaggactct

SEQ ID NO: 152404 - DNA, 3933 bp, Homo sapiens
  Payload ID: 9972
  Gene Symbol: MLC1
  Gene Name: megalencephalic leukoencephalopathy with subcortical cysts 1
  Uniprot ID: Q15049
  ENST ID: ENST00000311597
  CDS Start-End: 608-1741
aaagggggcagcaggaccgggcccaccagccatccgggctgcccacgcaaaccacagggccgaatccggagccgcccaaggccacacagctaagccgagtgcgtgaatgcttatgtgaccgtgtgaaggaggttcccaccgtgtggctgtgggggatggaaaaaggctacttggaaagatgtagaagaccttcgagtaaacagttacgtttcagaaacagagcctgctcagaatgtgtacttggtgggattctattcttagggacgcttctttcttctgagagacccgagctctgtggcgagtggcacaggcagggccccttcctttcctagttgggttctgacagctccgaggcagtggtttacacaaccaacacgaaacatttctacgatccacccgattcctcccctcattgatattcaggaagcagctctccttcccctgccttcagctcaagtttgctgagcttttgtttcatttgtgaatacttcttgctggaagtccctcacccagagaccagtgctcccaacggcagagcagcgggggagataaagaactggtgacacgtggctgtacattcagcacagctgtggtgtccccaagtgccatgacccaggagccattcagagaggagctggcctatgaccggatgcccacgctggagcggggccggcaagaccccgccagctatgccccagacgcgaagccgagcgacctgcagctgtcgaagagactgcccccctgcttcagccacaagacgtgggtcttctctgtgctgatggggagctgcctcctggtgacctcggggttttcgctgtacctggggaacgtgttcccggctgagatggattacttgcgctgtgctgcaggctcttgcatcccctcggcaattgtgagcttcaccgtctccaggaggaacgccaatgtgattcccaactttcagatattgtttgtttccacgtttgctgtgaccactacgtgtttaatttggtttggatgcaaactagtcctgaacccatcagcaataaacatcaacttcaacctcatcctgctgctcctgctggagctgctcatggcggccacggtgatcatcgctgcacggtccagcgaggaggactgcaagaaaaagaagggctccatgtctgacagcgccaacattctggacgaagtgccatttcctgctcgggtcctgaaatcttactcagtcgtcgaggtaatcgcaggcatctctgccgtcctcggggggatcattgccctgaacgtggatgactcagtttcaggcccacacctctcagtgacgttcttttggatcctagtggcctgctttccaagtgccattgccagtcatgtggcagcagagtgtcccagcaagtgtctggtggaggtcctgattgccataagcagcctcacgtctccgctgctgttcacagcctctggatatctgtcattcagcatcatgagaatcgtggagatgtttaaggattacccgccagccataaaaccatcctacgatgtgctgctgctgctgctgctgctagtgctcctgctgcaggccggcctcaacacgggcaccgccatccagtgcgtgcgcttcaaggtcagtgcaaggctgcagggtgcatcctgggacacccagaacggcccgcaggagcgcctggctggggaggtggccaggagccccctgaaggagttcgacaaggagaaagcctggagagccgtcgtggtgcaaatggcccagtgacccccagacgcggaaaccgggtggcagcgcccagcctggccccaagcatggaaacgcacaacccctaatcgccctgagctactgcttctaacacctcttttcccttgtgtgagggcaaaccaggctgcaggtggggttttcacttcctagggtagtttaattttaaaataggccaatgttggctagtctgtgcctcagtgagatcagtcagctccgagtggctcccgtgtcgtaacagcaggagcatggccgcaacttcccaggccgaggaagggcccccggctcggcctcttgagagccccacccctgaactggccccagctcctcttcctgcctctctcatggcttgggctggagtgggctctctggacctgaccagactgtgggtccctgcgtctcctgcccactctgaccgggcttcctccctccacgcttagggtctgtcccgggtactcagtcagcccagtgggatcttacccacttccctgcaaggtgcacctgccccaggctcaggctgcccagcggctcttcctggacagtgagagcagggctgggcgcctctgtcctggcccgggagccgcaggggcccctcctccagagcctgggcgcaagcgacacaggctgccgctgctctcccaggtgaaatccacaccagtccacgccgggtcgcctgccctgtctccctacttagacccagtcattctagagggatccaccgccacactggccggcccacgtcctgggtgctgtcatgcccagcttggagtgccacgtggccgctgcccacgtcccgggcactgtcatgcccagcttggagtgccacatggccgctgcccacgtcccgggcactgtcatgcccagcttggagtgccacgtggccgctgctgtgacaggcagtgttcttgggggtggggctgcatccaaggctttgtaaaccggctggaccacgtctccctggccccagtgaccgggggaagctgagcccctccctcctgtgtttgctcccattactcaaaatgcaggacagatcaggtcagagcccaggaattctcacaggttcacccagcgccctctacctcctagcaagtactttgtcttgatcctcactgagaaggccccagggcagcggtcttctccatctccgctgttttggggtcttagggtacagcccaggcggtcactgcccacctgccaggctgcagggacagttgggtgtgagaataacactggctttgggtagtgccatggccaggagtgggtttccctgcgtctcctcgtcccgagggcgcctgggtcctcccagctgacggcagtaaatccacagtgagttggggcgactgtgaaactggaatgctgttactttgataattactttccagcaggtgttttccttcacaatggttttgtttctttccttctgatctgagaagacatgaacgttttctcttcaccgccgtggggtgtattgactggtcccccatgggctgctggaaaggcccggagatgcatctgtggcctggggccatcaagatcaaagaaccaggaggcctgggagatgcagctggatggggcggcctgcagaccctgccagggggtttgaggaccctcccaggtttcccactgcggaacaggagtgactctggctgccaagataccttcatggtgttcatgacaagtggaatcattattttcaaccattgaagggggatgcaggcaagacaccttcccagctgctcctagaggggacaagccaggccctctctgcagtcctcggcagctccggaaggacacagtcaggggccgggcaaacactttggccacagccccaaacaagcgccaccgtgggagaggagaggctgctgtcactggtaccggatgcagaccccaccctgtctgcaggccacccccacctccctgcagctttgaggctggcggggtctgctcctgggaatggggtgggagccacagggacgacccggggcgggctgatgtcttcttgggggcagaccagagagctcaagtttcagagtcagaattaggcacttggagcgtttttgctggcttgcactttcttattttcttattttagagcgcttaaaaaatccggaaaaatggggtttaaaagaactgtctctttcagtctacatttttgtttaatacgcttgagcaataaacgctgacttgcagacgtg

SEQ ID NO: 152405 - DNA, 3601 bp, Homo sapiens
  Payload ID: 9972
  Gene Symbol: MLC1
  Gene Name: megalencephalic leukoencephalopathy with subcortical cysts 1
  Uniprot ID: Q15049
  ENST ID: ENST00000395876
  CDS Start-End: 276-1409
gtaagtgctcagacattaagccgttgagtagaggcatgttttgcaatctctcgtttagctaccaattggagcagtttaacgtgcttgagtccccggcgtgatgtgttcatggacgaagttgccgatggatgttgtcaggtgttgcacctggagggcccagatggatcaatgaggcatttaaagtgtagaatctcaccctgaacccagactattcagataaagaactggtgacacgtggctgtacattcagcacagctgtggtgtccccaagtgccatgacccaggagccattcagagaggagctggcctatgaccggatgcccacgctggagcggggccggcaagaccccgccagctatgccccagacgcgaagccgagcgacctgcagctgtcgaagagactgcccccctgcttcagccacaagacgtgggtcttctctgtgctgatggggagctgcctcctggtgacctcggggttttcgctgtacctggggaacgtgttcccggctgagatggattacttgcgctgtgctgcaggctcttgcatcccctcggcaattgtgagcttcaccgtctccaggaggaacgccaatgtgattcccaactttcagatattgtttgtttccacgtttgctgtgaccactacgtgtttaatttggtttggatgcaaactagtcctgaacccatcagcaataaacatcaacttcaacctcatcctgctgctcctgctggagctgctcatggcggccacggtgatcatcgctgcacggtccagcgaggaggactgcaagaaaaagaagggctccatgtctgacagcgccaacattctggacgaagtgccatttcctgctcgggtcctgaaatcttactcagtcgtcgaggtaatcgcaggcatctctgccgtcctcggggggatcattgccctgaacgtggatgactcagtttcaggcccacacctctcagtgacgttcttttggatcctagtggcctgctttccaagtgccattgccagtcatgtggcagcagagtgtcccagcaagtgtctggtggaggtcctgattgccataagcagcctcacgtctccgctgctgttcacagcctctggatatctgtcattcagcatcatgagaatcgtggagatgtttaaggattacccgccagccataaaaccatcctacgatgtgctgctgctgctgctgctgctagtgctcctgctgcaggccggcctcaacacgggcaccgccatccagtgcgtgcgcttcaaggtcagtgcaaggctgcagggtgcatcctgggacacccagaacggcccgcaggagcgcctggctggggaggtggccaggagccccctgaaggagttcgacaaggagaaagcctggagagccgtcgtggtgcaaatggcccagtgacccccagacgcggaaaccgggtggcagcgcccagcctggccccaagcatggaaacgcacaacccctaatcgccctgagctactgcttctaacacctcttttcccttgtgtgagggcaaaccaggctgcaggtggggttttcacttcctagggtagtttaattttaaaataggccaatgttggctagtctgtgcctcagtgagatcagtcagctccgagtggctcccgtgtcgtaacagcaggagcatggccgcaacttcccaggccgaggaagggcccccggctcggcctcttgagagccccacccctgaactggccccagctcctcttcctgcctctctcatggcttgggctggagtgggctctctggacctgaccagactgtgggtccctgcgtctcctgcccactctgaccgggcttcctccctccacgcttagggtctgtcccgggtactcagtcagcccagtgggatcttacccacttccctgcaaggtgcacctgccccaggctcaggctgcccagcggctcttcctggacagtgagagcagggctgggcgcctctgtcctggcccgggagccgcaggggcccctcctccagagcctgggcgcaagcgacacaggctgccgctgctctcccaggtgaaatccacaccagtccacgccgggtcgcctgccctgtctccctacttagacccagtcattctagagggatccaccgccacactggccggcccacgtcctgggtgctgtcatgcccagcttggagtgccacgtggccgctgcccacgtcccgggcactgtcatgcccagcttggagtgccacatggccgctgcccacgtcccgggcactgtcatgcccagcttggagtgccacgtggccgctgctgtgacaggcagtgttcttgggggtggggctgcatccaaggctttgtaaaccggctggaccacgtctccctggccccagtgaccgggggaagctgagcccctccctcctgtgtttgctcccattactcaaaatgcaggacagatcaggtcagagcccaggaattctcacaggttcacccagcgccctctacctcctagcaagtactttgtcttgatcctcactgagaaggccccagggcagcggtcttctccatctccgctgttttggggtcttagggtacagcccaggcggtcactgcccacctgccaggctgcagggacagttgggtgtgagaataacactggctttgggtagtgccatggccaggagtgggtttccctgcgtctcctcgtcccgagggcgcctgggtcctcccagctgacggcagtaaatccacagtgagttggggcgactgtgaaactggaatgctgttactttgataattactttccagcaggtgttttccttcacaatggttttgtttctttccttctgatctgagaagacatgaacgttttctcttcaccgccgtggggtgtattgactggtcccccatgggctgctggaaaggcccggagatgcatctgtggcctggggccatcaagatcaaagaaccaggaggcctgggagatgcagctggatggggcggcctgcagaccctgccagggggtttgaggaccctcccaggtttcccactgcggaacaggagtgactctggctgccaagataccttcatggtgttcatgacaagtggaatcattattttcaaccattgaagggggatgcaggcaagacaccttcccagctgctcctagaggggacaagccaggccctctctgcagtcctcggcagctccggaaggacacagtcaggggccgggcaaacactttggccacagccccaaacaagcgccaccgtgggagaggagaggctgctgtcactggtaccggatgcagaccccaccctgtctgcaggccacccccacctccctgcagctttgaggctggcggggtctgctcctgggaatggggtgggagccacagggacgacccggggcgggctgatgtcttcttgggggcagaccagagagctcaagtttcagagtcagaattaggcacttggagcgtttttgctggcttgcactttcttattttcttattttagagcgcttaaaaaatccggaaaaatggggtttaaaagaactgtctctttcagtctacatttttgtttaatacgcttgagcaataaacgctgacttgcagacgtg

SEQ ID NO: 152406 - DNA, 758 bp, Homo sapiens
  Payload ID: 9972
  Gene Symbol: MLC1
  Gene Name: megalencephalic leukoencephalopathy with subcortical cysts 1
  ENST ID: ENST00000442311
  CDS Start-End: 90-758
agtgctcccaacggcagagcagcgggggagataaagaactggtgacacgtggctgtacattcagcacagctgtggtgtccccaagtgccatgacccaggagccattcagagaggagctggcctatgaccggatgcccacgctggagcggggccggcaagaccccgccagctatgccccagacgcgaagccgagcgacctgcagctgtcgaagagactgcccccctgcttcagccacaagacgtgggtcttctctgtgctgatggggtgcatcccctcggcaattgtgagcttcaccgtctccaggaggaacgccaatgtgattcccaactttcagatattgtttgtttccacgtttgctgtgaccactacgtgtttaatttggtttggatgcaaactagtcctgaacccatcagcaataaacatcaacttcaacctcatcctgctgctcctgctggagctgctcatggcggccacggtgatcatcgctgcacggtccagcgaggaggactgcaagaaaaagaagggctccatgtctgacagcgccaacattctggacgaagtgccatttcctgctcgggtcctgaaatcttactcagtcgtcgaggtaatcgcaggcatctctgccgtcctcggggggatcattgccctgaacgtggatgactcagtttcaggcccacacctctcagtgacgttcttttggatcctagtggcctgctttccaagtgccattgccagtcatgtggcagcagagtgtccc

SEQ ID NO: 152407 - DNA, 2543 bp, Homo sapiens
  Payload ID: 9973
  Gene Symbol: M1AP
  Gene Name: meiosis 1 associated protein
  Uniprot ID: Q8TC57
  ENST ID: ENST00000290536
  CDS Start-End: 118-1710
gggcccggagcttcctccgcggggcccccaggcccgagggccgggctgctgatccgccaggcacggtgtaaagaatatccagctggtggctacagttccccctctggttttgctgccatgcatcctgggcgaactactggtaaagggccctctactcacactcagattgaccagcaacctccacggcttctcattgtgcacattgctctaccgtcctgggctgacatctgcaccaacctctgtgaggctctgcagaacttcttctctctagcctgcagcttgatgggccccagccgcatgtccctgttcagtttatacatggtacaagatcagcatgagtgcatcctcccttttgtgcaagtgaaagggaactttgctaggttgcagacctgcatctcagaactccgcatgttacagagagaagggtgtttcagatcacaaggtgcttctctgcggctggcagtagaggatgggctccagcaattcaaacaatacagcagacatgtgaccacaagggcagctctgacctatacctccctggagattactattctgacttctcagcctggaaaagaggtggtcaaacagttggaggaagggttgaaagatacagacctagccagagtcaggaggtttcaggtcgttgaggtcacaaagggaatcctagagcacgtggactcagcgtctcctgttgaggataccagcaatgatgagagttctattctgggaactgacattgaccttcagactatagacaatgatatcgtcagcatggagattttcttcaaagcctggctacataacagtggaacagaccaagaacaaatccatcttcttctttcttcacagtgtttcagcaacatttccagacccagagataatccaatgtgtctgaaatgtgatctccaagagcgactgctctgcccatccctactcgctggcacagctgacggctccttgagaatggatgaccctaaaggagacttcatcacactctaccagatggcttcccagtcatcggcctctcattacaagctccaagtgatcaaggctttaaaatctagcgggctctgcgagtcattgacatatggactcccgttcatcctcagacctacaagctgttggcagctggactgggatgagctggagacaaatcagcaacatttccatgctttgtgtcacagcctgctgaaaagggaatggctgctgttagccaagggggaaccaccgggcccaggacacagccagagaattcctgccagcaccttctatgtgatcatgccgtcacactccctcacactgctggtaaaggcggtggccacgcgggaactgatgctgcccagcaccttccccctgctacctgaggacccacatgatgatagccttaagaatgtggagagcatgctggacagcctggagctggagcccacctacaaccccttgcatgttcaaagccacctgtactcacacctgagcagcatctatgccaagcctcaggggcggctccacccacactgggagagccgagctccgagaaagcatccctgcaagactgggcagttgcagaccaaccgagctcgagctactgtggcccccctgcctatgactcctgtcccaggcagagcctccaagatgccagcagccagcaaatcttcctcagatgccttcttcctgccttcagagtgggagaaggatccctcaaggccctaagtcaccagcaccagagcccagctgcccagcttaaccatatccatgctcaggttcacataatggctatctgtggtcagacttgctctctatccgcctgagcctctgtgagtgagggctgactgggaaacaacagccttcctgtcctgtttcagtgctgtcccactcctcaagtctggaagcgacacacccgagcctgtcctttctccagcaaggactttcattttctttagaatcatttgctactgtttacacaggtgaagattaaacacccagtaagcttctaccattgttaggagcattcataactcagaatttcttcttgtagctctgtgtaagcaggtggatgaggtcagatcacctttggtaaactggacctcaggaacaaggatgaggttttgaaagctcataaaagacaagtaagattgaaatccaagcctcatttcagagcctgtgcccttcccactacaccaccaggcttcagcctccaaagagacaagtgcttggtacctacatgcaaagtgtgtgtgctggggggtgggagggctgcccagaacaggggagaggatggtgtaaaaaaagacctactcctttcctgttaccctctccccacatgtaccaaccttcctgttgctccctccatccacagaataatagctaccatttataaaatgtttactctgggctgggagcagtggctcacacctgtaatcccaacactttgagaggctgaggtgggatgatcacttgaggccaggagttcgagaccagcctgagcaacactgtgagacccccccgccatctctacataaataataaaaacttttaaaaaaaca

SEQ ID NO: 152408 - DNA, 2457 bp, Homo sapiens
  Payload ID: 9973
  Gene Symbol: M1AP
  Gene Name: meiosis 1 associated protein
  Uniprot ID: Q8TC57
  ENST ID: ENST00000409585
  CDS Start-End: 53-1633
gtgtaaagaatatccagctggtggctacagttccccctctggttttgctgccatgcatcctgggcgaactactggtaaagggccctctactcacactcagattgaccagcaacctccacggcttctcattgtgcacattgctctaccgtcctgggctgacatctgcaccaacctctgtgaggctctgcagaacttcttctctctagcctgcagcttgatgggccccagccgcatgtccctgttcagtttatacatggtacaagatcagcatgagtgcatcctcccttttgtgcaagtgaaagggaactttgctaggttgcagacctgcatctcagaactccgcatgttacagagagaagggtgtttcagatcacaaggtgcttctctgcggctggcagtagaggatgggctccagcaattcaaacaatacagcagacatgtgaccacaagggcagctctgacctatacctccctggagattactattctgacttctcagcctggaaaagaggtggtcaaacagttggaggaagggttgaaagatacagacctagccagagtcaggaggtttcaggtcgttgaggtcacaaagggaatcctagagcacgtggactcagcgtctcctgttgaggataccagcaatgatgagagttctattctgggaactgacattgaccttcagactatagacaatgatatcgtcagcatggagattttcttcaaagcctggctacataacagtggaacagaccaagaacaaatccatcttcttctttcttcacagtgtttcagcaacatttccagacccagagataatccaatgtgtctgaaatgtgatctccaagagcgactgctctgcccatccctactcgctggcacagctgacggctccttgagaatggatgaccctaaaggagacttcatcacactctaccagatggcttcccagtcatcggcctctcattacaagctccaagtgatcaaggctttaaaatctagcgggctctgcgagtcattgacatatggactcccgttcatcctcagacctacaagctgttggcagctggactgggatgagctggagacaaatcagcaacatttccatgctttgtgtcacagcctgctgaaaagggaatggctgctgttagccaagggggaaccaccgggcccaggacacagccagagaattcctgccagcaccttctatgtgatcatgccgtcacactccctcacactgctggtaaaggcggtggccacgcgggaactgatgctgcccagcaccttccccctgctacctgaggacccacatgatgatagccttaagaatgtggagagcatgctggacagcctggagctggagcccacctacaaccccttgcatgttcaaagccacctgtactcacacctgagcagcatctatgccaagcctcaggggcggctccacccacactgggagagccgagctccgagaaagactgggcagttgcagaccaaccgagctcgagctactgtggcccccctgcctatgactcctgtcccaggcagagcctccaagatgccagcagccagcaaatcttcctcagatgccttcttcctgccttcagagtgggagaaggatccctcaaggccctaagtcaccagcaccagagcccagctgcccagcttaaccatatccatgctcaggttcacataatggctatctgtggtcagacttgctctctatccgcctgagcctctgtgagtgagggctgactgggaaacaacagccttcctgtcctgtttcagtgctgtcccactcctcaagtctggaagcgacacacccgagcctgtcctttctccagcaaggactttcattttctttagaatcatttgctactgtttacacaggtgaagattaaacacccagtaagcttctaccattgttaggagcattcataactcagaatttcttcttgtagctctgtgtaagcaggtggatgaggtcagatcacctttggtaaactggacctcaggaacaaggatgaggttttgaaagctcataaaagacaagtaagattgaaatccaagcctcatttcagagcctgtgcccttcccactacaccaccaggcttcagcctccaaagagacaagtgcttggtacctacatgcaaagtgtgtgtgctggggggtgggagggctgcccagaacaggggagaggatggtgtaaaaaaagacctactcctttcctgttaccctctccccacatgtaccaaccttcctgttgctccctccatccacagaataatagctaccatttataaaatgtttactctgggctgggagcagtggctcacacctgtaatcccaacactttgagaggctgaggtgggatgatcacttgaggccaggagttcgagaccagcctgagcaacactgtgagacccccccgccatctctacataaataataaaaactttt

SEQ ID NO: 152409 - DNA, 576 bp, Homo sapiens
  Payload ID: 9973
  Gene Symbol: M1AP
  Gene Name: meiosis 1 associated protein
  ENST ID: ENST00000422394
  CDS Start-End: 98-565
gagccgggaggaccaggtgagggggcctccgtcttccgaagacaggtgtaaagaatatccagctggtggctacagttccccctctggttttgctgccatgcatcctgggcgaactactggtaaagggccctctactcacactcagattgaccagcaacctccacggcttctcattgtgcacattgctctaccgtcctgggctgacatctgcaccaacctctgtgaggctctgcagaacttcttctctctagcctgcagcttgatgggccccagccgcatgtccctgttcagtttatacatggtacaagatcagcatgagtgcatcctcccttttgtgcaagtgaaagggaactttgctaggttgcagacctgcatctcagaactccgcatgttacagagagaagggtgtttcagatcacaaggtgcttctctgcggctggcagtagaggatgggctccagcaattcaaacaatacagcagacatgtgaccacaagggcagctctgacctatacctccctggagagagttctattctgggaactgacattgaccttcagactatagacaatgatatc

SEQ ID NO: 152410 - DNA, 789 bp, Homo sapiens
  Payload ID: 9973
  Gene Symbol: M1AP
  Gene Name: meiosis 1 associated protein
  ENST ID: ENST00000438226
  CDS Start-End: 127-408
gcgcctccgaacgcgcgggcgcacgctgagagccgggaggaccaggtgagggggcctccgtcttccgaagacaggtgtaaagaatatccagctggtggctacagttccccctctggttttgctgccatgcatcctgggcgaactactggtaaagggccctctactcacactcagattgaccagcaacctccacggcttctcattgtgcacattgctctaccgtcctgggctgacatctgcaccaacctctgtgaggctctgcagaacttcttctctctagcctgcagcttgatgggccccagccgcatgtccctgttcagtttatacatggtacaagatcagcatgagtgcatcctcccttttgtgagagttctattctgggaactgacattgaccttcagactatagacaatgatatcgtcagcatggagattttcttcaaagcctggctacataacagtggaacagaccaagaacaaatccatcttcttctttcttcacagtgtttcagcaacatttccagacccagagataatccaatgtgtctgaaatgtgatctccaagagcgactgctctgcccatccctactcgctggcacagctgacggctccttgagaatggatgaccctaaaggagacttcatcacactctaccagatggcttcccagtcatcggcctctcattacaagctccaagtgatcaaggctttaaaatctagcgggctctgcgagtcattgacatatggactcccgttcatcctcagacctacaagctgttggcagctggact

SEQ ID NO: 152411 - DNA, 544 bp, Homo sapiens
  Payload ID: 9973
  Gene Symbol: M1AP
  Gene Name: meiosis 1 associated protein
  ENST ID: ENST00000421985
  CDS Start-End: 119-544
gaacgcgcgggcgcacgctgagagccgggaggaccaggtgagggggcctccgtcttccgaagacaggtgtaaagaatatccagctggtggctacagttccccctctggttttgctgccatgcatcctgggcgaactactggtaaagggccctctactcacactcagattgaccagcaacctccacggcttctcattgtgcacattgctctaccgtcctgggctgacatctgcaccaacctctgtgaggctctgcagaacttcttctctctagcctgcagcttgatgggccccagccgcatgtccctgttcagtttatacatggtacaagatcagcatgagtgcatcctcccttttgtgcaagtgaaagggaactttgctaggttgcagacctgcatctcagaactccgcatgttacagagagaagggtgtttcagatcacaaggtgcttctctgcggctggcagtagaggatgggctccagcaattcaaacaatacagcagacatgtgaccacaagggcagctctgacctatacctccctggag

SEQ ID NO: 152412 - DNA, 2531 bp, Homo sapiens
  Payload ID: 9973
  Gene Symbol: M1AP
  Gene Name: meiosis 1 associated protein
  Uniprot ID: Q8TC57
  ENST ID: ENST00000536235
  CDS Start-End: 127-1707
gcgcctccgaacgcgcgggcgcacgctgagagccgggaggaccaggtgagggggcctccgtcttccgaagacaggtgtaaagaatatccagctggtggctacagttccccctctggttttgctgccatgcatcctgggcgaactactggtaaagggccctctactcacactcagattgaccagcaacctccacggcttctcattgtgcacattgctctaccgtcctgggctgacatctgcaccaacctctgtgaggctctgcagaacttcttctctctagcctgcagcttgatgggccccagccgcatgtccctgttcagtttatacatggtacaagatcagcatgagtgcatcctcccttttgtgcaagtgaaagggaactttgctaggttgcagacctgcatctcagaactccgcatgttacagagagaagggtgtttcagatcacaaggtgcttctctgcggctggcagtagaggatgggctccagcaattcaaacaatacagcagacatgtgaccacaagggcagctctgacctatacctccctggagattactattctgacttctcagcctggaaaagaggtggtcaaacagttggaggaagggttgaaagatacagacctagccagagtcaggaggtttcaggtcgttgaggtcacaaagggaatcctagagcacgtggactcagcgtctcctgttgaggataccagcaatgatgagagttctattctgggaactgacattgaccttcagactatagacaatgatatcgtcagcatggagattttcttcaaagcctggctacataacagtggaacagaccaagaacaaatccatcttcttctttcttcacagtgtttcagcaacatttccagacccagagataatccaatgtgtctgaaatgtgatctccaagagcgactgctctgcccatccctactcgctggcacagctgacggctccttgagaatggatgaccctaaaggagacttcatcacactctaccagatggcttcccagtcatcggcctctcattacaagctccaagtgatcaaggctttaaaatctagcgggctctgcgagtcattgacatatggactcccgttcatcctcagacctacaagctgttggcagctggactgggatgagctggagacaaatcagcaacatttccatgctttgtgtcacagcctgctgaaaagggaatggctgctgttagccaagggggaaccaccgggcccaggacacagccagagaattcctgccagcaccttctatgtgatcatgccgtcacactccctcacactgctggtaaaggcggtggccacgcgggaactgatgctgcccagcaccttccccctgctacctgaggacccacatgatgatagccttaagaatgtggagagcatgctggacagcctggagctggagcccacctacaaccccttgcatgttcaaagccacctgtactcacacctgagcagcatctatgccaagcctcaggggcggctccacccacactgggagagccgagctccgagaaagactgggcagttgcagaccaaccgagctcgagctactgtggcccccctgcctatgactcctgtcccaggcagagcctccaagatgccagcagccagcaaatcttcctcagatgccttcttcctgccttcagagtgggagaaggatccctcaaggccctaagtcaccagcaccagagcccagctgcccagcttaaccatatccatgctcaggttcacataatggctatctgtggtcagacttgctctctatccgcctgagcctctgtgagtgagggctgactgggaaacaacagccttcctgtcctgtttcagtgctgtcccactcctcaagtctggaagcgacacacccgagcctgtcctttctccagcaaggactttcattttctttagaatcatttgctactgtttacacaggtgaagattaaacacccagtaagcttctaccattgttaggagcattcataactcagaatttcttcttgtagctctgtgtaagcaggtggatgaggtcagatcacctttggtaaactggacctcaggaacaaggatgaggttttgaaagctcataaaagacaagtaagattgaaatccaagcctcatttcagagcctgtgcccttcccactacaccaccaggcttcagcctccaaagagacaagtgcttggtacctacatgcaaagtgtgtgtgctggggggtgggagggctgcccagaacaggggagaggatggtgtaaaaaaagacctactcctttcctgttaccctctccccacatgtaccaaccttcctgttgctccctccatccacagaataatagctaccatttataaaatgtttactctgggctgggagcagtggctcacacctgtaatcccaacactttgagaggctgaggtgggatgatcacttgaggccaggagttcgagaccagcctgagcaacactgtgagacccccccgccatctctacataaataataaaaactttt

SEQ ID NO: 152413 - DNA, 1694 bp, Homo sapiens
  Payload ID: 9974
  Gene Symbol: MEIOB
  Gene Name: meiosis specific with OB domains
  Uniprot ID: Q8N635
  ENST ID: ENST00000325962
  CDS Start-End: 11-1426
gattaaaaaaatggcaaactcctttgcagcgaggattttcactaccctttcagatctgcagacaaatatggctaatctgaaagttatcggtatagttattgggaaaacagatgtcaaaggctttccagacagaaaaaatattggatcagaaaggtacactttcagcttcaccattcgggattcaccagcacattttgtaaatgcagcttcctggggcaatgaagattacatcaagtctctttctgacagctttagggttggtgactgtgtgataattgaaaatcctctgatccaaagaaaggaaatagaaagagaagaaaaattcagccctgcaactcctagcaactgtaaactgttgctcagtgagaatcactcaacagtaaaagtttgttccagttatgaagtggacacaaagttactttctttgatacatttacctgttaaagagtctcatgattattattcactgggtgacattgttgcaaatggacacagtcttaatgggaggattattaacgtgcttgcagctgtgaaatcggttggagagccaaaatactttacaacttcagaccggagaaaaggccagaggtgtgaagttagactctatgatgaaacagagtcgtcttttgcgatgacatgttgggataatgaatccattctacttgcacagagctggatgccacgagaaacagtaatatttgcctcagatgtaagaataaattttgacaaatttcggaactgcatgacagcaactgtaatctcaaaaaccattattacaactaatccagatataccagaagctaacattctgctgaattttatacgagaaaataaagaaacgaatgttctggatgatgaaattgacagttatttcaaagaatccataaatttaagtacaatagttgatgtctacacagttgaacaattaaagggaaaagctttgaagaatgaaggaaaagctgatccttcctatggcatcctttatgcctacatttccacactcaacattgatgatgaaactacaaaagtagttcgaaatagatgttccagctgtggttatattgtaaatgaagcatctaacatgtgcacaacttgcaacaaaaactccttggactttaaatctgtctttctcagtttccatgtgctgattgatctgactgatcacacaggcacccttcattcctgtagtctcacaggaagtgttgctgaggagactttgggctgcacggtacatgagtttcttgcaatgacagatgaacagaaaacagcattaaagtggcaatttctcttggaaagaagcaaaatttatttaaaattcgttctatcacacagagcaaggagtggattgaaaattagtgtactctcgtgcaagcttgcagatcctactgaggcaagcagaaacttgtctggacaaaaacatgtttaaaacggtctatcattttgaactctggaaaagtataagagttttaactccctttaaaatggaatattaatttgaaaattatggggaaaattgcattttgtttacatgtggtgaacatgtttctagaaattgttatggtggaggtggtctgggtgagtctgaaggcctctctcatctgacctcccttcttagaaggcctcctactgtctttgccttgtctcctcccaagttggaaaatgtttacatgaattaataaacagatttaatcttc

SEQ ID NO: 152414 - DNA, 1792 bp, Homo sapiens
  Payload ID: 9974
  Gene Symbol: MEIOB
  Gene Name: meiosis specific with OB domains
  Uniprot ID: Q8N635
  ENST ID: ENST00000397344
  CDS Start-End: 196-1524
gctgaggacggggcggggcctcgcgctaacggtcgcgcggccgtcgcacctgcacgaggctgtggcccgagcgtcctgtggagaagccgcgaagcgcgggcgacccgggggtcgggcgggccaggtccgcgaggccgcggcggcagctgtgcaggcccggggagcagccggccgggcgagcctcggattaaaaaaatggcaaactcctttgcagcgaggattttcactaccctttcagatctgcagacaaatatggctaatctgaaagttatcggtatagttattgggaaaacagatgtcaaaggctttccagacagaaaaaatattggatcagaaaggtacactttcagcttcaccattcgggattcaccagcacattttgtaaatgcagcttcctggggcaatgaagattacatcaagtctctttctgacagctttagggttggtgactgtgtgataattgaaaatcctctgatccaaagaaaggaaatagaaagagaagaaaaattcagccctgcaactcctagcaactgtaaactgttgctcagtgagaatcactcaacagtaaaagtttgttccagttatgaagtggacacaaagttactttctttgatacatttacctgttaaagagtctcatgattattattcactgggtgacattgttgcaaatggacacagtcttaatgggaggattattaacgtgcttgcagctgtgaaatcggttggagagccaaaatactttacaacttcagaccggagaaaaggccagaggtgtgaagttagactctatgatgaaacagagtcgtcttttgcgatgacatgttgggataatgaatccattctacttgcacagagctggatgccacgagaaacagtaatatttgcctcagatgtaagaataaattttgacaaatttcggaactgcatgacagcaactgtaatctcaaaaaccattattacaactaatccagatataccagaagctaacattctgctgaattttatacgagaaaataaagaaacgaatgttctggatgatgaaattgacagttatttcaaagaatccataaatttaagtacaatagttgatgtctacacagttgaacaattaaagggaaaagctttgaagaatgaaggaaaagctgatccttcctatggcatcctttatgcctacatttccacactcaacattgatgatgaaactacaaaagtagttcgaaatagatgttccagctgtggttatattgtaaatgaagcatctaacatgtgcacaacttgcaacaaaaactccttggactttaaatctgtctttctcagtttccatgtgctgattgatctgactgatcacacaggcacccttcattcctgtagtctcacaggaagtgttgctgaggagactttgggctgcacgttcgttctatcacacagagcaaggagtggattgaaaattagtgtactctcgtgcaagcttgcagatcctactgaggcaagcagaaacttgtctggacaaaaacatgtttaaaacggtctatcattttgaactctggaaaagtataagagttttaactccctttaaaatggaatattaatttgaaaattatggggaaaattgcattttgtttacatgtggtgaacatgtttctagaaattgttatggtggaggtggtctgggtgagtctgaaggcctctctcatctgacctcccttcttagaaggcctcctactgtctttgccttgtctcctcccaagttggaaaatgtttacatgaattaataaacagatttaatcttc

SEQ ID NO: 152415 - DNA, 1884 bp, Homo sapiens
  Payload ID: 9974
  Gene Symbol: MEIOB
  Gene Name: meiosis specific with OB domains
  Uniprot ID: Q8N635
  ENST ID: ENST00000412554
  CDS Start-End: 196-1611
gctgaggacggggcggggcctcgcgctaacggtcgcgcggccgtcgcacctgcacgaggctgtggcccgagcgtcctgtggagaagccgcgaagcgcgggcgacccgggggtcgggcgggccaggtccgcgaggccgcggcggcagctgtgcaggcccggggagcagccggccgggcgagcctcggattaaaaaaatggcaaactcctttgcagcgaggattttcactaccctttcagatctgcagacaaatatggctaatctgaaagttatcggtatagttattgggaaaacagatgtcaaaggctttccagacagaaaaaatattggatcagaaaggtacactttcagcttcaccattcgggattcaccagcacattttgtaaatgcagcttcctggggcaatgaagattacatcaagtctctttctgacagctttagggttggtgactgtgtgataattgaaaatcctctgatccaaagaaaggaaatagaaagagaagaaaaattcagccctgcaactcctagcaactgtaaactgttgctcagtgagaatcactcaacagtaaaagtttgttccagttatgaagtggacacaaagttactttctttgatacatttacctgttaaagagtctcatgattattattcactgggtgacattgttgcaaatggacacagtcttaatgggaggattattaacgtgcttgcagctgtgaaatcggttggagagccaaaatactttacaacttcagaccggagaaaaggccagaggtgtgaagttagactctatgatgaaacagagtcgtcttttgcgatgacatgttgggataatgaatccattctacttgcacagagctggatgccacgagaaacagtaatatttgcctcagatgtaagaataaattttgacaaatttcggaactgcatgacagcaactgtaatctcaaaaaccattattacaactaatccagatataccagaagctaacattctgctgaattttatacgagaaaataaagaaacgaatgttctggatgatgaaattgacagttatttcaaagaatccataaatttaagtacaatagttgatgtctacacagttgaacaattaaagggaaaagctttgaagaatgaaggaaaagctgatccttcctatggcatcctttatgcctacatttccacactcaacattgatgatgaaactacaaaagtagttcgaaatagatgttccagctgtggttatattgtaaatgaagcatctaacatgtgcacaacttgcaacaaaaactccttggactttaaatctgtctttctcagtttccatgtgctgattgatctgactgatcacacaggcacccttcattcctgtagtctcacaggaagtgttgctgaggagactttgggctgcacggtacatgagtttcttgcaatgacagatgaacagaaaacagcattaaagtggcaatttctcttggaaagaagcaaaatttatttaaaattcgttctatcacacagagcaaggagtggattgaaaattagtgtactctcgtgcaagcttgcagatcctactgaggcaagcagaaacttgtctggacaaaaacatgtttaaaacggtctatcattttgaactctggaaaagtataagagttttaactccctttaaaatggaatattaatttgaaaattatggggaaaattgcattttgtttacatgtggtgaacatgtttctagaaattgttatggtggaggtggtctgggtgagtctgaaggcctctctcatctgacctcccttcttagaaggcctcctactgtctttgccttgtctcctcccaagttggaaaatgtttacatgaattaataaacagatttaatcttctacag

SEQ ID NO: 152416 - DNA, 807 bp, Homo sapiens
  Payload ID: 9974
  Gene Symbol: MEIOB
  Gene Name: meiosis specific with OB domains
  ENST ID: ENST00000496541
  CDS Start-End: 647-807
gcgcggccgtcgcacctgcacgaggctgtggcccgagcgtcctgtggagaagccgcgaagcgcgggcgacccgggggtcgggcgggccaggtccgcgaggccgcggcggcagctgtgcaggcccggggagcagccggccgggcgagcctcggatattggatcagaaaggtacactttcagcttcaccattcgggattcaccagcacattttgtaaatgcagcttcctggggcaatgaagattacatcaagtctctttctgacagctttagggttggtgactgtgtgataattgaaaatcctctgatccaaagaaaggaaatagaaagagaagaaaaattcagccctgcaactcctagcaactgtaaactgttgctcagtgagaatcactcaacagtaaaagtttgttccagttatgaagtggacacaaagttactttctttgatacatttacctgttaaagagtctcatgattattattcactgggtgacattgttgcaaatggacacagtcttaatgggaggattattaacgtgcttgcagctgtgaaatcggttggagagccaaaatactttacaacttcagaccggagaaaaggccagaggtgtgaagttagactctatgatgaaacagagtcgtcttttgcgatgacatgttgggataatgaatccattctacttgcacagagctggatgccacgagaaacagtaatatttgcctcagatgtaagaataaattttgacaaatttcggaactgcatgacagcaactgtaatctcaaaaaccattattacaactaatccagatat

SEQ ID NO: 152417 - DNA, 1857 bp, Homo sapiens
  Payload ID: 9974
  Gene Symbol: MEIOB
  Gene Name: meiosis specific with OB domains
  ENST ID: ENST00000470044
  CDS Start-End: 794-1588
accgtcttacacaataccaaccgcccatcaggttgtttcaaaggctttcagccactgactaatagaaaaagagactgcatacaacgtttcattcatgttttgctaggctagatacatttgttgtagcggtctcatatttgtaagtccgtggaaaaacctgaaagtatttttttcttgaaaatttttttgaaaaaaaagtaaaatgtcattaggagtgagaatcaggaatgatggattcacggtctagttgcaagactcatcacaggccattaacctctgaaaagcctttatctgcttcgatattggatcagaaaggtacactttcagcttcaccattcgggattcaccagcacattttgtaaatgcagcttcctggggcaatgaagattacatcaagtctctttctgacagctttagggttggtgactgtgtgataattgaaaatcctctgatccaaagaaaggaaatagaaagagaagaaaaattcagccctgcaactcctagcaactgtaaactgttgctcagtgagaatcactcaacagtaaaagtttgttccagttatgaagtggacacaaagttactttctttgatacatttacctgttaaagagtctcatgattattattcactgggtgacattgttgcaaatggacacagtcttaatgggaggattattaacgtgcttgcagctgtgaaatcggttggagagccaaaatactttacaacttcagaccggagaaaaggccagaggtgtgaagttagactctatgatgaaacagagtcgtcttttgcgatgacatgttgggataatgaatccattctacttgcacagagctggatgccacgagaaacagtaatatttgcctcagatgtaagaataaattttgacaaatttcggaactgcatgacagcaactgtaatctcaaaaaccattattacaactaatccagatataccagaagctaacattctgctgaattttatacgagaaaataaagaaacgaatgttctggatgatgaaattgacagttatttcaaagaatccataaatttaagtacaatagttgatgtctacacagttgaacaattaaagggaaaagctttgaagaatgaaggaaaagctgatccttcctatggcatcctttatgcctacatttccacactcaacattgatgatgaaactacaaaagtagttcgaaatagatgttccagctgtggttatattgtaaatgaagcatctaacatgtgcacaacttgcaacaaaaactccttggactttaaatctgtctttctcagtttccatgtgctgattgatctgactgatcacacaggcacccttcattcctgtagtctcacaggaagtgttgctgaggagactttgggctgcacggtacatgagtttcttgcaatgacagatgaacagaaaacagcattaaagtggcaatttctcttggaaagaagcaaaatttatttaaaattcgttctatcacacagagcaaggagtggattgaaaattagtgtactctcgtgcaagcttgcagatcctactgaggcaagcagaaacttgtctggacaaaaacatgtttaaaacggtctatcattttgaactctggaaaagtataagagttttaactccctttaaaatggaatattaatttgaaaattatggggaaaattgcattttgtttacatgtggtgaacatgtttctagaaattgttatggtggaggtggtctgggtgagtctgaaggcctctctcatctgacctcccttcttagaaggcctcctactgtctttgccttgtctcctcccaagttggaaaatgtttacatgaattaataaacagatttaatcttct

SEQ ID NO: 152418 - DNA, 605 bp, Homo sapiens
  Payload ID: 9974
  Gene Symbol: MEIOB
  Gene Name: meiosis specific with OB domains
  ENST ID: ENST00000460494
  CDS Start-End: 113-244
aagccgcgaagcgcgggcgacccgggggtcgggcgggccaggtccgcgaggccgcggcggcagctgtgcaggcccggggagcagccggccgggcgagcctcggattaaaaaaatggcaaactcctttgcagcgaggattttcactaccctttcagatctgcagacaaatatggctaatctgatattggatcagaaaggtacactttcagcttcaccattcgggattcaccagcacattttgtaaatgcagcttcctggggcaatgaagattacatcaagtctctttctgacagctttagggttggtgactgtgtgataattgaaaatcctctgatccaaagaaaggaaatagaaagagaagaaaaattcagccctgcaactcctagcaactgtaaactgttgctcagtgagaatcactcaacagtaaaagtttgttccagttatgaagtggacacaaagttactttctttgatacatttacctgttaaagagtctcatgattattattcactgggtgacattgttgcaaatggacacagtcttaatgggaggattattaacgtgcttgcagctgtgaaatcggtaagttaaaaccccgacaaagc

SEQ ID NO: 152419 - DNA, 507 bp, Homo sapiens
  Payload ID: 9975
  Gene Symbol: MEIG1
  Gene Name: meiosis/spermiogenesis associated 1
  Uniprot ID: Q5JSS6
  ENST ID: ENST00000378240
  CDS Start-End: 31-297
gatattattgataataaggcctctgtaaccatggctagttctgacgtaaaaccaaaatcagtaagtcatgccaaaaaatggtcagaagagatagaaaatctgtacagatttcaacaagcaggatatcgggatgaaaccgaatatagacaagtgaaacaagtttctatggtagatcgttggccggagacaggatatgtgaagaaacttcagagaagggacaatacgttctattactacaacaaacagagggaatgtgatgacaaagaagtccacaaagtgaaaatttatgcttactagcctgtcttctttgtattacttgtcaattatattttaagtattcatcatttccttctacatcatgtgtttgtcatttgatgaaataattcaagatgcagtctgcagtttaatgttttgtgaaacacaaaagccatgagaattggtatctgctaatcaccttgtcctgttctaagaactggctgcagatgcattaaagttgtactttcttgg

SEQ ID NO: 152420 - DNA, 625 bp, Homo sapiens
  Payload ID: 9975
  Gene Symbol: MEIG1
  Gene Name: meiosis/spermiogenesis associated 1
  Uniprot ID: Q5JSS6
  ENST ID: ENST00000407572
  CDS Start-End: 149-415
cctgctcgcggatcccgagtagagaacgcaagcacccacgcccgcctgcaagctcccgggcgcccccggcctctcctgctcggcggaacgaggataacccagtagagccggacccagggatattattgataataaggcctctgtaaccatggctagttctgacgtaaaaccaaaatcagtaagtcatgccaaaaaatggtcagaagagatagaaaatctgtacagatttcaacaagcaggatatcgggatgaaaccgaatatagacaagtgaaacaagtttctatggtagatcgttggccggagacaggatatgtgaagaaacttcagagaagggacaatacgttctattactacaacaaacagagggaatgtgatgacaaagaagtccacaaagtgaaaatttatgcttactagcctgtcttctttgtattacttgtcaattatattttaagtattcatcatttccttctacatcatgtgtttgtcatttgatgaaataattcaagatgcagtctgcagtttaatgttttgtgaaacacaaaagccatgagaattggtatctgctaatcaccttgtcctgttctaagaactggctgcagatgcattaaagttgtactttcttgg

SEQ ID NO: 152421 - DNA, 2023 bp, Homo sapiens
  Payload ID: 9976
  Gene Symbol: MNS1
  Gene Name: meiosis-specific nuclear structural 1
  Uniprot ID: Q8NEH6
  ENST ID: ENST00000260453
  CDS Start-End: 166-1653
acttttggtcgagcggagggcgcgcagctccaccgttgccaagacgccgcgtaaacacccgagcgcgcgcagccaggtgcgctccttggggctgctggctgctgcgtttgcggcgggaggtggtggccgcggtcccacgagagggggtatttttcgtcagccaagatgggttccaaaaggagaaatttgagctgtagtgaaaggcatcagaaattagtagatgaaaactactgcaaaaaattacatgtccaagctctaaaaaacgtcaacagtcaaatcaggaatcaaatggtgcagaatgaaaatgataaccgtgttcagcgcaagcaatttctcagattattacaaaatgaacaatttgagttggatatggaagaggccattcaaaaggcagaagaaaacaagagattgaaagaactccagctcaaacaagaagaaaaactggctatggaattggcaaaactgaaacatgaaagtctaaaggacgaaaagatgaggcaacaagtaagagaaaacagcattgagcttagagaattggagaagaaattaaaagcagcttacatgaataaagaaagggcagctcagattgctgaaaaggatgccattaaatatgaacaaatgaaacgtgatgctgaaatagccaaaaccatgatggaagaacacaagagaataataaaggaagagaatgctgcagaagacaaacgaaacaaagcgaaagcacagtactatcttgacttagagaaacaacttgaagaacaagaaaaaaaaaagcaggaagcttatgagcagctgctaaaagagaaactcatgattgatgaaattgttaggaagatctatgaagaagatcagttggaaaaacaacaaaagttagaaaaaatgaatgcaatgcgaaggtatatagaagagtttcagaaagagcaggctctctggagaaaaaagaaacgtgaggagatggaagaagaaaacagaaaaatcatagagtttgctaacatgcagcagcaaagagaagaagatcggatggcaaaagttcaagaaaatgaggagaaaaggctacagcttcagaatgcgttgacacagaaattagaagaaatgctgcggcaacgtgaagatttggaacaagtgcgacaagaattataccaggaagaacaagctgaaatatataagagcaagctaaaagaagaagcagaaaagaaattgagaaagcaaaaagagatgaagcaagattttgaagaacaaatggccttgaaggaattagtgctacaggctgcaaaagaggaagaggagaactttagaaaaactatgctagctaaatttgctgaggatgatcgaatagaattaatgaatgctcagaaacaaagaatgaagcagctggaacacaggagggctgtggaaaaacttattgaagagcgtcgccaacaattccttgcagacaaacaacgtgaactagaagagtggcagttgcagcaaaggcggcaaggatttattaatgcaattattgaagaagaaaggctaaaacttcttaaagagcatgctacaaacttactaggctatctccctaaaggagtatttaaaaaagaggatgatattgatctgcttggtgaagagttcaggaaagtatatcaacaaaggagtgaaatttgtgaagagaaatgatatcatcaaaattgggtaaagcatagattttttgcatgttaccactagatgtcagcataacttttgttttacagttcagtggcattaggtatccattgtctgtttggattttgtaaatcatcactgaatttcataacttgtaaacaattatcagatacaaattaattttaatcaagctgttatttttgtactgataatttcaaaatccgatttctacaacactacagagcactgtttgcatccccatcctcaagacagtatatttaccttgactaatacagaactctaccccaaagtgaactgccttctgtctgtgtttacgaactttacttacttgatttagccagggaaataaatatttggaattttc

SEQ ID NO: 152422 - DNA, 4020 bp, Homo sapiens
  Payload ID: 9977
  Gene Symbol: MEI1
  Gene Name: meiotic double-stranded break formation protein 1
  Uniprot ID: Q5TIA1
  ENST ID: ENST00000401548
  CDS Start-End: 41-3865
gcgggaaagagtgccgcctcagctgagggcaagcgaggagatggctgtgaggcaggcggcgacggcgggcactcccgggcccaggagagaggaagaggcggcgcttctattcgagagggcccattaccggcacgacccgcgctggctgctgcccgtgaccccccgcctgtgcctggcctgcgcgctggagctgctgccggaccccggcgtgtcgttagtgcgcaagaagcacatgttgtcctgcttccaagatgcccttgtgaggcatacctccctggtcacgcaactggtgtctcaggatcagagagtctgcatccacttcataagtgtgctttttggactattatgcagcatggaagatgggagtgtgacagacctctgtattgaagtccttattcagatcacaacgcagctgaagctggagcagactatccgttgcctgctggatgagtgccacaaagagctgtgtaacatgccctccatgcgaggcagcctggccaccctgacccttcttggcaagttggtggatgccatccctgctctggcagacgagcttgtaatggagcatggcaacctgatggagcatctgttgagaggcttagtataccccagtgagggcatacaagcttctgtctgttacctttatgggaagctatactcctcaccagtggcagctgagatgctttcaggacacttccgtgagaagctttttcccctcttcctttccatcctggatggtgcccagacaaaggagctgcagattaactgcttgggtttgctgaggcagctgttgaagtatgatctctttgtgtccatgatcatgaaccaggatggactgggagaaagtgctaagaatatcgaagggtcatcaggaaatacctcactgcctttggtgctcaaaaagcttctcctctctagagatgaaaccctgcaggtggccagtgctcactgtataactgcggtgcttgtccactccccagcaaagcatgcgtcagccttcatccacgctgacatcccagagttcctctttgagcatctttcttcttccagtgaagtgctcgtctggtccagctgtaactgcttgacactcctggtagaagagccactctttttttccaagtgccacacggtgtatgggatcgaggcagtggtgaggagcctgcagggaagcctgaagatgaacaacatagagctgcacaagcagggcctgctgcttttcgctgaaatcctgacccggcagccagaggagatcaagctgttcacaagctcagccatgtgcagagatgctggccgtgccctccaagaagcagttagcagccctgtgctggaggtggctgctgaggccttgaaggccacttctgcttttctgaggaaggaccatcagagcactccacctgtgcagtatggggaactgcaggctttgctagaagccatgctaaaccgatgtgcggagttttcccagaccttgctgagcaggaggcccctgggccatgcctccagtagagattcagagaaggccattcttcaaaggggaaagttcctcctcagcactctggagggatttagaagtgcctgcaggttggctatagaattccagagtgagccttcagcccaggagaatccattcacagctcccagcgccaagaaggaagacaccttggaggccttctcagaatttcttctcagtgcctgtgactcgctgtgtatccccatggtgatgagacacttggagcagaccacccacccagctttgatggaagttttcctctcaattctacataacctctttgtcatcgttccccacatgaaggagaagttttccaagaagcttgcttcctcatccttcatacgactgaccctggagctgaaggccaggttttgcagtggtctgagtcactcagccctaaaccaggtgtgttccaatttcctctactatatgtgcctcaaccttctctcagctccagagaagacaggaccaccttccaaagaagaactctctgcagtgtctgagctcctgcagcatgggctgccccagataagcagcaggagccctgaaagccttgccttcctgtctgatcgccagtacatggagggagctgctcgccagagacagtactgcatcctgctcctcttctacttggcctacatccatgaagacaggtttgtctcagaggcagagttatttgaggctgtgcaaagcttcctcctgtcgctgcaggaccagggcgagcgccccccactggtggtcttcaaagcctccatctatctgcttgcaatctgccaggacaaagacaatacactacgtgagactatggtcagtgcaatcagaaaattcctagaaggcatcccagacctgcagctagtctatactcaccatccgctcctgctcaggttctttctgttgtatccagagctcatgagtaggtatgggcaccgtgtcctggaactttggttcttctgggaagagagcagctatgaggaactggatgatgtcacctctgctgggcagcccgcccttcctgccagcttagtagtcctgttccagttgctcagaagcatccccagcatcctgctcatcttgctggacctcatctattccagcccagtggacacagctcacaaggtactgattagcctgaggaccttcctgaggaggaatgaggatatccaagtgggcggtcttatccgaggccacttcctgctgatcctgcagcgtctgctagtggagcatggggcatccccatcaggagcctcggggaacctaccattgctgctgagcctcctctccctgatgcagctcaggaatgtgtcagagcaagaactggacagcgtggccatgaagctccttcaccaagtaagcaagctgtgtgggaagtgcagccccactgacgtggacatcctgcagccctccttcaacttcctgtattggagccttcatcagaccacacccagcagtcagaaaagagctgctgcagtgctcctgagcagcacaggcctgatggagcttctggagaagatgctggccctcaccttggcaaaggcagattctcccaggactgcactcctctgctctgcctggctgctcactgcctccttctctgcccagcagcacaagggcagtttgcaggttcaccagacactctctgtggaaatggaccaagtattgaaggctctcagctttccaaagaaaaaggctgcactactctcagctgccatcttatgcttcctgcggacagccctgcgacaaagcttttcctctgccctggtagccctggtgccctcaggggcccagccactgccagccaccaaggacactgtcctagctccactgcgaatgtcgcaagtccggtccctggtcattgggctgcagaacctcctggtgcagaaggaccctctattgtcccaggcctgtgttggctgcctggaggccttgcttgactacctggatgcccggagcccagacattgctctccacgtggcctcccagccttggaatcggtttttgctgtttaccctcttggatgctggagagaattccttcctcagacctgagattttgaggctcatgaccctgtttatgcggtaccggagtagcagtgtcctctctcatgaagaggtgggtgatgttctgcaaggtgtggctttggctgacctgtctaccctctcgaacaccacactccaggccctgcatggcttcttccagcagctccagagcatgggacacctggctgaccacagcatggcccagaccctgcaggcctccttggagggccttccccctagcacctcctcaggccagccacccctgcaggacatgctctgcctgggaggggtggctgtatccctgtcccacatcagaaactgatcctcaggacttgaaggcccagaagtggagagagaatgagacctggagacaaagggcataattgttggggaaatggatgacagctgaagctattcatatggagccatatactctattgttgaaatagaataaggaaataaaatgatacactcaca

SEQ ID NO: 152423 - DNA, 874 bp, Homo sapiens
  Payload ID: 9977
  Gene Symbol: MEI1
  Gene Name: meiotic double-stranded break formation protein 1
  Uniprot ID: Q5TIA1
  ENST ID: ENST00000403492
  CDS Start-End: 1-717
atgctggccctcaccttggcaaaggcagattctcccaggactgcactcctctgctctgcctggctgctcactgcctccttctctgcccagcagcacaagggcagtttgcaggttcaccagacactctctgtggaaatggaccaagtattgaaggctctcagctttccaaagaaaaaggctgcactactctcagctgccatcttatgcttcctgcggacagccctgcgacaaagcttttcctctgccctggtagccctggtgccctcaggggcccagccactgccagccaccaaggacactgtcctagctccactgcgaatgtcgcaagtccggtccctggtcattgggctgcagaacctcctggtgcagaaggaccctctattgtcccaggcctgtgttggctgcctggaggccttgcttgactacctggatgcccggagcccagacattgctctccacgtggcctcccagccttggaatcggtttttgctgtttaccctcttggatgctggagagaattccttcctcagacctgagattttgaggctcatgaccctgctccagagcatgggacacctggctgaccacagcatggcccagaccctgcaggcctccttggagggccttccccctagcacctcctcaggccagccacccctgcaggacatgctctgcctgggaggggtggctgtatccctgtcccacatcagaaactgatcctcaggacttgaaggcccagaagtggagagagaatgagacctggagacaaagggcataattgttggggaaatggatgacagctgaagctattcatatggagccatatactctattgttgaaatagaataaggaaataaaatgatacactcacata

SEQ ID NO: 152424 - DNA, 346 bp, Homo sapiens
  Payload ID: 9977
  Gene Symbol: MEI1
  Gene Name: meiotic double-stranded break formation protein 1
  ENST ID: ENST00000423900
  CDS Start-End: 1-190
ccggagtagcagtgtcctctctcatgaagagctccagagcatgggacacctggctgaccacagcatggcccagaccctgcaggcctccttggagggccttccccctagcacctcctcaggccagccacccctgcaggacatgctctgcctgggaggggtggctgtatccctgtcccacatcagaaactgatcctcaggacttgaaggcccagaagtggagagagaatgagacctggagacaaagggcataattgttggggaaatggatgacagctgaagctattcatatggagccatatactctattgttgaaatagaataaggaaataaaatgatacactcacat

SEQ ID NO: 152425 - DNA, 2326 bp, Homo sapiens
  Payload ID: 9977
  Gene Symbol: MEI1
  Gene Name: meiotic double-stranded break formation protein 1
  ENST ID: ENST00000540833
  CDS Start-End: 806-2326
gcctcagctgagggcaagcgaggagatggctgtgaggcaggcggcgacggcgggcactcccgggcccaggagagaggaagaggcggcgcttctattcgagagggcccattaccggcacgacccgcgctggctgctgcccgtgaccccccgcctgtgcctggcctgcgcgctggagctgctgccggaccccggcgtgtcgttagtgcgcaagaagcacatgttgtcctgcttccaagatgcccttgtgaggcatacctccctggtcacgcaactggtgtctcaggatcagagagtctgcatccacttcataagtgtgctttttggactattatgcagcatggaagatgggagtgtgacagacctctgtattgaagtccttattcagatcacaacgcagctgaagctggagcagactatccgttgcctgctggatgagtgccacaaagagctgtgtaacatgccctccatgcgaggcagcctggccaccctgacccttcttggcaagttggtggatgccatccctgctctggcagacgagcttgtaatggagcatggcaacctgatggagcatctgttgagaggcttagtataccccagtgagggcatacaagcttctgtctgttacctttatgggaagctatactcctcaccagtggcagctgagatgctttcaggacacttccgtgagaagctttttcccctcttcctttccatcctggatggtgcccagacaaaggagctgcagattaactgcttgggtttgctgaggcagctgttgaagtatgatctctttgtgtccatgatcatgaaccaggatggactgggagaaagtgctaagaatatcgaagggtcatcaggaaatacctcactgcctttggtgctcaaaaagcttctcctctctagagatgaaaccctgcaggtggccagtgctcactgtataactgcggtgcttgtccactccccagcaaagcatgcgtcagccttcatccacgctgacatcccagagttcctctttgagcatctttcttcttccagtgaagtgctcgtctggtccagctgtaactgcttgacactcctggtagaagagccactctttttttccaagtgccacacggtgtatgggatcgaggcagtggtgaggagcctgcagggaagcctgaagatgaacaacatagagctgcacaagcagggcctgctgcttttcgctgaaatcctgacccggcagccagaggagatcaagctgttcacaagctcagccatgtgcagagatgctggccgtgccctccaagaagcagttagcagccctgtgctggaggtggctgctgaggccttgaaggccacttctgcttttctgaggaaggaccatcagagcactccacctgtgcagtatggggaactgcaggctttgctagaagccatgctaaaccgatgtgcggagttttcccagaccttgctgagcaggaggcccctgggccatgcctccagtagagattcagagaaggccattcttcaaaggggaaagttcctcctcagcactctggagggatttagaagtgcctgcaggttggctatagaattccagagtgagccttcagcccaggagaatccattcacagctcccagcgccaagaaggaagacaccttggaggccttctcagaatttcttctcagtgcctgtgactcgctgtgtatccccatggtgatgagacacttggagcagaccacccacccagctttgatggaagttttcctctcaattctacataacctctttgtcatcgttccccacatgaaggagaagttttccaagaagcttgcttcctcatccttcatacgactgaccctggagctgaaggccaggttttgcagtggtctgagtcactcagccctaaaccaggtgtgttccaatttcctctactatatgtgcctcaaccttctctcagctccagagaagacaggaccaccttccaaagaagaactctctgcagtgtctgagctcctgcagcatgggctgccccagataagcagcaggagccctgaaagccttgccttcctgtctgatcgccagtacatggagggagctgctcgccagagacagtactgcatcctgctcctcttctacttggcctacatccatgaagacaggtttgtctcagaggcagagttatttgaggctgtgcaaagcttcctcctgtcgctgcaggaccagggcgagcgccccccactggtggtcttcaaagcctccatctatctgcttgcaatctgccaggacaaagacaatacactacgtgagcaacttcattgcagtttgatcagcatttcctaa

SEQ ID NO: 152426 - DNA, 4800 bp, Homo sapiens
  Payload ID: 9978
  Gene Symbol: MEI4
  Gene Name: meiotic double-stranded break formation protein 4
  Uniprot ID: A8MW99
  ENST ID: ENST00000602452
  CDS Start-End: 15-1172
ggacaaaagccaggatggatgttcaaaaatggtatttgagaacttcaaagctggctctggccttggcaattatccgctcaaaaccagcagacaaaagcagcagagaatacacagagcaccttgctatgttgctgtctgaggagcagtcaaaatggagatcaaaagttgaaatcttggaagctgaagttatgcaattacgtcaaaaacttcttgtgagcaggctttgttcaggatcctttaagagtggatacgtttcctcccagttggaggctcaggaacctaagagttctgaaagtacattaacttcgatggaagattctggatgtgatttgtcgaatgagcagagaactgaatcctcagacctgtcccagcactttgtggaaagctgtacccccactcactttccaccactgcctcttgtgaaaagaccttgtgctatcctgcaaaatcctttgtcttctcacatgcaattcttgcaatatctacttgaattaaagaacttgacagaatcaggtaatcttaaaagagacttaacccactttgaaaaagactcttccacagtctctgattctgtttttcaattgctggatggcctgatcactttttaccgtaatcccaaacttcctttttcaagattttggacagaagctgttggtactttagctagtctgatcagtgactataacttatctagtcatattcttaaaaagtgttccaagaagttggaagaatttgagaaaaccctactacatgctattttaggaaacaatcatataaatcagtttcaggtgcagcattatgtctctcagagtctggttaccttgggaaattgcagcttgttgagaaaatctattatatctctgcttctatcagaagtaaatggctttgctgatgatctgggagccatcaatcaggagcaagccagttatgatgtgtcacgctatgaaaacattttctacctgttctgggttctggagcagcttcttcaaaaggaaaccgaagaaggcaacacttcaagtataggtcatgatgaccaagaaatcaagaaatttcttcagaagcatgatgaaactattttccaactttctgatgcatttcctttgtttactttttatttatggagagtgggcattcttttgagctcagcacagatagaaactcttagaaaataactccattccttagcaatttaccacgtttgaagcataataaagtagaatatatgaaaatctcatactgaaaagattttcaatagtattttaattagcattttagaattgatctctaaatataattatcaattcaacttaatggttagtcttaaattgtatgaaattttatgagtcatatttctatactaaaatcagccagtttcggttggtaatgccatccttattcccatgtaactgtatcttatttcactcaatatagtttagctctattattctgtaaaatggaccattaattgtctgtcccttaaaagatattgaagttgtaaaagatttccatataattgatgctaaatggtaatcaaagaaagagatttttaaagaagtttagttgcattatcaacacaaagtgttggaatataagaagtggtcataaatgcaatttttaaaactttttcttacatagttgaacttatatcattgctttcaccttagacgagaatcatatagaagtagaacttttttaacatttggaaacttaattgctttttatttatttcaatttcatatggctaatacatttgtcgagctcttttgaaaatactattaattagttgtttaaaatgttctttgtttttcaacaaatacttgtttcaattctgttaattaaatatgttataatagtcttgtaattgttaaatagtatacaattaagtcactagacatattttataaattctaatatccatctaaaagtgaaatttatagttatttggtggaatttttcagttatacaatttcattgacttcatttcaatgattaaaatcataaccgcaaacttaatgagcatatgttacatttcctatagtgccatttagggaacacaaaatataaatttcctttattaatgatatgtgatggtgtttcataagttaattagcattcctaaatgtcgttggcattaaaagtaatcttgataattccatctacaatgtatatacaattatgtcatctggcacaaacaattatctttggaattatttctagcatttttgaaaagataatgcctttttgataatcctgaaactacatgtatgtcagtcagcttttgttatgtgacagatagataatcaatcacaaaatatctatcagtggcatacaacaataatatttctcagatatatgcaggtcactcaaggatcagctgatttggactggacttgactttaatgaaaagctctgctgaggttgcacataccacaggaataggcttcttgctaaaagtcaggctttcttctcttccacatgtgcatattctgagaaccagacttgggggatagtagcttctcagtggaagctcctctcatggcagtggcaattgagcaagacgaaaggctaggctgagaaatgtcacattagcacttccatccacatgcattgtcaaagtacatcaaatggtcaagcccaaagaaaagtgactgacaggggagtagacttgagtgggagaacttgcagttacagggcaatgagcatggatgtaggtaggtaattattagggccaataatttacttcacaacaagtaccagttgaatacaagaagtatattccaaatcttggattaggagggatttttctaatgtctgattcctgtgaacacctgtgaaggcttatggaagtcacttcagttgatatagcattacacaaaatccactttccatgacaccttcatcttctttcattgtgattaaacaagattggtaaatacacaagtatcagcaatggccctttccctattgcagccagccaacgtaatgatcagctaagagacttttggagctacaacaaatttattaatttcagtggtctccaaggcttcaaggtctgaaaattagcctaggaaatatatttattataaaagaagatgcaagatgttgggatcactgtgaatgcacaaaatggagaaacattttatttccatttggtatccattttatataaacatttaacttccaccaagtatatgatactttaattatcctgggtttcagtctatatcagagtgaatggtgtagtaaattagtattaaggtccaaatctactggtcaaaaagaagataaaatgataaaatgagacatttttatctgtgtttcagtaaagcagtgaattaatgaatgatttaaactggtattacaatgtttaagaatgttataacagtttatatttaggtaatgtctaactttagaattaaggttttagggataagagtaatggagtcagtagtaattgggcagcattgaaactggatataagataggataggaaataaagagaaccatagaatgatcataaaaatgaagcaaataaaaagtgatgataattgctataactcttatactatttaatataagctataataaatatatgataatatattttatatgagagtaaatatatattaaatattttatatacatttatataataaaatatatgaataagtaatattatacatatatatacgatatgtataataaataccaaatagccaggtacttacctaagcattttacatatattaaactgtttgattctcccagcacctgtaatgagaaaggtacgattatttcctgaatctgtattttagagatgaagaactcagaacttgcccaagttcacaacaccaggaagtggcagttaggtttcatcctgaggcagtccatcttccaattccacactcctactttactgcactgcctgttatgtgcagctctcctggcacttcagtaaactttcacaaacacagcttctttgcaattgtcatcaaagctttatacatgcttaactatgaaccttaaggcacaacagtggaaattactagcttatgattagcttattttggattttttaattgctgtaaacaagttgtcctatctataagtaaaccagaggaacagcatctttgaccttttcagggttgtagcatcttgctactcaagactgtagccaagttacagattgtcttcaaacgataatgtcctaaaaggtacagagctccctccagaggtgtttaggtagactgtgaggctgtaatgataagcaaaatggggagagaaaacaaatctgactggtttgttcttggaaaaatatatacgattatctcacaggccttgtactttttaatggtatttgttgtcttttagccaaggtcagcatatttcaagagaggcagggaaacaaggcatttgcatttccaaaattttatgtacatttacagattttctgaacgccatattatggggaaaatattgacagctctgctttattgtaacctaatttcatttattcatcaaatatgaagcaccaattgtctacaaaccaattatttgcaaaaataaaacatactaagctttaacttttgtcagatttatgaaaccaagctttctcttagcagtcaatataatgacccaactacatcaatatttgctgaaggagataattaacttgttaatgtttatctaatattgaaaaaatatataggattttattattgttaaaagttaattgattccgaattatttatagaattgtataatacaaaatttatctggttaataaatatactggtcttg

SEQ ID NO: 152427 - DNA, 1438 bp, Homo sapiens
  Payload ID: 9979
  Gene Symbol: MEIKIN
  Gene Name: meiotic kinetochore factor
  ENST ID: ENST00000616644
  CDS Start-End: 194-1195
gagataaaagcgcgggagcgaggcccggcggctccagttctggggcttttgctttcgctcgattagttgctgtgaggctgctccgcgggcctcgcctggacgctgactccctgtgacttagccctgatcctcaggaaggcaggccatcgagagtccagaggcacccgtggcctgggggtagggtgggatagcaatgtggccgctacgggtctatacccgcaaaaagcgggagggtcagaggctcaatctcaccccgacgccagacctaggctctccagcgaaggccgaggccccgccaggttcgaagagaaaaggcaaagtgcacggcttgtcgaagattgcagagaaagcagagcggagcaggcagggaggtagcggctctgggccgttcagccctcgcttaggagttacaggagagaaaagcctgcaagaaaataggtctagtgaagacacccaggatgagaagattgcatcgttgcgtgaatcagttactgatgacctccaggttgatagtagttcatcaaatagtgaactagtatcaggattaagtttgcaccatggtatggccagttctcttctgagctattcagtcacagactcttatgcagaatacaagagttttgaagagagctttccatcacctgaactgttcagaaaatcagattatttagactgggagtgtcccaacttggaagaacacatgcagtggaagaattctactcttctggataccagtaaagcagtagcgatagagaaggcaccacagttttcaaatgtctcagcaattttcagtacctcttcagaagactatcagaaatgccatagaaaaacagtgatgacagtagcagatcaaaatgtttctccaaaagcaaagtgtgcttcaaattcagaatcagataatgcagcttgtgagattttacttgctgagaaaacttgcccttcaacccctgaaaaaacaaagaaaaaaaaaacaaattccagtactcctggtaagaaaaacagaggccttttaacaagtactccatcttcagagacagctggttttgtgtttcctgcaaatgcatcagaaatatgttgtattattagaacatcaccaggaactagacaagtgaaaaataaaggtgttattgtaaagaagaagaaatattctcttcctaaggatacccctcaagatatcataataaaaatggcatgaaaaaacagctgtggctgaattttcaccactttgaagacaggagtgtgaagtcaaagtctataaagcagaatgtctgcctgaaattatatgaaattaaaaattaaaaattctccagttatttgtgatatatctctatgttgaaattctactgaggttcttgtcatttacttttaatcagttaagaaaaaaaattattccatatgcttcttaaatatatgtatttatattaaaagataaagaacc

SEQ ID NO: 152428 - DNA, 427 bp, Homo sapiens
  Payload ID: 9979
  Gene Symbol: MEIKIN
  Gene Name: meiotic kinetochore factor
  ENST ID: ENST00000439905
  CDS Start-End: 1-314
tgagaaaacttgcccttcaacccctgaaaaaacaaagaaaaaagcaaattgatttgtcctcagtgcaaaaagcatcttttgaagaactatttccaaatgtcagcaattatgttaattcaaatgaaattgttcctgtgtcaagtttgcaggaaaattcttcaaatgagtttcctgcaaatgcatcagaaatatgttgtattattagaacatcaccaggaactagacaagtgaaaaataaaggtgttattgtaaagaagaagaaatattctcttcctaaggatacccctcaagatatcataataaaaatggcatgaaaaaacagctgtggctgaattttcaccactttgaagacaggagtgtgaagtcaaagtctataaagcagaatgtctgcctgaaattatatgaaattaaaaattaaaaattctcc

SEQ ID NO: 152429 - DNA, 1315 bp, Homo sapiens
  Payload ID: 9979
  Gene Symbol: MEIKIN
  Gene Name: meiotic kinetochore factor
  Uniprot ID: A0A087WXM9
  ENST ID: ENST00000442687
  CDS Start-End: 194-1315
gagataaaagcgcgggagcgaggcccggcggctccagttctggggcttttgctttcgctcgattagttgctgtgaggctgctccgcgggcctcgcctggacgctgactccctgtgacttagccctgatcctcaggaaggcaggccatcgagagtccagaggcacccgtggcctgggggtagggtgggatagcaatgtggccgctacgggtctatacccgcaaaaagcgggagggtcagaggctcaatctcaccccgacgccagacctaggctctccagcgaaggccgaggccccgccaggttcgaagagaaaaggcaaagtgcacggcttgtcgaagattgcagagaaagcagagcggagcaggcagggaggtagcggctctgggccgttcagccctcgcttaggagttacaggagagaaaagcctgcaagaaaataggtctagtgaagacacccaggatgagaagattgcatcgttgcgtgaatcagttactgatgacctccaggttgatagtagttcatcaaatagtgaactagtatcaggattaagtttgcaccatggtatggccagttctcttctgagctattcagtcacagactcttatgcagaatacaagagttttgaagagagctttccatcacctgaactgttcagaaaatcagattatttagactgggagtgtcccaacttggaagaacacatgcagtggaagaattctactcttctggataccagtaaagcagtagcgatagagaaggcaccacagttttcaaatgtctcagcaattttcagtacctcttcagaagactatcagaaatgccatagaaaaacagtgatgacagtagcagatcaaaatgtttctccaaaagcaaagtgtgcttcaaattcagaatcagataatgcagcttgtgagattttacttgctgagaaaacttgcccttcaacccctgaaaaaacaaagaaaaaaaaaacaaattccagtactcctggtaagaaaaacagaggccttttaacaagtactccatcttcagagacagctggttttgtgattgatttgtcctcagtgcaaaaagcatcttttgaagaactatttccaaatgtcagcaattatgttaattcaaatgaaattgttcctgtgtcaagtttgcaggaaaattcttcaaatgagtttcctgcaaatgcatcagaaatatgttgtattattagaacatcaccaggaactagacaagtgaaaaataaaggtgttattgtaaagaagaagaaatattctcttcctaaggatacccctcaagatatcataataaaaatggcatga

SEQ ID NO: 152430 - DNA, 968 bp, Homo sapiens
  Payload ID: 9980
  Gene Symbol: MND1
  Gene Name: meiotic nuclear divisions 1
  Uniprot ID: Q9BWT6
  ENST ID: ENST00000240488
  CDS Start-End: 90-707
agtcggcgccaaaatcaaacgcgtcctggcctgtcccgcccctctccccaagcgcgggcccggccagcggaagcccctgcgcccgcgccatgtcaaagaaaaaaggactgagtgcagaagaaaagagaactcgcatgatggaaatattttctgaaacaaaagatgtatttcaattaaaagacttggagaagattgctcccaaagagaaaggcattactgctatgtcagtaaaagaagtccttcaaagcttagttgatgatggtatggttgactgtgagaggatcggaacttctaattattattgggcttttccaagtaaagctcttcatgcaaggaaacataagttggaggttctggaatctcagttgtctgagggaagtcaaaagcatgcaagcctacagaaaagcattgagaaagctaaaattggccgatgtgaaacggaagagcgaaccaggctagcaaaagagctttcttcacttcgagaccaaagggaacagctaaaggcagaagtagaaaaatacaaagactgtgatccgcaagttgtggaagaaatacgccaagcaaataaagtagccaaagaagctgctaacagatggactgataacatattcgcaataaaatcttgggccaaaagaaaatttgggtttgaagaaaataaaattgatagaacttttggaattccagaagactttgactacatagactaaaatattccatggtggtgaaggatgtacaagcttgtgaatatgtaaattttaaactattatctaactaagtgtactgaattgtcgtttgcctgtaactgtgtttatcattttattaatgttaaataaagtgtaaaatgcagatgttcttcaccccttttggtagaacaaaagcaggatgataaccatatccccccagtgctcatcaaagtaggacaataaaaatccatccatctcagtccaggcagatttacaaatgatttt

SEQ ID NO: 152431 - DNA, 638 bp, Homo sapiens
  Payload ID: 9980
  Gene Symbol: MND1
  Gene Name: meiotic nuclear divisions 1
  ENST ID: ENST00000504860
  CDS Start-End: 43-540
tcaaagaaaaaaggactgagtgcagaagaaaagagaactcgcatgatggaaatattttctgaaacaaaagatgtatttcaattaaaagacttggagaagattgctcccaaagagaaaggcattactgctatgtcagtaaaagaagtccttcaaagcttagttgatgatggtatggttgactgtgagaggatcggaacttctaattattattgggcttttccaagtaaagctcttcatgcaaggaaacataagttggaggttctggaatctcagttgtctgagggaagtcaaaagcatgcaagcctacagaaaagcattgagaaagctaaaattggccgatgtgaaacggaagagcgaaccaggctagcaaaagagctttcttcacttcgagaccaaagggaacagctaaaggcagaagtagaaaaatacaaagactgtgatccgcaagttgtggaagaaatacgccaagcaaataaagtagccaaagaagctgctaacagatggactggtatgtactataataatgctgataaactatagctaaattcccttcacacttactgcgacgtgaaattcagataccttgtgctagctttgttcaagaaaggacgttaatgaaaaatgtatgcattactcaa

SEQ ID NO: 152432 - DNA, 502 bp, Homo sapiens
  Payload ID: 9980
  Gene Symbol: MND1
  Gene Name: meiotic nuclear divisions 1
  ENST ID: ENST00000508731
  CDS Start-End: 197-502
gtcgatttctgtgaaaacgccccggtttctgccaaagggcaggagtcgctgctcttgtgccgggtgctgctggttgtgtagggcgctgttgcttttttaaggacgctctgcactgaattaggcttcctcgtgggtcatgatcagttaagtcctgtcaaagaaaaaaggactgagtgcagaagaaaagagaactcgcatgatggaaatattttctgaaacaaaagatgtatttcaattaaaagacttggagaagattgctcccaaagagaaaggcattactgctatgtcagtaaaagaagtccttcaaagcttagttgatgatggtatggttgactgtgagaggatcggaacttctaattattattgggcttttccaagtaaagctcttcatgcaaggaaacataagttggaggttctggaatctcagttgtctgagggaagtcaaaagcatgcaagcctacagaaaagcattgagaaagctaaaattggccgatgtgaaacg

SEQ ID NO: 152433 - DNA, 844 bp, Homo sapiens
  Payload ID: 9980
  Gene Symbol: MND1
  Gene Name: meiotic nuclear divisions 1
  ENST ID: ENST00000509752
  CDS Start-End: 58-438
gtcccgcccctctccccaagcgcgggcccggccagcggaagcccctgcgcccgcgccatgtcaaagaaaaaaggactgagtgcagaagaaaagagaactcgcatgatggaaatattttctgaaacaaaagatgtatttcaattaaaagacttggagaagattgctcccaaagagaaaggcattactgctatgtcagtaaaagaagtccttcaaagcttagttgatgatggtatggttgactgtgagaggatcggaacttctaattattattgggcttttccaagtaaagctcttcatgcaaggaaacataagttggaggttctggaatctcaggaccctggctgctgcttccatgaaataattaaagtctcctattatagaaaattctggctgggcgcagtggctcacgcctgtaatcccagcactttgggaggctgaggcgggcagatcacgaggtgactttcccccacccccacatgaagtgcaagatggagttgtctgagggaagtcaaaagcatgcaagcctacagaaaagcattgagaaagctaaaattggccgatgtgaaacggaagagcgaaccaggctagcaaaagagctttcttcacttcgagaccaaagggaacagctaaaggcagaagtagaaaaatacaaagactgtgatccgcaagttgtggaagaaatacgccaagcaaataaagtagccaaagaagctgctaacagatggactgataacatattcgcaataaaatcttgggccaaaagaaaatttgggtttgaagaaaataaaattgatagaacttttggaattccagaagactttgactacatagactaaaatattcc

SEQ ID NO: 152434 - DNA, 830 bp, Homo sapiens
  Payload ID: 9980
  Gene Symbol: MND1
  Gene Name: meiotic nuclear divisions 1
  ENST ID: ENST00000622785
  CDS Start-End: 90-458
agtcggcgccaaaatcaaacgcgtcctggcctgtcccgcccctctccccaagcgcgggcccggccagcggaagcccctgcgcccgcgccatgtcaaagaaaaaaggactgagtgcagaagaaaagagaactcgcatgatggaaatattttctgaaacaaaagatgtatttcaattaaaagacttggagaagattgctcccaaagagaaaggcattactgctatgtcagtaaaagaagtccttcaaagcttagttgatgatggtatggttgactgtgagaggatcggaacttctaattattattgggcttttccaagtaaagctcttcatgcaaggaaacataagttggaggttctggaatctcagttgtctgagggaagtcaaaagcatgcaagcctacagaaaagcattgagaaagctaaaattggccgatgtgaaacggccaagcaaataaagtagccaaagaagctgctaacagatggactgataacatattcgcaataaaatcttgggccaaaagaaaatttgggtttgaagaaaataaaattgatagaacttttggaattccagaagactttgactacatagactaaaatattccatggtggtgaaggatgtacaagcttgtgaatatgtaaattttaaactattatctaactaagtgtactgaattgtcgtttgcctgtaactgtgtttatcattttattaatgttaaataaagtgtaaaatgcagatgttcttcaccccttttggtagaacaaaagcaggatgataaccatatccccccagtgctcatcaaagtaggacaataaaaatccatccatctcagtc

SEQ ID NO: 152435 - DNA, 4291 bp, Homo sapiens
  Payload ID: 9981
  Gene Symbol: MEIS1
  Gene Name: Meis homeobox 1
  Uniprot ID: O00470
  ENST ID: ENST00000272369
  CDS Start-End: 458-1630
atttgaggtgttctgaccagaagaagacagagcggatgatcattcattcaccacgttgacaacctcgcctgtgattgacagctggagtggcagaaagccatgagatttggtagttgggtctgaggggcgctcttttttttccttttctttctttctttctttttttttttttaaactgatttttgggggagagaagatctgcttttttttgcccccgctgctgtcttggaaacggagcgcttttatgctcagtgactcgggcgctttgcttcaggtcccgtagaccgaagatctgggaccagtagctcacgttgctggagacgttaagggatttttcgtcgtgcttttttttttttttttttttttttccgggggagtttgaatatttgtttcttttcacactggccttaaagaggatatattagaagttgaagtaggaagggagccagagaggccgatggcgcaaaggtacgacgatctaccccattacgggggcatggatggagtaggcatcccctccacgatgtatggggacccgcatgcagccaggtccatgcagccggtccaccacctgaaccacgggcctcctctgcactcgcatcagtacccgcacacagctcataccaacgccatggcccccagcatgggctcctctgtcaatgacgctttaaagagagataaagatgccatttatggacaccccctcttccctctcttagcactgatttttgagaaatgtgaattagctacttgtaccccccgcgagccgggggtggcgggcggggacgtctgctcgtcagagtcattcaatgaagatatagccgtgttcgccaaacagattcgcgcagaaaaacctctattttcttctaatccagaactggataacttgatgattcaagccatacaagtattaaggtttcatctattggaattagagaaggtacacgaattatgtgacaatttctgccaccggtatattagctgtttgaaagggaaaatgcctatcgatttggtgatagacgatagagaaggaggatcaaaatcagacagtgaagatataacaagatcagcaaatctaactgaccagccctcttggaacagagatcatgatgacacggcatctactcgttcaggaggaaccccaggcccttccagcggtggccacacgtcacacagtggggacaacagcagtgagcaaggtgatggcttggacaacagtgtagcttcccccagcacaggtgacgatgatgaccctgataaggacaaaaagcgtcacaaaaagcgtggcatctttcccaaagtagccacaaatatcatgagggcgtggctgttccagcatctaacacacccttacccttctgaagaacagaaaaagcagttggcacaagacacgggactcaccatccttcaagtgaacaattggtttattaatgcccggagaagaatagtgcagcccatgatagaccagtccaaccgagcagtaagtcaaggaacaccttataatcctgatggacagcccatgggaggtttcgtaatggacggtcagcaacatatgggaattagagcaccaggacctatgagtggaatgggcatgaatatgggcatggaggggcagtggcactacatgtaaccttcatctagttaaccaatcgcaaagcaagggggaaggctgcaaagtatgccaggggagtatgtagcccggggtggtccaatgggtgtgagtatgggacagccaagttatacccaaccccagatgcccccccatcctgctcagctgcgtcatgggccccccatgcatacgtacattcctggacaccctcaccacccaacagtgatgatgcatggaggaccgccccaccctggaatgccaatgtcagcatcaagccccacagttcttaatacaggagacccaacaatgagtggacaagtcatggacattcatgctcagtagcttaagggaatatgcattgtctgcaatggtgactgatttcaaatcatgttttttctgcaatgactgtggagttccattcttggcatctactctggaccaaggagcatccctaattcttcatagggacctttaaaaagcaggaaataccaactgaagtcaatttgggggacatgctaaataactatataagacattaagagaacaaagagtgaaatattgtaaatgctattatactgttatccatattacgttgtttcttatagattttttaaaaaaaatgtgaaatttttccacactatgtgtgttgtttccatagctcttcacttcctccagaagcctccttacattaaaaagccttacagttatcctgcaagggacaggaaggtctgatttgcaggatttttagagcattaaaataactatcaggcagaagaatctttcttctcgcctaggatttcagccatgcgcgcgctctctctctttctctctcttttcctctctctccctctttctagcctggggcttgaatttgcatgtctaattcatttactcaccatatttgaattggcctgaacagatgtaaatcgggaaggatgggaaaaactgcagtcatcaacaatgattaatcagctgttgcaggcagtgtcttaaggagactggtaggaggaggcatggaaaccaaaaggccgtgtgtttagaagcctaattgtcacatcaagcatcattgtccccatgcaacaaccaccaccttatacatcacttcctgttttaagcagctctaaaacatagactgaagatttatttttaatatgttgactttatttctgagcaaagcatcggtcatgtgtgtattttttcatagtcccaccttggagcatttatgtagacattgtaaataaattttgtgcaaaaaggactggaaaaatgaactgtattattgcaatttttttttgtaaaagtagcagtttggtatgagttggcatgcatacaagatttactaagtgggataagctaattatactttttgttgtggataaacaaatgcttgttgatagcctttttctatcaagaaaccaaggagctaattattaataacaatcattgcacactgagtcttagcgtttctgatggaaacagtttggattgtataataacgccaagcccagttgtagtcgtttgagtgcagtaatgaaatctgaatctaaaataaaaacaagattatttttgtcatgctgactccactgcttgaaaaatttgtttactgccccccagatttttaaagattaatacagtaaatataaaaattaattttggctccctaagccatatatgtatttgacaattttaaccgcaaagtaagttgtttaataataaccactgatttctttaagctgacttaatgaactcctaatatcagcaaatttgaggcctaaaggcactaaactaactctagactcagaattacatccaacagaattactcatctaatatcagtgaaattattcttgcacataaaggcaaacctaagtacaaagttaagtcttttactaaaggatgttacctaggatgagcagtatatgtttattaggaaattaactacatgaattgaagagaccagacttcaaaatctaatttttataaatatgctctatgttctcattggataaaactggttattaaccaattttccagaacagctgtacaagatttctgcatggcagccggctaaatggtagaaaataatatgtttaagctggaatagcttataattttatttaaataaaattgctgctataaaaagtgcttcccaaagctaaggaaaatatacaaatattttaattaaggcaaattcgttttaaaaaataagcctttcagtagtgattgctttgtaaacaaaggatgggtcggaggagagagagccttaaactcaagtctgacattcaggcccaagtcaccctataaaccggcccttagcaattctattttctattcgaaaagagaaaccagctgtgggttggctttactaggtgatgtgtgattgactgactcacctgctggagtagcaatgcattctcaccttttgctgatggggccttgtttctaaacacgtggatgcgcagagagcaaggctcagcctactgcagccatctctggcagcgcttctacccctccccagcccatagatgggattgtttaaatctcccttgttgacctagtggcaattcttcctctacctaaatagtcgatgtgagtgaaatcattctcttttgataggtggttgctagcagttaacaaccatttatttactttaacaattaataataaactttataaactgtc

SEQ ID NO: 152436 - DNA, 3530 bp, Homo sapiens
  Payload ID: 9981
  Gene Symbol: MEIS1
  Gene Name: Meis homeobox 1
  Uniprot ID: O00470
  ENST ID: ENST00000398506
  CDS Start-End: 339-1730
gagacatgcccgtttcaccttctaccctcgggagaatgcttctctttctctctttctttcttctttccttcttgccaaaggagcctgaatttctaaactagttgatagggacacaagttagggcaagatcattcatcccagacgagtctcgctgagaattctgtattttttacttaaagctttaattttaaaataagaaaaactcagctttatagatgcaaggccaccgaattccgggtggaaggacccagctgtattgaccttatataagctcggtgccttgccgttctcccatttgcccgcctggcctcctgaaccttctttctctcctgtttgtcatgcagtacgacgatctaccccattacgggggcatggatggagtaggcatcccctccacgatgtatggggacccgcatgcagccaggtccatgcagccggtccaccacctgaaccacgggcctcctctgcactcgcatcagtacccgcacacagctcataccaacgccatggcccccagcatgggctcctctgtcaatgacgctttaaagagagataaagatgccatttatggacaccccctcttccctctcttagcactgatttttgagaaatgtgaattagctacttgtaccccccgcgagccgggggtggcgggcggggacgtctgctcgtcagagtcattcaatgaagatatagccgtgttcgccaaacagattcgcgcagaaaaacctctattttcttctaatccagaactggataacttgatgattcaagccatacaagtattaaggtttcatctattggaattagagaaggtacacgaattatgtgacaatttctgccaccggtatattagctgtttgaaagggaaaatgcctatcgatttggtgatagacgatagagaaggaggatcaaaatcagacagtgaagatataacaagatcagcaaatctaactgaccagccctcttggaacagagatcatgatgacacggcatctactcgttcaggaggaaccccaggcccttccagcggtggccacacgtcacacagtggggacaacagcagtgagcaaggtgatggcttggacaacagtgtagcttcccccagcacaggtgacgatgatgaccctgataaggacaaaaagcgtcacaaaaagcgtggcatctttcccaaagtagccacaaatatcatgagggcgtggctgttccagcatctaacacacccttacccttctgaagaacagaaaaagcagttggcacaagacacgggactcaccatccttcaagtgaacaattggtttattaatgcccggagaagaatagtgcagcccatgatagaccagtccaaccgagcagtaagtcaaggaacaccttataatcctgatggacagcccatgggaggtttcgtaatggacggtcagcaacatatgggaattagagcaccagggctgcaaagtatgccaggggagtatgtagcccggggtggtccaatgggtgtgagtatgggacagccaagttatacccaaccccagatgcccccccatcctgctcagctgcgtcatgggccccccatgcatacgtacattcctggacaccctcaccacccaacagtgatgatgcatggaggaccgccccaccctggaatgccaatgtcagcatcaagccccacagttcttaatacaggagacccaacaatgagtggacaagtcatggacattcatgctcagtagcttaagggaatatgcattgtctgcaatggtgactgatttcaaatcatgttttttctgcaatgactgtggagttccattcttggcatctactctggaccaaggagcatccctaattcttcatagggacctttaaaaagcaggaaataccaactgaagtcaatttgggggacatgctaaataactatataagacattaagagaacaaagagtgaaatattgtaaatgctattatactgttatccatattacgttgtttcttatagattttttaaaaaaaatgtgaaatttttccacactatgtgtgttgtttccatagctcttcacttcctccagaagcctccttacattaaaaagccttacagttatcctgcaagggacaggaaggtctgatttgcaggatttttagagcattaaaataactatcaggcagaagaatctttcttctcgcctaggatttcagccatgcgcgcgctctctctctttctctctcttttcctctctctccctctttctagcctggggcttgaatttgcatgtctaattcatttactcaccatatttgaattggcctgaacagatgtaaatcgggaaggatgggaaaaactgcagtcatcaacaatgattaatcagctgttgcaggcagtgtcttaaggagactggtaggaggaggcatggaaaccaaaaggccgtgtgtttagaagcctaattgtcacatcaagcatcattgtccccatgcaacaaccaccaccttatacatcacttcctgttttaagcagctctaaaacatagactgaagatttatttttaatatgttgactttatttctgagcaaagcatcggtcatgtgtgtattttttcatagtcccaccttggagcatttatgtagacattgtaaataaattttgtgcaaaaaggactggaaaaatgaactgtattattgcaatttttttttgtaaaagtagcagtttggtatgagttggcatgcatacaagatttactaagtgggataagctaattatactttttgttgtggataaacaaatgcttgttgatagcctttttctatcaagaaaccaaggagctaattattaataacaatcattgcacactgagtcttagcgtttctgatggaaacagtttggattgtataataacgccaagcccagttgtagtcgtttgagtgcagtaatgaaatctgaatctaaaataaaaacaagattatttttgtcatgctgactccactgcttgaaaaatttgtttactgccccccagatttttaaagattaatacagtaaatataaaaattaattttggctccctaagccatatatgtatttgacaattttaaccgcaaagtaagttgtttaataataaccactgatttctttaagctgacttaatgaactcctaatatcagcaaatttgaggcctaaaggcactaaactaactctagactcagaattacatccaacagaattactcatctaatatcagtgaaattattcttgcacataaaggcaaacctaagtacaaagttaagtcttttactaaaggatgttacctaggatgagcagtatatgtttattaggaaattaactacatgaattgaagagaccagacttcaaaatctaatttttataaatatgctctatgttctcattggataaaactggttattaaccaattttccagaacagctgtacaagatttctgcatggcagccggctaaatggtagaaaataatatgtttaagctggaatagcttataattttatttaaataaaattgctgctataaaaa

SEQ ID NO: 152437 - DNA, 363 bp, Homo sapiens
  Payload ID: 9981
  Gene Symbol: MEIS1
  Gene Name: Meis homeobox 1
  ENST ID: ENST00000437869
  CDS Start-End: 1-363
agctttgctttgagagccctgagatttctagaccggtcttcccgtgcctgcagatgattcaagccatacaagtattaaggtttcatctattggaattagagaaggtacacgaattatgtgacaatttctgccaccggtatattagctgtttgaaagggaaaatgcctatcgatttggtgatagacgatagagaaggaggatcaaaatcagacagtgaagatataacaagatcagcaaatctaactgaccagccctcttggaacagagatcatgatgacacggcatctactcgttcaggaggaaccccaggcccttccagcggtggccacacgtcacacagtggggacaacagcagtgagcaag

SEQ ID NO: 152438 - DNA, 2836 bp, Homo sapiens
  Payload ID: 9981
  Gene Symbol: MEIS1
  Gene Name: Meis homeobox 1
  ENST ID: ENST00000495021
  CDS Start-End: 308-1285
gttgacagtcggccccacggccatggacgtcctttccccaagttagctgagcgcctgccaccgagatcccccgagcctgggcttcgcgcggccgcctaggaggaacccgcaggaaccagccctccccaactctccgcccggcgcctttctcctccaccggatcctggatgtgcagtggaggggacgagggcttgtcgggtgggaaacttaattcaaaatggctgctggaaacgcttgggttttattcgtagcaaatgttgccaatttctccggccagatacgctaaaccgatcctcagataccgtccatggctcagggcctccgacttcagggctccaggaggaaggggagacaccccctcttccctctcttagcactgatttttgagaaatgtgaattagctacttgtaccccccgcgagccgggggtggcgggcggggacgtctgctcgtcagagtcattcaatgaagatatagccgtgttcgccaaacagattcgcgcagaaaaacctctattttcttctaatccagaactggataacttgatgattcaagccatacaagtattaaggtttcatctattggaattagagaaggtacacgaattatgtgacaatttctgccaccggtatattagctgtttgaaagggaaaatgcctatcgatttggtgatagacgatagagaaggaggatcaaaatcagacagtgaagatataacaagatcagcaaatctaactgaccagccctcttggaacagagatcatgatgacacggcatctactcgttcaggaggaaccccaggcccttccagcggtggccacacgtcacacagtggggacaacagcagtgagcaaggtgatggcttggacaacagtgtagcttcccccagcacaggtgacgatgatgaccctgataaggacaaaaagcgtcacaaaaagcgtggcatctttcccaaagtagccacaaatatcatgagggcgtggctgttccagcatctaacacacccttacccttctgaagaacagaaaaagcagttggcacaagacacgggactcaccatccttcaagtgaacaattggtttattaatgcccggagaagaatagtgcagcccatgatagaccagtccaaccgagcagtaagtcaaggaacaccttataatcctgatggacagcccatgggaggtttcgtaatggacggtcagcaacatatgggaattagagcaccaggacctatgagtggaatgggcatgaatatgggcatggaggggcagtggcactacatgtaaccttcatctagttaaccaatcgcaaagcaagggggaaggctgcaaagtatgccaggggagtatgtagcccggggtggtccaatgggtgtgagtatgggacagccaagttatacccaaccccagatgcccccccatcctgctcagctgcgtcatgggccccccatgcatacgtacattcctggacaccctcaccacccaacagtgatgatgcatggaggaccgccccaccctggaatgccaatgtcagcatcaagccccacagttcttaatacaggagacccaacaatgagtggacaagtcatggacattcatgctcagtagcttaagggaatatgcattgtctgcaatggtgactgatttcaaatcatgttttttctgcaatgactgtggagttccattcttggcatctactctggaccaaggagcatccctaattcttcatagggacctttaaaaagcaggaaataccaactgaagtcaatttgggggacatgctaaataactatataagacattaagagaacaaagagtgaaatattgtaaatgctattatactgttatccatattacgttgtttcttatagattttttaaaaaaaatgtgaaatttttccacactatgtgtgttgtttccatagctcttcacttcctccagaagcctccttacattaaaaagccttacagttatcctgcaagggacaggaaggtctgatttgcaggatttttagagcattaaaataactatcaggcagaagaatctttcttctcgcctaggatttcagccatgcgcgcgctctctctctttctctctcttttcctctctctccctctttctagcctggggcttgaatttgcatgtctaattcatttactcaccatatttgaattggcctgaacagatgtaaatcgggaaggatgggaaaaactgcagtcatcaacaatgattaatcagctgttgcaggcagtgtcttaaggagactggtaggaggaggcatggaaaccaaaaggccgtgtgtttagaagcctaattgtcacatcaagcatcattgtccccatgcaacaaccaccaccttatacatcacttcctgttttaagcagctctaaaacatagactgaagatttatttttaatatgttgactttatttctgagcaaagcatcggtcatgtgtgtattttttcatagtcccaccttggagcatttatgtagacattgtaaataaattttgtgcaaaaaggactggaaaaatgaactgtattattgcaatttttttttgtaaaagtagcagtttggtatgagttggcatgcatacaagatttactaagtgggataagctaattatactttttgttgtggataaacaaatgcttgttgatagcctttttctatcaagaaaccaaggagctaattattaataacaatcattgcacactgagtcttagcgtttctgatggaaacagtttggattgtataataacgccaagcccagttgtagtcgtttgagtgcagtaatgaaatctgaatctaaaataaaaacaagattatttttgtca

SEQ ID NO: 152439 - DNA, 2773 bp, Homo sapiens
  Payload ID: 9981
  Gene Symbol: MEIS1
  Gene Name: Meis homeobox 1
  ENST ID: ENST00000560281
  CDS Start-End: 725-1837
cggaatccacctctccgcctgtgcaacacacactttacacacgcacggggactgcaagcgggcagcatcgatcgtggctcctttaagacaaactcagacagacattttttttaaccctccttctctaatctccttccagtgcagcacttgcaaagagggagagagagggagagaaagaaagagagagagagaagagagaaactgattaggaattaggactgattcaagggaagcgagcgctagggctttgtgcatttgaatattaacatttgaggtgttctgaccagaagaagacagagcggatgatcattcattcaccacgttgacaacctcgcctgtgattgacagctggagtggcagaaagccatgagatttggtagttgggtctgaggggcgctcttttttttccttttctttctttctttctttttttttttttaaactgatttttgggggagagaagatctgcttttttttgcccccgctgctgtcttggaaacggagcgcttttatgctcagtgactcgggcgctttgcttcaggtcccgtagaccgaagatctgggaccagtagctcacgttgctggagacgttaagggatttttcgtcgtgcttttttttttttttttttttttttccgggggagtttgaatatttgtttcttttcacactggccttaaagaggatatattagaagttgaagtaggaagggagccagagaggccgatggcgcaaaggtacgacgatctaccccattacgggggcatggatggagtaggcatcccctccacgatgtatggggacccgcatgcagccaggtccatgcagccggtccaccacctgaaccacgggcctcctctgcactcgcatcagtacccgcacacagctcataccaacgccatggcccccagcatgggctcctctgtcaatgacgctttaaagagagataaagatgccatttatggacaccccctcttccctctcttagcactgatttttgagaaatgtgaattagctacttgtaccccccgcgagccgggggtggcgggcggggacgtctgctcgtcagagtcattcaatgaagatatagccgtgttcgccaaacagattcgcgcagaaaaacctctattttcttctaatccagaactggataacttgatgattcaagccatacaagtattaaggtttcatctattggaattagagaaggtacacgaattatgtgacaatttctgccaccggtatattagctgtttgaaagggaaaatgcctatcgatttggtgatagacgatagagaaggaggatcaaaatcagacagtgaagatataacaagatcagcaaatctaactgaccagccctcttggaacagagatcatgatgacacggcatctactcgttcaggaggaaccccaggcccttccagcggtggccacacgtcacacagtggggacaacagcagtgagcaaggtgatggcttggacaacagtgtagcttcccccagcacaggtgacgatgatgaccctgataaggacaaaaagcgtcacaaaaagcgtggcatctttcccaaagtagccacaaatatcatgagggcgtggctgttccagcatctaacacacccttacccttctgaagaacagaaaaagcagttggcacaagacacgggactcaccatccttcaagtgaacaattggtttattaatgcccggagaagaatagtgcagcccatgatagaccagtccaaccgagcaggcaagtcccccatagtgactgtattcaagtcacgcaagcgaaaaccatcctcaagccattcaccgggaggtccgctacctggtaaataaactgggagtgagtataggaacgcctggcaattaaaattaaaccagtttcgtttcataacaacactaatcaatttaacatcattataaaacgtttggagaaggtggaaaaaaaaagccaacagagaaaagtaactcttaaataatatgctcagttacaatattctttgtacacattcaatatattaatgttattttttttctgagtttgccttcccagctctttctgctactatgaccactccctggtgcatggcttggtgtggaattgctgtaaactttattacctgtcaaaagggcaaaggggtcaggattgcttgtgggactcagtaaagttcaaagacattcaatgaggtagagcttttgtgtgctttaataacccaaggcagcttacttctgaagcagcttttcatgtacagttaaaacacgggattcaggtagtggtataaatacatggttcttatttctcagaccttctcttgttaatatccatcttctggtgttcgactttttttttttttaataacagtctttttgttttgtttttaaattatgagcttaaaatggcgatacttctatgggatcctggcttgtggatctaaaaatccaagaaacatctctctaggatttgtttttgcattataatatgccagtaagataacaagagtatttgctaggggtgatgtgagtctttactttctttatgaaatactctctcatctcttagggagcactatggaaaactatgttagcatcgcattgaggcaacacacatttactcctgtaactttttttcttccaacacccattatgtggtcaccagacaaaacccaagcagaaagtttccacaccttaactgttccctctttgagctagatgttttaaaaactcagtcacagaggtgtgtagatctagtctgagagaaatttcactttgaat

SEQ ID NO: 152440 - DNA, 5111 bp, Homo sapiens
  Payload ID: 9981
  Gene Symbol: MEIS1
  Gene Name: Meis homeobox 1
  ENST ID: ENST00000488550
  CDS Start-End: 300-1436
ctttttttttttttaaactgatttttgggggagagaagatctgcttttttttgcccccgctgctgtcttggaaacggagcgcttttatgctcagtgactcgggcgctttgcttcaggtcccgtagaccgaagatctgggaccagtagctcacgttgctggagacgttaagggatttttcgtcgtgcttttttttttttttttttttttttccgggggagtttgaatatttgtttcttttcacactggccttaaagaggatatattagaagttgaagtaggaagggagccagagaggccgatggcgcaaaggtacgacgatctaccccattacgggggcatggatggagtaggcatcccctccacgatgtatggggacccgcatgcagccaggtccatgcagccggtccaccacctgaaccacgggcctcctctgcactcgcatcagtacccgcacacagctcataccaacgccatggcccccagcatgggctcctctgtcaatgacgctttaaagagagataaagatgccatttatggacaccccctcttccctctcttagcactgatttttgagaaatgtgaattagctacttgtaccccccgcgagccgggggtggcgggcggggacgtctgctcgtcagagtcattcaatgaagatatagccgtgttcgccaaacagattcgcgcagaaaaacctctattttcttctaatccagaactggataacttgatgattcaagccatacaagtattaaggtttcatctattggaattagagaaggtacacgaattatgtgacaatttctgccaccggtatattagctgtttgaaagggaaaatgcctatcgatttggtgatagacgatagagaaggaggatcaaaatcagacagtgaagatataacaagatcagcaaatctaactgaccagccctcttggaacagagatcatgatgacacggcatctactcgttcaggaggaaccccaggcccttccagcggtggccacacgtcacacagtggggacaacagcagtgagcaaggtgatggcttggacaacagtgtagcttcccccagcacaggtgacgatgatgaccctgataaggacaaaaagcgtcacaaaaagcgtggcatctttcccaaagtagccacaaatatcatgagggcgtggctgttccagcatctaacacacccttacccttctgaagaacagaaaaagcagttggcacaagacacgggactcaccatccttcaagtgaacaattggtttattaatgcccggagaagaatagtgcagcccatgatagaccagtccaaccgagcagtaagtcaaggaacaccttataatcctgatggacagcccatgggaggtttcgtaatggacggtcagcaacatatgggaattagagcaccaggtaagactttgtttttgtggtagttcctcatttttgactccaagagtgtcatcccctcatcaacacaggtaaatccgcctcatccttttctgttatctcaagctggctgccttgccttgtctgctatctgtgcatctaagatattgcagaggggaagccaggatctttatgcactgaagatctcactatttctcaaccctctagatcctgttttttttttaagggtcttttggcactatctgttgactttgctcattttctggcctcttcttggatttttatctcccttctaggacctatgagtggaatgggcatgaatatgggcatggaggggcagtggcactacatgtaaccttcatctagttaaccaatcgcaaagcaagggggaagtaagtacaaatggggtctttgttttcactttgtcctaggaatatttttcctcttgcattttcttatgttctccttgcccatagcttcatgcttgttcattcctttccattaaactcctggtttcttgcttccatcattttctttttggttgtgatcaagcttttaagcttataaatactgtgtatgatgtacatttatcctgtgtgttgctattgtacagtactgaccacatgacaaaacaagaagcagtcaggaggtgggggagtgggttgtcatagcaacagactgatttgcaaaatgtaagcagtctgcagcagtgcaaggagagggaagagcatgtccccaaagtgtcataaatctgtctaaccgcagttgatgcatgagttacatttctacactaacctgcaagacaccgaaaagctaaacagagacttcttttaggtaaaataaacacaagctttacttagggtaagtaaaggcatattttgagctccagtcaactaaactttgattttttttcttagtttattcctttgtctgtccatcataatgggattacgtgtggcaatgggaaaagggagaatacaaaatagaggtgtgcacagcaggctgcggggcttagcccaggctaattgactatatccaaattaagtatgccatcacttgcagtgtgacaaatggatttgacttattcagtatacaaaaatagagatcattaatgcaatcatcagtggcaggcctagtgaagtgggcctaggaaaactgtcccagattctcactcttgcattttctctcctataaagacactccagcaattcgagttcaaacaagtaaaactgttttgaacaccaaggctcttgttcacttcctaaattacccctaatagcactgttcttgctttgtttttgaaattaaaagcagttatttcagagtcttgcttgtgtctctgattatatttatgcactatttaaaatcactgctgaggccaggggtaattcgtactggtcatcttctctgggtgtgagtcaaatataagtttaacaattagctctgaaaacattccattgagctggggaatgcaacagtcttattacctcatcatggaattctctagcttagttaatttaaatattgtttcttagtttctgggtcaattaaatttaaatgatgtattttatgcttcgtgaccaattaaattactaggttattacaaaaaaaattatcatcttttttgattaaagagctgtgggtacagtatattttataagcaattttcattagttcaaaaatgttcctttaggctagattaagcagccattcattgttagagcctggagaccttattcgaaggtgttcatcgtattcacagtgcactattacttagaactaaagccaattgaacctacttagcaatagcgttatgcctttcacccttgatgattatggagcttatagctctcagaaacaatacacctgtcagtttccatcaactatagcaatccatgcagaagacaagaggccccctcaaagcaggaggggtattgttttaggtccaatttttcttattgttctcaaaatcattataaggtggacagtgttttgtgaagattttcttttccccagctctaagaaaccatgtggaaagaattcattgataactgttttgatttttttctttttttaagtacaggttttgctaagtaatcacccttagtgagcctgtgtagttcagctgcctgtgagatgtttggtgaccagctcagtgtattcttgtattcttgatagagaatatttcaggagacaaaagtgcttcttcagaccagacctcaaataacaattttattctttttaataaataagacctcagtaggcggacctgataacagtgacaatgaaaggaaaatagtggcaaaatgtgagtttccagcatgatgtttctcattttattttcttctgtatgaatcaaaagaatgctttacaaaaccatgttcccttaatcacagggttctctggcttttataggattgtcatagccaggaccacactattgctttttcataacattttctttttgtttctttcttttgaatttcttacagggctgcaaagtatgccaggggagtatgtagcccggggtggtccaatgggtgtgagtatgggacagccaagttatacccaaccccagatgcccccccatcctgctcagctgcgtcatgggccccccatgcatacgtacattcctggacaccctcaccacccaacagtgatgatgcatggaggaccgccccaccctggaatgccaatgtcagcatcaagccccacagttcttaatacaggagacccaacaatgagtggacaagtcatggacattcatgctcagtagcttaagggaatatgcattgtctgcaatggtgactgatttcaaatcatgttttttctgcaatgactgtggagttccattcttggcatctactctggaccaaggagcatccctaattcttcatagggacctttaaaaagcaggaaataccaactgaagtcaatttgggggacatgctaaataactatataagacattaagagaacaaagagtgaaatattgtaaatgctattatactgttatccatattacgttgtttcttatagattttttaaaaaaaatgtgaaatttttccacactatgtgtgttgtttccatagctcttcacttcctccagaagcctccttacattaaaaagccttacagttatcctgcaagggacaggaaggtctgatttgcaggatttttagagcattaaaataactatcaggcagaagaatctttcttctcgcctaggatttcagccatgcgcgcgctctctctctttctctctcttttcctctctctccctctttctagcctggggcttgaatttgcatgtctaattcatttactcaccatatttgaattggcctgaacagatgtaaatcgggaaggatgggaaaaactgcagtcatcaacaatgattaatcagctgttgcaggcagtgtcttaaggagactggtaggaggaggcatggaaaccaaaaggccgtgtgtttagaagcctaattgtcacatcaagcatcattgtccccatgcaacaaccaccaccttatacatcacttcctgttttaagcagctctaaaacatagactgaagatttatttttaatatgttgactttatttctgagcaaagcatcggtcatgtgtgtattttttcatagtcccaccttggagcatttatgtagacattgtaaataaattttgtgcaaaaaggactggaaaaa

SEQ ID NO: 152441 - DNA, 2775 bp, Homo sapiens
  Payload ID: 9982
  Gene Symbol: MEIS2
  Gene Name: Meis homeobox 2
  Uniprot ID: O14770
  ENST ID: ENST00000314177
  CDS Start-End: 256-1164
aggaggaggaggaagatcaggaggaggaggaagaagaggaaaaaagagaaaaagaagaaatatcacagaaaaaaaaattcttcgttgtctagactgggctttttttcccccctaaaaaatagcatattggagaattgggagaagtctctttggtttggaaaaaaaaaaaaggaatcttcagcctagatcactttcttatccggactgggatattaaatatacgacacatccaggagtttattggagcgcagactgatggcgcaaaggtacgatgagctgccccattacggcgggatggacggagtaggggttcccgcttccatgtacggagaccctcacgcgccgcggccgatccccccggttcaccacctgaaccacgggccgccgctccacgccacacagcactacggcgcgcacgccccgcaccccaatgtcatgccggccagtatgggatccgctgtcaacgacgccttgaagcgggacaaggacgcgatctatgggcacccgttgtttcctctgttagctctggtctttgagaagtgcgagctggcgacctgcactccccgggaacctggagtggctggcggagacgtctgctcctccgactccttcaacgaggacatcgcggtcttcgccaagcaggttcgcgccgaaaagccacttttttcctcaaatccagagctggacaatttgatgatacaagcaatacaagtactaaggtttcatcttttggagttagaaaaggtccacgaactgtgcgataacttctgccaccgatacattagctgtttgaaggggaaaatgcccatcgacctcgtcattgatgaaagagacggcagctccaagtcagatcatgaagaactttcaggctcctccacaaatctcgctgaccataacccttcttcttggcgagaccacgatgatgcaacctcaacccactcagcaggcaccccagggccctccagtgggggccatgcttcccagagcggagacaacagcagtgagcaaggggatggtttagacaacagtgtagcttcacctggtacaggtgacgatgatgatccggataaggacaaaaaacgccagaagaaaagaggcattttccccaaagtagcaacaaatatcatgagagcatggctcttccagcatctcacagtttattaatgccagaagaagaatagtacagcccatgattgaccagtcaaatcgagcagtgagccaaggagcagcatatagtccagagggtcagcccatggggagctttgtgttggatggtcagcaacacatggggatccggcctgcaggacctatgagtggaatgggcatgaatatgggcatggatgggcaatggcactacatgtaaccttcatcatgtaaagcaatcgcaaagcaagggggaagtttgcagagcatgccaggggactacgtttctcagggtggtcctatgggaatgagtatggcacagccaagttacactcctccccagatgaccccacaccctactcaattaagacatggacccccaatgcattcatatttgccaagccatccccaccacccagccatgatgatgcacggaggaccccctacccaccctggaatgactatgtcagcacagagccccacaatgttaaattctgtagatcccaatgttggcggacaggttatggacattcatgcccaatagtataagggaactcaagggaaaaggaaacacacgcaaaaactattttaagactttctgaactttgaccagatgttgacacttaatatgaaattccagacagctgtgattattttttacttttgtcatttttcatcaagcaacagaggaccaatgcaacaagaacacaaatgtgaaatcatgggctgactgagacaattctgtccatgtaaagatcctctggaaaaagactccgagagttataactactgtagtataaatataggaactaagttaaacttgtacatttctgttgatcacgccgttatgttgcctcaaatagttttagaagagaaaaaaaaatatatccttgttttccacactatgtgtgttgttcccaaaagaatgactgttttggttcatcagtgaattcaccatccaggagagactgtggtatatattttaaacctgttgggccaatgagaaaagaaccacactggagatcatgatgaacttttggctgaacctcatcactcgaactccagcttcaagaatgtgttttcatgcccggcctttgttcctccataaatgtgtcctttagtttcaaacagatctttatagttcgtgcttcataagccaattcttattattatttttgggggactcttcttcaaagagcttgccaatgaagatttaaagacagagcaggagcttcttccaggagttctgagccttggttgtggacaaaacaatcttaagttgggcagctttcctcaacacaaaaaaaagttattaatggtcattgaaccataactaggactttatcagaaactcaaagcttgggggataaaaaggagcaagagaatactgtaacaaacttcgtacagagttcggtctattaattgtttcatgttagatattctatgtgtttacctcaattgaaaaaaaaaagaatgtttttgctagtatcagatctgctgtggaattggtattgtatgtccatgaattcttcttttctcagcacgtgttcctcactagaagaaaatgctgttacctttaagctttgtcaaatttacattaaaatacttgtatgaggactgtgacgttatgtt

SEQ ID NO: 152442 - DNA, 3056 bp, Homo sapiens
  Payload ID: 9982
  Gene Symbol: MEIS2
  Gene Name: Meis homeobox 2
  Uniprot ID: O14770
  ENST ID: ENST00000340545
  CDS Start-End: 436-1581
ttggctacatcggacccagatgactgcctcctcacttcctccctcccgattccgccgcggcccccaaagactctcggggtggccccttgtccgcaccgcttggagggagtgtgctctgagttaagctggtctcttctggtcctggaaaaaaatgagtattgacaaggttgctggatctgcgcagaaaagaaagtgccacttaataaaaaatttagcccggcagtggtaccgtctgcagagcttgctgcccttggacgttagcaggaagccttcggggtgctgtaatcggcgggcagaggagagggaggccgcggaattaaaaggaacaaaagctagagcgccatgccaaacgtccccggcaagacccagttaggcaggagccgggagtgatgggaaaatgaactagaatacgatgagctgccccattacggcgggatggacggagtaggggttcccgcttccatgtacggagaccctcacgcgccgcggccgatccccccggttcaccacctgaaccacgggccgccgctccacgccacacagcactacggcgcgcacgccccgcaccccaatgtcatgccggccagtatgggatccgctgtcaacgacgccttgaagcgggacaaggacgcgatctatgggcacccgttgtttcctctgttagctctggtctttgagaagtgcgagctggcgacctgcactccccgggaacctggagtggctggcggagacgtctgctcctccgactccttcaacgaggacatcgcggtcttcgccaagcaggttcgcgccgaaaagccacttttttcctcaaatccagagctggacaatttgatgatacaagcaatacaagtactaaggtttcatcttttggagttagaaaaggtccacgaactgtgcgataacttctgccaccgatacattagctgtttgaaggggaaaatgcccatcgacctcgtcattgatgaaagagacggcagctccaagtcagatcatgaagaactttcaggctcctccacaaatctcgctgaccataacccttcttcttggcgagaccacgatgatgcaacctcaacccactcagcaggcaccccagggccctccagtgggggccatgcttcccagagcggagacaacagcagtgagcaaggggatggtttagacaacagtgtagcttcacctggtacaggtgacgatgatgatccggataaggacaaaaaacgccagaagaaaagaggcattttccccaaagtagcaacaaatatcatgagagcatggctcttccagcatctcacacatccgtacccttccgaagagcagaagaaacagttagcgcaagacacaggacttacaattctccaagtaaacaactggtttattaatgccagaagaagaatagtacagcccatgattgaccagtcaaatcgagcagtgagccaaggagcagcatatagtccagagggtcagcccatggggagctttgtgttggatggtcagcaacacatggggatccggcctgcaggacctatgagtggaatgggcatgaatatgggcatggatgggcaatggcactacatgtaaccttcatcatgtaaagcaatcgcaaagcaagggggaagtttgcagagcatgccaggggactacgtttctcagggtggtcctatgggaatgagtatggcacagccaagttacactcctccccagatgaccccacaccctactcaattaagacatggacccccaatgcattcatatttgccaagccatccccaccacccagccatgatgatgcacggaggaccccctacccaccctggaatgactatgtcagcacagagccccacaatgttaaattctgtagatcccaatgttggcggacaggttatggacattcatgcccaatagtataagggaactcaagggaaaaggaaacacacgcaaaaactattttaagactttctgaactttgaccagatgttgacacttaatatgaaattccagacagctgtgattattttttacttttgtcatttttcatcaagcaacagaggaccaatgcaacaagaacacaaatgtgaaatcatgggctgactgagacaattctgtccatgtaaagatcctctggaaaaagactccgagagttataactactgtagtataaatataggaactaagttaaacttgtacatttctgttgatcacgccgttatgttgcctcaaatagttttagaagagaaaaaaaaatatatccttgttttccacactatgtgtgttgttcccaaaagaatgactgttttggttcatcagtgaattcaccatccaggagagactgtggtatatattttaaacctgttgggccaatgagaaaagaaccacactggagatcatgatgaacttttggctgaacctcatcactcgaactccagcttcaagaatgtgttttcatgcccggcctttgttcctccataaatgtgtcctttagtttcaaacagatctttatagttcgtgcttcataagccaattcttattattatttttgggggactcttcttcaaagagcttgccaatgaagatttaaagacagagcaggagcttcttccaggagttctgagccttggttgtggacaaaacaatcttaagttgggcagctttcctcaacacaaaaaaaagttattaatggtcattgaaccataactaggactttatcagaaactcaaagcttgggggataaaaaggagcaagagaatactgtaacaaacttcgtacagagttcggtctattaattgtttcatgttagatattctatgtgtttacctcaattgaaaaaaaaaagaatgtttttgctagtatcagatctgctgtggaattggtattgtatgtccatgaattcttcttttctcagcacgtgttcctcactagaagaaaatgctgttacctttaagctttgtcaaatttacattaaaatacttgtatgaggactgtgacgttatgttaaaaaaaaaaaggtgttaagtcacaaaaagcggtaataaatatttcatttttgattttttgtt

SEQ ID NO: 152443 - DNA, 4829 bp, Homo sapiens
  Payload ID: 9982
  Gene Symbol: MEIS2
  Gene Name: Meis homeobox 2
  Uniprot ID: O14770
  ENST ID: ENST00000338564
  CDS Start-End: 448-1860
accgcttggagggagtgtgctctgagttaagctggtctcttctggtcctggaaaaaaatgagtattgacaaggttgctggatctgcgcagaaaagaaagtgccacttaataaaaaatttagcccggcagtggtaccgtctgcagagcttgctgcccttggacgttagcaggaagccttcggggtgctgtaatcggcgggcagaggagagggaggccgcggaattaaaaggaacaaaagctagagcgccatgccaaacgtccccggcaagacccagttaggcaggagccgggagtgatgggaaaatgaactagaacatattggagaattgggagaagtctctttggtttggaaaaaaaaaaaaggaatcttcagcctagatcactttcttatccggactgggatattaaatatacgacacatccaggagtttattggagcgcagactgatggcgcaaaggtacgatgagctgccccattacggcgggatggacggagtaggggttcccgcttccatgtacggagaccctcacgcgccgcggccgatccccccggttcaccacctgaaccacgggccgccgctccacgccacacagcactacggcgcgcacgccccgcaccccaatgtcatgccggccagtatgggatccgctgtcaacgacgccttgaagcgggacaaggacgcgatctatgggcacccgttgtttcctctgttagctctggtctttgagaagtgcgagctggcgacctgcactccccgggaacctggagtggctggcggagacgtctgctcctccgactccttcaacgaggacatcgcggtcttcgccaagcaggttcgcgccgaaaagccacttttttcctcaaatccagagctggacaatttgatgatacaagcaatacaagtactaaggtttcatcttttggagttagaaaaggtccacgaactgtgcgataacttctgccaccgatacattagctgtttgaaggggaaaatgcccatcgacctcgtcattgatgaaagagacggcagctccaagtcagatcatgaagaactttcaggctcctccacaaatctcgctgaccataacccttcttcttggcgagaccacgatgatgcaacctcaacccactcagcaggcaccccagggccctccagtgggggccatgcttcccagagcggagacaacagcagtgagcaaggggatggtttagacaacagtgtagcttcacctggtacaggtgacgatgatgatccggataaggacaaaaaacgccagaagaaaagaggcattttccccaaagtagcaacaaatatcatgagagcatggctcttccagcatctcacacatccgtacccttccgaagagcagaagaaacagttagcgcaagacacaggacttacaattctccaagtaaacaactggtttattaatgccagaagaagaatagtacagcccatgattgaccagtcaaatcgagcagtgagccaaggagcagcatatagtccagagggtcagcccatggggagctttgtgttggatggtcagcaacacatggggatccggcctgcaggtttgcagagcatgccaggggactacgtttctcagggtggtcctatgggaatgagtatggcacagccaagttacactcctccccagatgaccccacaccctactcaattaagacatggacccccaatgcattcatatttgccaagccatccccaccacccagccatgatgatgcacggaggaccccctacccaccctggaatgactatgtcagcacagagccccacaatgttaaattctgtagatcccaatgttggcggacaggttatggacattcatgcccaatagtataagggaactcaagggaaaaggaaacacacgcaaaaactattttaagactttctgaactttgaccagatgttgacacttaatatgaaattccagacagctgtgattattttttacttttgtcatttttcatcaagcaacagaggaccaatgcaacaagaacacaaatgtgaaatcatgggctgactgagacaattctgtccatgtaaagatcctctggaaaaagactccgagagttataactactgtagtataaatataggaactaagttaaacttgtacatttctgttgatcacgccgttatgttgcctcaaatagttttagaagagaaaaaaaaatatatccttgttttccacactatgtgtgttgttcccaaaagaatgactgttttggttcatcagtgaattcaccatccaggagagactgtggtatatattttaaacctgttgggccaatgagaaaagaaccacactggagatcatgatgaacttttggctgaacctcatcactcgaactccagcttcaagaatgtgttttcatgcccggcctttgttcctccataaatgtgtcctttagtttcaaacagatctttatagttcgtgcttcataagccaattcttattattatttttgggggactcttcttcaaagagcttgccaatgaagatttaaagacagagcaggagcttcttccaggagttctgagccttggttgtggacaaaacaatcttaagttgggcagctttcctcaacacaaaaaaaagttattaatggtcattgaaccataactaggactttatcagaaactcaaagcttgggggataaaaaggagcaagagaatactgtaacaaacttcgtacagagttcggtctattaattgtttcatgttagatattctatgtgtttacctcaattgaaaaaaaaaagaatgtttttgctagtatcagatctgctgtggaattggtattgtatgtccatgaattcttcttttctcagcacgtgttcctcactagaagaaaatgctgttacctttaagctttgtcaaatttacattaaaatacttgtatgaggactgtgacgttatgttaaaaaaaaaaaggtgttaagtcacaaaaagcggtaataaatatttcatttttgattttttgttaggcttttgcgtttttaatggttttaggacaagactgcacaatgccaactctatacagtgttaaaagtaggtttttccccccagcagttgagtatattttaaactcatcaataatttttaaggtaatcatctatagcctttcaatgtctatttgacctataagttccaccagcagaaaacttctaaaggtacgaaactatgtgtacatgatgagccaggttgaaagatccccttgaacatgctcaacctcctttttagatgcatgacgttaaaaaatatatactttcagataaagcttttcatgggcatcctctgccagaataaaggacttttcagggttaattttacaacataagaaataatgtctgtgctcaaaggtaatttatctgcctgtgtttttcctctgcctgtcttactacaatattgttggatatgtaaatgaaaatttacatatgggtgttcatagataagtaaacaacttctatggagtttgaaattctgactttaaaagattacttaatcattaatattttataaattatattgtggtatatttttatttcagacacatccatgtgcagggatgctagtgtgatgatttgataactaaacttaaacttttttctgaaaacaaaacaaaacaaaatggacggtataatgccattttcaaaattttatgcaacattcctggaaatctataccattagcttattgatactgcacaaacaatgtctgctaaagtgtgcaaaaagggtgaggcatgtcccctcaattttcaaataaatatactatcctggaattttttaactcttaaattttgaatctttgtttagaaagaataatgtcatatactttggctagatatgtgatgtcaaccggctaaggaaattattcatcatctctgcaaacttaaacttggaagaaatccatagttattatttggggctcttccatctttccatttcagacagcatttatggaggttctatataaatgaacgaggaaatacacttctattgttttgtgttatatttagtcaggtagaatttttacaaatacatttcagtttaagtgttgtgttgctgtttaaacatagaaataatgcttctgacacaaactaacttaatagagaaattcagtgccacttgggaaagagagatagcttccctctcatttttgctattctattttacatgaagtctttttgtaaattttaaatatttgcctatttttactttaaatacttttatgtaaactatgaaaattccccattataaatcaactctcacatcaggtgggaaaaagaacctttttttctttccactcagtaaattctgaagggtttccttggcaattggctcgtgtttaggatgtgttttatgcaattatcaagttatctcattgaagtttagagaccagagctctcaactcttggttttaatgaataaagtcatctcatgcttagtttattcgtcaaacccacgtcctatcatgttaactttaaccttcttaaatatttggagatgaatgataattgtaatatttgtttgcattaccttgctctcccccacccccaaccccatgataacacagagaagtgatagatttgtccaatttttataatgctttttttacaccaccccggaaggcacttgctcctatctcgggtttactatttagtgtaaagagttccgatttgggtatatttaagaaagactcagctgtcaaaagcaaagaaactgggaatggtgttttgacaaccatatagtgttaaaggaaatactgtagtctgaataaaattgcttatgttctccaaaa

SEQ ID NO: 152444 - DNA, 2295 bp, Homo sapiens
  Payload ID: 9982
  Gene Symbol: MEIS2
  Gene Name: Meis homeobox 2
  Uniprot ID: O14770
  ENST ID: ENST00000397620
  CDS Start-End: 726-1646
cccgatgcctcctctcccttcaacgcttctgctgctgctcgctgcttgatgatggcggccagtattttaaaaaatagcaaaattattcatcggcttctttccctcccgtgcctctgcgtgtgtgcgagtgtgtgtgcgtgcgtgtgtgcgtgtctgggcgcgcgtgttccagcgctgtgcgagcgggcgggcggcgagtgcgtgtgagtggtgtgtgtgtgtgcgtgtgcaatcgttacacgctttcgcctcgctccagcttttaccccagcagcgcgattcccccggttctcctgctgccgctgctgcgccgctgccgccgtggctcgcgcggctcggggcgggcacgggctgcgtaggagccgccgccggggccgccgctggggccgcgctgccgcagccgctgcgccgccgcctagactactagcctgggctgcttgttttgtctctgaaattgacaaggacgcagggaatccgctgctaaataatgtttctgtacgatgagctgccccattacggcgggatggacggagtaggggttcccgcttccatgtacggagaccctcacgcgccgcggccgatccccccggttcaccacctgaaccacgggccgccgctccacgccacacagcactacggcgcgcacgccccgcaccccaatgtcatgccggccagtatgggatccgctgtcaacgacgccttgaagcgggacaaggacgcgatctatggctctggtctttgagaagtgcgagctggcgacctgcactccccgggaacctggagtggctggcggagacgtctgctcctccgactccttcaacgaggacatcgcggtcttcgccaagcaggttcgcgccgaaaagccacttttttcctcaaatccagagctggacaatttgatgatacaagcaatacaagtactaaggtttcatcttttggagttagaaaaggtccacgaactgtgcgataacttctgccaccgatacattagctgtttgaaggggaaaatgcccatcgacctcgtcattgatgaaagagacggcagctccaagtcagatcatgaagaactttcaggctcctccacaaatctcgctgaccataacccttcttcttggcgagaccacgatgatgcaacctcaacccactcagcaggcaccccagggccctccagtgggggccatgcttcccagagcggagacaacagcagtgagcaaggggatggtttagacaacagtgtagcttcacctggtacaggtgacgatgatgatccggataaggacaaaaaacgccagaagaaaagaggcattttccccaaagtagcaacaaatatcatgagagcatggctcttccagcatctcacacatccgtacccttccgaagagcagaagaaacagttagcgcaagacacaggacttacaattctccaagtaaacaactggtttattaatgccagaagaagaatagtacagcccatgattgaccagtcaaatcgagcagtgagccaaggagcagcatatagtccagagggtcagcccatggggagctttgtgttggatggtcagcaacacatggggatccggcctgcaggacctatgagtggaatgggcatgaatatgggcatggatgggcaatggcactacatgtaaccttcatcatgtaaagcaatcgcaaagcaagggggaagtttgcagagcatgccaggggactacgtttctcagggtggtcctatgggaatgagtatggcacagccaagttacactcctccccagatgaccccacaccctactcaattaagacatggacccccaatgcattcatatttgccaagccatccccaccacccagccatgatgatgcacggaggaccccctacccaccctggaatgactatgtcagcacagagccccacaatgttaaattctgtagatcccaatgttggcggacaggttatggacattcatgcccaatagtataagggaactcaagggaaaaggaaacacacgcaaaaactattttaagactttctgaactttgaccagatgttgacacttaatatgaaattccagacagctgtgattattttttacttttgtcatttttcatcaagcaacagaggaccaatgcaacaagaacacaaatgtgaaatcatgggctgactgagacaattctgtccatgtaaagatcctctggaaaaagactccgagagttataactactgtagtataaatataggaactaagttaaacttgtacatttctgttgatcacgccgttatgttgcctcaaatagttttag

SEQ ID NO: 152445 - DNA, 2748 bp, Homo sapiens
  Payload ID: 9982
  Gene Symbol: MEIS2
  Gene Name: Meis homeobox 2
  Uniprot ID: O14770
  ENST ID: ENST00000397624
  CDS Start-End: 352-1272
catctttatcccttcctctcttttctgttcgccctcttctccctgctctttttccctttccacccccctcctctgttctccctcacctcctgcgccccctcccccttcccgggttctgacagtacgatgagctgccccattacggcgggatggacggagtaggggttcccgcttccatgtacggagaccctcacgcgccgcggccgatccccccggttcaccacctgaaccacgggccgccgctccacgccacacagcactacggcgcgcacgccccgcaccccaatgtcatgccggccagtatgggatccgctgtcaacgacgccttgaagcgggacaaggacgcgatctatggctctggtctttgagaagtgcgagctggcgacctgcactccccgggaacctggagtggctggcggagacgtctgctcctccgactccttcaacgaggacatcgcggtcttcgccaagcaggttcgcgccgaaaagccacttttttcctcaaatccagagctggacaatttgatgatacaagcaatacaagtactaaggtttcatcttttggagttagaaaaggtccacgaactgtgcgataacttctgccaccgatacattagctgtttgaaggggaaaatgcccatcgacctcgtcattgatgaaagagacggcagctccaagtcagatcatgaagaactttcaggctcctccacaaatctcgctgaccataacccttcttcttggcgagaccacgatgatgcaacctcaacccactcagcaggcaccccagggccctccagtgggggccatgcttcccagagcggagacaacagcagtgagcaaggggatggtttagacaacagtgtagcttcacctggtacaggtgacgatgatgatccggataaggacaaaaaacgccagaagaaaagaggcattttccccaaagtagcaacaaatatcatgagagcatggctcttccagcatctcacacatccgtacccttccgaagagcagaagaaacagttagcgcaagacacaggacttacaattctccaagtaaacaactggtttattaatgccagaagaagaatagtacagcccatgattgaccagtcaaatcgagcagtgagccaaggagcagcatatagtccagagggtcagcccatggggagctttgtgttggatggtcagcaacacatggggatccggcctgcaggacctatgagtggaatgggcatgaatatgggcatggatgggcaatggcactacatgtaaccttcatcatgtaaagcaatcgcaaagcaagggggaagtttgcagagcatgccaggggactacgtttctcagggtggtcctatgggaatgagtatggcacagccaagttacactcctccccagatgaccccacaccctactcaattaagacatggacccccaatgcattcatatttgccaagccatccccaccacccagccatgatgatgcacggaggaccccctacccaccctggaatgactatgtcagcacagagccccacaatgttaaattctgtagatcccaatgttggcggacaggttatggacattcatgcccaatagtataagggaactcaagggaaaaggaaacacacgcaaaaactattttaagactttctgaactttgaccagatgttgacacttaatatgaaattccagacagctgtgattattttttacttttgtcatttttcatcaagcaacagaggaccaatgcaacaagaacacaaatgtgaaatcatgggctgactgagacaattctgtccatgtaaagatcctctggaaaaagactccgagagttataactactgtagtataaatataggaactaagttaaacttgtacatttctgttgatcacgccgttatgttgcctcaaatagttttagaagagaaaaaaaaatatatccttgttttccacactatgtgtgttgttcccaaaagaatgactgttttggttcatcagtgaattcaccatccaggagagactgtggtatatattttaaacctgttgggccaatgagaaaagaaccacactggagatcatgatgaacttttggctgaacctcatcactcgaactccagcttcaagaatgtgttttcatgcccggcctttgttcctccataaatgtgtcctttagtttcaaacagatctttatagttcgtgcttcataagccaattcttattattatttttgggggactcttcttcaaagagcttgccaatgaagatttaaagacagagcaggagcttcttccaggagttctgagccttggttgtggacaaaacaatcttaagttgggcagctttcctcaacacaaaaaaaagttattaatggtcattgaaccataactaggactttatcagaaactcaaagcttgggggataaaaaggagcaagagaatactgtaacaaacttcgtacagagttcggtctattaattgtttcatgttagatattctatgtgtttacctcaattgaaaaaaaaaagaatgtttttgctagtatcagatctgctgtggaattggtattgtatgtccatgaattcttcttttctcagcacgtgttcctcactagaagaaaatgctgttacctttaagctttgtcaaatttacattaaaatacttgtatgaggactgtgacgttatgttaaaaaaaaaaaggtgttaagtcacaaaaagcggtaataaatatttcatttttgattttttgtta

SEQ ID NO: 152446 - DNA, 2917 bp, Homo sapiens
  Payload ID: 9982
  Gene Symbol: MEIS2
  Gene Name: Meis homeobox 2
  Uniprot ID: O14770
  ENST ID: ENST00000424352
  CDS Start-End: 1065-2270
ggctcggcgcggcgcgctcctcctcgctcccgctccccactcccgggatgtgtctccgccgtacgacgggctatggccaccacgacttccgggttccgtcatttcgttctcccgccgccgacccgcgccgccaaactgaggctcttcaataagccaggcagcagccaacctgccaacacctactgacactcactcatctcccagagagagaaagagagcgagagagagcgagcgcgagagagcgagcgcgagtgagagcgagcgagcgagcgagaaagagagagagggagagacaaaatacctaccaggaaagggggggaggaagtccaatttttgcaaactattcatttttttttcttgatttttctcactgctttctttgaacaatactttaaagagagaggatcgtattatagataccgcgggggcaaagctaaaaaaggggggaggggggaggaaaaaattcaagaagcagaaacccctcgcggagttttactggaagaaaaaaacgggtctgaaagattcctcctcttcatcatcatcaaccatcattcattcactaccttgacattccgggctttgattgacagctggagtggcaaaaagccatgaaacacgacagttcggttacatgtgggctgctgacgggccgctcgtaaccttcagttcgggggcttgacaatttttttcttctttttcttctttttcttttctttctttttttttccaactgaggggaagagaagagaaagagggggaaaggaggaccgaagaggaggaggaggggaggggggaggaggaggaggtggaggaggaggaggaagatcaggaggaggaggaagaagaggaaaaaagagaaaaagaagaaatatcacagaaaaaaaaattcttcgttgtctagactgggctttttttcccccctaaaaaatagcatattggagaattgggagaagtctctttggtttggaaaaaaaaaaaaggaatcttcagcctagatcactttcttatccggactgggatattaaatatacgacacatccaggagtttattggagcgcagactgatggcgcaaaggtacgatgagctgccccattacggcgggatggacggagtaggggttcccgcttccatgtacggagaccctcacgcgccgcggccgatccccccggttcaccacctgaaccacgggccgccgctccacgccacacagcactacggcgcgcacgccccgcaccccaatgtcatgccggccagtatgggatccgctgtcaacgacgccttgaagcgggacaaggacgcgatctatgggcacccgttgtttcctctgttagctctggtctttgagaagtgcgagctggcgacctgcactccccgggaacctggagtggctggcggagacgtctgctcctccgactccttcaacgaggacatcgcggtcttcgccaagcaggttcgcgccgaaaagccacttttttcctcaaatccagagctggacaatttgatgatacaagcaatacaagtactaaggtttcatcttttggagttagaaaaggtccacgaactgtgcgataacttctgccaccgatacattagctgtttgaaggggaaaatgcccatcgacctcgtcattgatgaaagagacggcagctccaagtcagatcatgaagaactttcaggctcctccacaaatctcgctgaccataacccttcttcttggcgagaccacgatgatgcaacctcaacccactcagcaggcaccccagggccctccagtgggggccatgcttcccagagcggagacaacagcagtgagcaaggggatggtttagacaacagtgtagcttcacctggtacaggtgacgatgatgatccggataaggacaaaaaacgccagaagaaaagaggcattttccccaaagtagcaacaaatatcatgagagcatggctcttccagcatctcacacatccgtacccttccgaagagcagaagaaacagttagcgcaagacacaggacttacaattctccaagtaaacaactggtttattaatgccagaagaagaatagtacagcccatgattgaccagtcaaatcgagcaggttttcttcttgatccttcagtgagccaaggagcagcatatagtccagagggtcagcccatggggagctttgtgttggatggtcagcaacacatggggatccggcctgcaggacctatgagtggaatgggcatgaatatgggcatggatgggcaatggcactacatgtaaccttcatcatgtaaagcaatcgcaaagcaagggggaagtttgcagagcatgccaggggactacgtttctcagggtggtcctatgggaatgagtatggcacagccaagttacactcctccccagatgaccccacaccctactcaattaagacatggacccccaatgcattcatatttgccaagccatccccaccacccagccatgatgatgcacggaggaccccctacccaccctggaatgactatgtcagcacagagccccacaatgttaaattctgtagatcccaatgttggcggacaggttatggacattcatgcccaatagtataagggaactcaagggaaaaggaaacacacgcaaaaactattttaagactttctgaactttgaccagatgttgacacttaatatgaaattccagacagctgtgattattttttacttttgtcatttttcatcaagcaacagaggaccaatgcaacaagaacacaaatgtgaaatcatgggctgactgagacaattctgtccatgtaaagatcctctggaaaaagactccgagagttataactactgtagtataaatataggaactaagttaaacttgtacatttctgttgatcacgccgttatgttgcctcaaatagtttt

SEQ ID NO: 152447 - DNA, 2666 bp, Homo sapiens
  Payload ID: 9982
  Gene Symbol: MEIS2
  Gene Name: Meis homeobox 2
  Uniprot ID: O14770
  ENST ID: ENST00000557796
  CDS Start-End: 434-1579
cggcttctttccctcccgtgcctctgcgtgtgtgcgagtgtgtgtgcgtgcgtgtgtgcgtgtctgggcgcgcgtgttccagcgctgtgcgagcgggcgggcggcgagtgcgtgtgagtggtgtgtgtgtgtgcgtgtgcaatcgttacacgctttcgcctcgctccagcttttaccccagcagcgcgattcccccggttctcctgctgccgctgctgcgccgctgccgccgtggctcgcgcggctcggggcgggcacgggctgcgtaggagccgccgccggggccgccgctggggccgcgctgccgcagccgctgcgccgccgcctagactactagcctgggctgcttgttttgtctctgaaattgacaaggacgcagggaatccgctgctaaataatgtttctgtacgatgagctgccccattacggcgggatggacggagtaggggttcccgcttccatgtacggagaccctcacgcgccgcggccgatccccccggttcaccacctgaaccacgggccgccgctccacgccacacagcactacggcgcgcacgccccgcaccccaatgtcatgccggccagtatgggatccgctgtcaacgacgccttgaagcgggacaaggacgcgatctatgggcacccgttgtttcctctgttagctctggtctttgagaagtgcgagctggcgacctgcactccccgggaacctggagtggctggcggagacgtctgctcctccgactccttcaacgaggacatcgcggtcttcgccaagcaggttcgcgccgaaaagccacttttttcctcaaatccagagctggacaatttgatgatacaagcaatacaagtactaaggtttcatcttttggagttagaaaaggtccacgaactgtgcgataacttctgccaccgatacattagctgtttgaaggggaaaatgcccatcgacctcgtcattgatgaaagagacggcagctccaagtcagatcatgaagaactttcaggctcctccacaaatctcgctgaccataacccttcttcttggcgagaccacgatgatgcaacctcaacccactcagcaggcaccccagggccctccagtgggggccatgcttcccagagcggagacaacagcagtgagcaaggggatggtttagacaacagtgtagcttcacctggtacaggtgacgatgatgatccggataaggacaaaaaacgccagaagaaaagaggcattttccccaaagtagcaacaaatatcatgagagcatggctcttccagcatctcacacatccgtacccttccgaagagcagaagaaacagttagcgcaagacacaggacttacaattctccaagtaaacaactggtttattaatgccagaagaagaatagtacagcccatgattgaccagtcaaatcgagcagtgagccaaggagcagcatatagtccagagggtcagcccatggggagctttgtgttggatggtcagcaacacatggggatccggcctgcaggacctatgagtggaatgggcatgaatatgggcatggatgggcaatggcactacatgtaaccttcatcatgtaaagcaatcgcaaagcaagggggaagtttgcagagcatgccaggggactacgtttctcagggtggtcctatgggaatgagtatggcacagccaagttacactcctccccagatgaccccacaccctactcaattaagacatggacccccaatgcattcatatttgccaagccatccccaccacccagccatgatgatgcacggaggaccccctacccaccctggaatgactatgtcagcacagagccccacaatgttaaattctgtagatcccaatgttggcggacaggttatggacattcatgcccaatagtataagggaactcaagggaaaaggaaacacacgcaaaaactattttaagactttctgaactttgaccagatgttgacacttaatatgaaattccagacagctgtgattattttttacttttgtcatttttcatcaagcaacagaggaccaatgcaacaagaacacaaatgtgaaatcatgggctgactgagacaattctgtccatgtaaagatcctctggaaaaagactccgagagttataactactgtagtataaatataggaactaagttaaacttgtacatttctgttgatcacgccgttatgttgcctcaaatagttttagaagagaaaaaaaaatatatccttgttttccacactatgtgtgttgttcccaaaagaatgactgttttggttcatcagtgaattcaccatccaggagagactgtggtatatattttaaacctgttgggccaatgagaaaagaaccacactggagatcatgatgaacttttggctgaacctcatcactcgaactccagcttcaagaatgtgttttcatgcccggcctttgttcctccataaatgtgtcctttagtttcaaacagatctttatagttcgtgcttcataagccaattcttattattatttttgggggactcttcttcaaagagcttgccaatgaagatttaaagacagagcaggagcttcttccaggagttctgagccttggttgtggacaaaacaatcttaagttgggcagctttcctcaacacaaaaaaa

SEQ ID NO: 152448 - DNA, 552 bp, Homo sapiens
  Payload ID: 9982
  Gene Symbol: MEIS2
  Gene Name: Meis homeobox 2
  ENST ID: ENST00000560697
  CDS Start-End: 270-552
gttgattacagttcttgctccttcccctctgcaccccgtctctgtgtgtgtgtctctgcgtggcgctgcccgttaggcacccgttgtttcctctgttagctctggtctttgagaagtgcgagctggcgacctgcactccccgggaacctggagtggctggcggagacgtctgctcctccgactccttcaacgaggacatcgcggtcttcgccaagcaggttcgcgccgaaaagccacttttttcctcaaatccagagctggacaatttgatgatacaagcaatacaagtactaaggtttcatcttttggagttagaaaaggtccacgaactgtgcgataacttctgccaccgatacattagctgtttgaaggggaaaatgcccatcgacctcgtcattgatgaaagagacggcagctccaagtcagatcatgaagaactttcaggctcctccacaaatctcgctgaccataacccttcttcttggcgagaccacgatgatgcaacctcaacccactcagcaggcaccccagggccctccagtgggggccatg

SEQ ID NO: 152449 - DNA, 605 bp, Homo sapiens
  Payload ID: 9982
  Gene Symbol: MEIS2
  Gene Name: Meis homeobox 2
  ENST ID: ENST00000560617
  CDS Start-End: 291-605
ggaagatggctggaaattattttatattctgagagcacttggcgaggggtgagatgcacgatcctaacgtgtaccacacgagctcttccggctgagggcacccgttgtttcctctgttagctctggtctttgagaagtgcgagctggcgacctgcactccccgggaacctggagtggctggcggagacgtctgctcctccgactccttcaacgaggacatcgcggtcttcgccaagcaggttcgcgccgaaaagccacttttttcctcaaatccagagctggacaatttgatgatacaagcaatacaagtactaaggtttcatcttttggagttagaaaaggtccacgaactgtgcgataacttctgccaccgatacattagctgtttgaaggggaaaatgcccatcgacctcgtcattgatgaaagagacggcagctccaagtcagatcatgaagaactttcaggctcctccacaaatctcgctgaccataacccttcttcttggcgagaccacgatgatgcaacctcaacccactcagcaggcaccccagggccctccagtgggggccatgcttcccagagcggagacaacagcagtgagcaa

SEQ ID NO: 152450 - DNA, 2538 bp, Homo sapiens
  Payload ID: 9982
  Gene Symbol: MEIS2
  Gene Name: Meis homeobox 2
  Uniprot ID: O14770
  ENST ID: ENST00000559085
  CDS Start-End: 131-1297
cttttctgttcgccctcttctccctgctctttttccctttccacccccctcctctgttctccctcacctcctgcgccccctcccccttcccgggttctgacagtacgatgagctgccccattacggcgggatggacggagtaggggttcccgcttccatgtacggagaccctcacgcgccgcggccgatccccccggttcaccacctgaaccacgggccgccgctccacgccacacagcactacggcgcgcacgccccgcaccccaatgtcatgccggccagtatgggatccgctgtcaacgacgccttgaagcgggacaaggacgcgatctatgggcacccgttgtttcctctgttagctctggtctttgagaagtgcgagctggcgacctgcactccccgggaacctggagtggctggcggagacgtctgctcctccgactccttcaacgaggacatcgcggtcttcgccaagcaggttcgcgccgaaaagccacttttttcctcaaatccagagctggacaatttgatgatacaagcaatacaagtactaaggtttcatcttttggagttagaaaaggtccacgaactgtgcgataacttctgccaccgatacattagctgtttgaaggggaaaatgcccatcgacctcgtcattgatgaaagagacggcagctccaagtcagatcatgaagaactttcaggctcctccacaaatctcgctgaccataacccttcttcttggcgagaccacgatgatgcaacctcaacccactcagcaggcaccccagggccctccagtgggggccatgcttcccagagcggagacaacagcagtgagcaaggggatggtttagacaacagtgtagcttcacctggtacaggtgacgatgatgatccggataaggacaaaaaacgccagaagaaaagaggcattttccccaaagtagcaacaaatatcatgagagcatggctcttccagcatctcacacatccgtacccttccgaagagcagaagaaacagttagcgcaagacacaggacttacaattctccaagtaaacaactggtttattaatgccagaagaagaatagtacagcccatgattgaccagtcaaatcgagcaggttttcttcttgatccttcagtgagccaaggagcagcatatagtccagagggtcagcccatggggagctttgtgttggatggtcagcaacacatggggatccggcctgcaggacctatgagtggaatgggcatgaatatgggcatggatgggcaatggcactacatgtaaccttcatcatgtaaagcaatcgcaaagcaagggggaagtttgcagagcatgccaggggactacgtttctcagggtggtcctatgggaatgagtatggcacagccaagttacactcctccccagatgaccccacaccctactcaattaagacatggacccccaatgcattcatatttgccaagccatccccaccacccagccatgatgatgcacggaggaccccctacccaccctggaatgactatgtcagcacagagccccacaatgttaaattctgtagatcccaatgttggcggacaggttatggacattcatgcccaatagtataagggaactcaagggaaaaggaaacacacgcaaaaactattttaagactttctgaactttgaccagatgttgacacttaatatgaaattccagacagctgtgattattttttacttttgtcatttttcatcaagcaacagaggaccaatgcaacaagaacacaaatgtgaaatcatgggctgactgagacaattctgtccatgtaaagatcctctggaaaaagactccgagagttataactactgtagtataaatataggaactaagttaaacttgtacatttctgttgatcacgccgttatgttgcctcaaatagttttagaagagaaaaaaaaatatatccttgttttccacactatgtgtgttgttcccaaaagaatgactgttttggttcatcagtgaattcaccatccaggagagactgtggtatatattttaaacctgttgggccaatgagaaaagaaccacactggagatcatgatgaacttttggctgaacctcatcactcgaactccagcttcaagaatgtgttttcatgcccggcctttgttcctccataaatgtgtcctttagtttcaaacagatctttatagttcgtgcttcataagccaattcttattattatttttgggggactcttcttcaaagagcttgccaatgaagatttaaagacagagcaggagcttcttccaggagttctgagccttggttgtggacaaaacaatcttaagttgggcagctttcctcaacacaaaaaaaagttattaatggtcattgaaccataactaggactttatcagaaactcaaagcttgggggataaaaaggagcaagagaatactgtaacaaacttcgtacagagttcggtctattaattgtttcatgttagatattctatgtgtttacctcaattg

SEQ ID NO: 152451 - DNA, 2321 bp, Homo sapiens
  Payload ID: 9982
  Gene Symbol: MEIS2
  Gene Name: Meis homeobox 2
  ENST ID: ENST00000560570
  CDS Start-End: 17-313
attggagcgcagactgatggcgcaaaggtacgatgagctgccccattacggcgggatggacggagtaggggttcccgcttccatgtacggagaccctcacgcgccgcggccgatccccccggttcaccacctgaaccacgggccgccgctccacgccacacagcactacggcgcgcacgccccgcaccccaatgtcatgccggccagtatgggatccgctgtcaacgacgccttgaagcgggacaaggacgcgatctatgggttcgcgccgaaaagccacttttttcctcaaatccagagctggacaatttgatgatacaagcaatacaagtactaaggtttcatcttttggagttagaaaaggtccacgaactgtgcgataacttctgccaccgatacattagctgtttgaaggggaaaatgcccatcgacctcgtcattgatgaaagagacggcagctccaagtcagatcatgaagaactttcaggctcctccacaaatctcgctgaccataacccttcttcttggcgagaccacgatgatgcaacctcaacccactcagcaggcaccccagggccctccagtgggggccatgcttcccagagcggagacaacagcagtgagcaaggggatggtttagacaacagtgtagcttcacctggtacaggtgacgatgatgatccggataaggacaaaaaacgccagaagaaaagaggcattttccccaaagtagcaacaaatatcatgagagcatggctcttccagcatctcacacatccgtacccttccgaagagcagaagaaacagttagcgcaagacacaggacttacaattctccaagtaaacaactggtttattaatgccagaagaagaatagtacagcccatgattgaccagtcaaatcgagcaggttttcttcttgatccttcagtgagccaaggagcagcatatagtccagagggtcagcccatggggagctttgtgttggatggtcagcaacacatggggatccggcctgcaggacctatgagtggaatgggcatgaatatgggcatggatgggcaatggcactacatgtaaccttcatcatgtaaagcaatcgcaaagcaagggggaagtttgcagagcatgccaggggactacgtttctcagggtggtcctatgggaatgagtatggcacagccaagttacactcctccccagatgaccccacaccctactcaattaagacatggacccccaatgcattcatatttgccaagccatccccaccacccagccatgatgatgcacggaggaccccctacccaccctggaatgactatgtcagcacagagccccacaatgttaaattctgtagatcccaatgttggcggacaggttatggacattcatgcccaatagtataagggaactcaagggaaaaggaaacacacgcaaaaactattttaagactttctgaactttgaccagatgttgacacttaatatgaaattccagacagctgtgattattttttacttttgtcatttttcatcaagcaacagaggaccaatgcaacaagaacacaaatgtgaaatcatgggctgactgagacaattctgtccatgtaaagatcctctggaaaaagactccgagagttataactactgtagtataaatataggaactaagttaaacttgtacatttctgttgatcacgccgttatgttgcctcaaatagttttagaagagaaaaaaaaatatatccttgttttccacactatgtgtgttgttcccaaaagaatgactgttttggttcatcagtgaattcaccatccaggagagactgtggtatatattttaaacctgttgggccaatgagaaaagaaccacactggagatcatgatgaacttttggctgaacctcatcactcgaactccagcttcaagaatgtgttttcatgcccggcctttgttcctccataaatgtgtcctttagtttcaaacagatctttatagttcgtgcttcataagccaattcttattattatttttgggggactcttcttcaaagagcttgccaatgaagatttaaagacagagcaggagcttcttccaggagttctgagccttggttgtggacaaaacaatcttaagttgggcagctttcctcaacacaaaaaaaagttattaatggtcattgaaccataactaggactttatcagaaactcaaagcttgggggataaaaaggagcaagagaatactgtaacaaacttcgtacagagttcggtctattaattgtttcatgttagatattctatgtgtttacctcaattg

SEQ ID NO: 152452 - DNA, 1442 bp, Homo sapiens
  Payload ID: 9982
  Gene Symbol: MEIS2
  Gene Name: Meis homeobox 2
  Uniprot ID: O14770
  ENST ID: ENST00000559561
  CDS Start-End: 256-1440
aggaggaggaggaagatcaggaggaggaggaagaagaggaaaaaagagaaaaagaagaaatatcacagaaaaaaaaattcttcgttgtctagactgggctttttttcccccctaaaaaatagcatattggagaattgggagaagtctctttggtttggaaaaaaaaaaaaggaatcttcagcctagatcactttcttatccggactgggatattaaatatacgacacatccaggagtttattggagcgcagactgatggcgcaaaggtacgatgagctgccccattacggcgggatggacggagtaggggttcccgcttccatgtacggagaccctcacgcgccgcggccgatccccccggttcaccacctgaaccacgggccgccgctccacgccacacagcactacggcgcgcacgccccgcaccccaatgtcatgccggccagtatgggatccgctgtcaacgacgccttgaagcgggacaaggacgcgatctatgggcacccgttgtttcctctgttagctctggtctttgagaagtgcgagctggcgacctgcactccccgggaacctggagtggctggcggagacgtctgctcctccgactccttcaacgaggacatcgcggtcttcgccaagcaggttcgcgccgaaaagccacttttttcctcaaatccagagctggacaatttgatgatacaagcaatacaagtactaaggtttcatcttttggagttagaaaaggtccacgaactgtgcgataacttctgccaccgatacattagctgtttgaaggggaaaatgcccatcgacctcgtcattgatgaaagagacggcagctccaagtcagatcatgaagaactttcaggctcctccacaaatctcgctgaccataacccttcttcttggcgagaccacgatgatgcaacctcaacccactcagcaggcaccccagggccctccagtgggggccatgcttcccagagcggagacaacagcagtgagcaaggggatggtttagacaacagtgtagcttcacctggtacaggtgacgatgatgatccggataaggacaaaaaacgccagaagaaaagaggcattttccccaaagtagcaacaaatatcatgagagcatggctcttccagcatctcacacatccgtacccttccgaagagcagaagaaacagttagcgcaagacacaggacttacaattctccaagtaaacaactggtttattaatgccagaagaagaatagtacagcccatgattgaccagtcaaatcgagcagtgagccaaggagcagcatatagtccagagggtcagcccatggggagctttgtgttggatggtcagcaacacatggggatccggcctgcaggacctatgagtggaatgggcatgaatatgggcatggatgggcaatggcactacatgtaacc

SEQ ID NO: 152453 - DNA, 1088 bp, Homo sapiens
  Payload ID: 9982
  Gene Symbol: MEIS2
  Gene Name: Meis homeobox 2
  ENST ID: ENST00000558313
  CDS Start-End: 618-1088
tgactgcctcctcacttcctccctcccgattccgccgcggcccccaaagactctcggggtggccccttgtccgcaccgcttggagggagtgtgctctgagttaagctggtctcttctggtcctggaaaaaaatgagtattgacaaggttgctggatctgcgcagaaaagaaagtgccacttaataaaaaatttagcccggcagtggtaccgtctgcagagcttgctgcccttggacgttagcaggaagccttcggggtgctgtaatcggcgggcagaggagagggaggccgcggaattaaaaggaacaaaagctagagcgccatgccaaacgtccccggcaagacccagttaggcaggagccgggagtgatgggaaaatgaactagaatacgatgagctgccccattacggcgggatggacggagtaggggttcccgcttccatgtacggagaccctcacgcgccgcggccgatccccccggttcaccacctgaaccacgggccgccgctccacgccacacagcactacggcgcgcacgccccgcaccccaatgtcatgccggccagtatgggatccgctgtcaacgacgccttgaagcgggacaaggacgcgatctatggctctggtctttgagaagtgcgagctggcgacctgcactccccgggaacctggagtggctggcggagacgtctgctcctccgactccttcaacgaggacatcgcggtcttcgccaagcaggttcgcgccgaaaagccacttttttcctcaaatccagagctggacaatttgatgatacaagcaatacaagtactaaggtttcatcttttggagttagaaaaggtccacgaactgtgcgataacttctgccaccgatacattagctgtttgaaggggaaaatgcccatcgacctcgtcattgatgaaagagacggcagctccaagtcagatcatgaagaactttcaggctcctccacaaatctcgctgaccataacccttcttcttggcgagaccacgatgatgcaacctcaacccactcagcaggcaccccagggccctccagtgggggccatgcttcccagagcgga

SEQ ID NO: 152454 - DNA, 4822 bp, Homo sapiens
  Payload ID: 9982
  Gene Symbol: MEIS2
  Gene Name: Meis homeobox 2
  Uniprot ID: O14770
  ENST ID: ENST00000561208
  CDS Start-End: 420-1853
cgggccgctcgtaaccttcagttcgggggcttgacaatttttttcttctttttcttctttttcttttctttctttttttttccaactgaggggaagagaagagaaagagggggaaaggaggaccgaagaggaggaggaggggaggggggaggaggaggaggtggaggaggaggaggaagatcaggaggaggaggaagaagaggaaaaaagagaaaaagaagaaatatcacagaaaaaaaaattcttcgttgtctagactgggctttttttcccccctaaaaaatagcatattggagaattgggagaagtctctttggtttggaaaaaaaaaaaaggaatcttcagcctagatcactttcttatccggactgggatattaaatatacgacacatccaggagtttattggagcgcagactgatggcgcaaaggtacgatgagctgccccattacggcgggatggacggagtaggggttcccgcttccatgtacggagaccctcacgcgccgcggccgatccccccggttcaccacctgaaccacgggccgccgctccacgccacacagcactacggcgcgcacgccccgcaccccaatgtcatgccggccagtatgggatccgctgtcaacgacgccttgaagcgggacaaggacgcgatctatgggcacccgttgtttcctctgttagctctggtctttgagaagtgcgagctggcgacctgcactccccgggaacctggagtggctggcggagacgtctgctcctccgactccttcaacgaggacatcgcggtcttcgccaagcaggttcgcgccgaaaagccacttttttcctcaaatccagagctggacaatttgatgatacaagcaatacaagtactaaggtttcatcttttggagttagaaaaggtccacgaactgtgcgataacttctgccaccgatacattagctgtttgaaggggaaaatgcccatcgacctcgtcattgatgaaagagacggcagctccaagtcagatcatgaagaactttcaggctcctccacaaatctcgctgaccataacccttcttcttggcgagaccacgatgatgcaacctcaacccactcagcaggcaccccagggccctccagtgggggccatgcttcccagagcggagacaacagcagtgagcaaggggatggtttagacaacagtgtagcttcacctggtacaggtgacgatgatgatccggataaggacaaaaaacgccagaagaaaagaggcattttccccaaagtagcaacaaatatcatgagagcatggctcttccagcatctcacacatccgtacccttccgaagagcagaagaaacagttagcgcaagacacaggacttacaattctccaagtaaacaactggtttattaatgccagaagaagaatagtacagcccatgattgaccagtcaaatcgagcaggttttcttcttgatccttcagtgagccaaggagcagcatatagtccagagggtcagcccatggggagctttgtgttggatggtcagcaacacatggggatccggcctgcaggtttgcagagcatgccaggggactacgtttctcagggtggtcctatgggaatgagtatggcacagccaagttacactcctccccagatgaccccacaccctactcaattaagacatggacccccaatgcattcatatttgccaagccatccccaccacccagccatgatgatgcacggaggaccccctacccaccctggaatgactatgtcagcacagagccccacaatgttaaattctgtagatcccaatgttggcggacaggttatggacattcatgcccaatagtataagggaactcaagggaaaaggaaacacacgcaaaaactattttaagactttctgaactttgaccagatgttgacacttaatatgaaattccagacagctgtgattattttttacttttgtcatttttcatcaagcaacagaggaccaatgcaacaagaacacaaatgtgaaatcatgggctgactgagacaattctgtccatgtaaagatcctctggaaaaagactccgagagttataactactgtagtataaatataggaactaagttaaacttgtacatttctgttgatcacgccgttatgttgcctcaaatagttttagaagagaaaaaaaaatatatccttgttttccacactatgtgtgttgttcccaaaagaatgactgttttggttcatcagtgaattcaccatccaggagagactgtggtatatattttaaacctgttgggccaatgagaaaagaaccacactggagatcatgatgaacttttggctgaacctcatcactcgaactccagcttcaagaatgtgttttcatgcccggcctttgttcctccataaatgtgtcctttagtttcaaacagatctttatagttcgtgcttcataagccaattcttattattatttttgggggactcttcttcaaagagcttgccaatgaagatttaaagacagagcaggagcttcttccaggagttctgagccttggttgtggacaaaacaatcttaagttgggcagctttcctcaacacaaaaaaaagttattaatggtcattgaaccataactaggactttatcagaaactcaaagcttgggggataaaaaggagcaagagaatactgtaacaaacttcgtacagagttcggtctattaattgtttcatgttagatattctatgtgtttacctcaattgaaaaaaaaaagaatgtttttgctagtatcagatctgctgtggaattggtattgtatgtccatgaattcttcttttctcagcacgtgttcctcactagaagaaaatgctgttacctttaagctttgtcaaatttacattaaaatacttgtatgaggactgtgacgttatgttaaaaaaaaaaaggtgttaagtcacaaaaagcggtaataaatatttcatttttgattttttgttaggcttttgcgtttttaatggttttaggacaagactgcacaatgccaactctatacagtgttaaaagtaggtttttccccccagcagttgagtatattttaaactcatcaataatttttaaggtaatcatctatagcctttcaatgtctatttgacctataagttccaccagcagaaaacttctaaaggtacgaaactatgtgtacatgatgagccaggttgaaagatccccttgaacatgctcaacctcctttttagatgcatgacgttaaaaaatatatactttcagataaagcttttcatgggcatcctctgccagaataaaggacttttcagggttaattttacaacataagaaataatgtctgtgctcaaaggtaatttatctgcctgtgtttttcctctgcctgtcttactacaatattgttggatatgtaaatgaaaatttacatatgggtgttcatagataagtaaacaacttctatggagtttgaaattctgactttaaaagattacttaatcattaatattttataaattatattgtggtatatttttatttcagacacatccatgtgcagggatgctagtgtgatgatttgataactaaacttaaacttttttctgaaaacaaaacaaaacaaaatggacggtataatgccattttcaaaattttatgcaacattcctggaaatctataccattagcttattgatactgcacaaacaatgtctgctaaagtgtgcaaaaagggtgaggcatgtcccctcaattttcaaataaatatactatcctggaattttttaactcttaaattttgaatctttgtttagaaagaataatgtcatatactttggctagatatgtgatgtcaaccggctaaggaaattattcatcatctctgcaaacttaaacttggaagaaatccatagttattatttggggctcttccatctttccatttcagacagcatttatggaggttctatataaatgaacgaggaaatacacttctattgttttgtgttatatttagtcaggtagaatttttacaaatacatttcagtttaagtgttgtgttgctgtttaaacatagaaataatgcttctgacacaaactaacttaatagagaaattcagtgccacttgggaaagagagatagcttccctctcatttttgctattctattttacatgaagtctttttgtaaattttaaatatttgcctatttttactttaaatacttttatgtaaactatgaaaattccccattataaatcaactctcacatcaggtgggaaaaagaacctttttttctttccactcagtaaattctgaagggtttccttggcaattggctcgtgtttaggatgtgttttatgcaattatcaagttatctcattgaagtttagagaccagagctctcaactcttggttttaatgaataaagtcatctcatgcttagtttattcgtcaaacccacgtcctatcatgttaactttaaccttcttaaatatttggagatgaatgataattgtaatatttgtttgcattaccttgctctcccccacccccaaccccatgataacacagagaagtgatagatttgtccaatttttataatgctttttttacaccaccccggaaggcacttgctcctatctcgggtttactatttagtgtaaagagttccgatttgggtatatttaagaaagactcagctgtcaaaagcaaagaaactgggaatggtgttttgacaaccatatagtgttaaaggaaatactgtagtctgaataaaattgcttatgttctccaaaa

SEQ ID NO: 152455 - DNA, 545 bp, Homo sapiens
  Payload ID: 9982
  Gene Symbol: MEIS2
  Gene Name: Meis homeobox 2
  ENST ID: ENST00000606653
  CDS Start-End: 1-420
atacaagtactaaggtttcatcttttggagttagaaaaggtccacgaactgtgcgataacttctgccaccgatacattagctgtttgaaggggaaaatgcccatcgacctcgtcattgatgaaagagacggcagctccaagtcagatcatgaagaactttcaggctcctccacaaatctcgctgaccataacccttcttcttggcgagaccacgatgatgcaacctcaacccactcagcaggcaccccagggccctccagtgggggccatgcttcccagagcggagacaacagcagtgagcaagaatttttcagatttatccccattttccagatgaagtggcttggccttggagagggtcagttacttgactgtcacgatagaaagaggaagcagaagaatgaagacaaagccatttaaaattttcttgttctttaccttttgcataaaaggtattcagttcacaaatgatgtaaaatttaattaaggcaagtgactgtcctgagaaagtcattaaaaccctcatgtcatttctctaatcaaaa

SEQ ID NO: 152456 - DNA, 705 bp, Homo sapiens
  Payload ID: 9982
  Gene Symbol: MEIS2
  Gene Name: Meis homeobox 2
  ENST ID: ENST00000607277
  CDS Start-End: 1-705
gaaggatttcgctggatgatacaagcaatacaagtactaaggtttcatcttttggagttagaaaaggtccacgaactgtgcgataacttctgccaccgatacattagctgtttgaaggggaaaatgcccatcgacctcgtcattgatgaaagagacggcagctccaagtcagatcatgaagaactttcaggctcctccacaaatctcgctgaccataacccttcttcttggcgagaccacgatgatgcaacctcaacccactcagcaggcaccccagggccctccagtgggggccatgcttcccagagcggagacaacagcagtgagcaaggggatggtttagacaacagtgtagcttcacctggtacaggtgacgatgatgatccggataaggacaaaaaacgccagaagaaaagaggcattttccccaaagtagcaacaaatatcatgagagcatggctcttccagcatctcacacatccgtacccttccgaagagcagaagaaacagttagcgcaagacacaggacttacaattctccaagtaaacaactggtttattaatgccagaagaagaatagtacagcccatgattgaccagtcaaatcgagcagtgagccaaggagcagcatatagtccagagggtcagcccatggggagctttgtgttggatggtcagcaacacatggggatccggcctgcaggt

SEQ ID NO: 152457 - DNA, 2104 bp, Homo sapiens
  Payload ID: 9983
  Gene Symbol: MEIS3
  Gene Name: Meis homeobox 3
  ENST ID: ENST00000331559
  CDS Start-End: 443-1657
gaccgggaacggggagcgcggctgccagcacccctgagccgccgccggaccctccgtcgccccgggccgccccccgccccctgcggtccccggtgtgtccgtctcgggacggttcgattccctccagagccggggaagggacggggggggcccagaggagggggcctcgggcgccccgcctgcgcctgctgcccccgccccggcggcgatgcgctcctggccgtgacccccgctgggggcgggggccggggtccatgcgcggagtccccacccggcccggcgcctgccgctgacggcggcgggggtgggggggcgcgcgcctggcctcctgcccaccccctggcgtcaacaccgcgggccgtcaggggctgcggccccgggctgcgccctcccccgcggccaggctctggagggacccaggagctgccgccggcctcagcccatggcccggaggtatgatgagctgccgcactacccaggcatcgtggatggccccgcagccctggctagcttcccagagacagtgcccgcagtaccagggccctatggcccgcaccggcctccccagcccctgcccccaggcttggacagcgacggcctgaagagggagaaggatgagatctatggacacccgctcttccccctcttggccctggtctttgagaaatgtgaactggctacatgctctccccgtgacggggccggagctgggctggggacaccccctggaggtgacgtctgctcctctgattccttcaacgaggacatcgctgcctttgccaagcaggttcgctctgagaggcccctcttctcctccaacccagaactggacaatctgatgatccaggccatccaggtgctgcggttccacctgctggagctggagaagggaaagatgcccatcgacctggtcatcgaggatcgggacggcggctgcagggaggacttcgaggactacccagcctcctgccccagcctcccagaccagaataatatgtggattcgagaccatgaggatagtgggtctgtacatttggggaccccaggtccatccagtgggggcctggcctcccagagtggggacaactccagtgaccaaggagacgggctggacaccagcgtggcctctcccagttctggtggagaagatgaggacttggaccaggagcgacggcgaaacaagaagagggggatcttccccaaggtggccaccaacatcatgcgagcctggttgttccagcacctctcgagacgctcagaagcgccggttctcccagacgtctgcctgggcctgggctccccatcccccggaccccggtgggccagaccttggggttcagactgcggccggccaggcaggcagagtgactcttgctggtggctgcagcacccgtacccctcggaggagcagaagaaacagctggcgcaggacacggggctcaccatcctgcaagtcaacaactggttcattaacgcccggagacgcatcgtgcaacctatgatcgatcaatccaaccgcacagggcagggtgcagccttcagcccagagggccagcccatcgggggctataccgagacgcagccacacgtggccgtccggcctccgggatcagtggggatgagtttgaacttggaaggagaatggcattatctatagaggctgatgcaggagagacccagcctccggctgtgacccccagcctcacacctgcctctggttcccgcctggtcctccagcttcaggaccccacctccaaaggcccctctgctcaatgcctacctccctagggccctgctgggacatgggggcctgagtgcccatccaagggctctcaaggacaccggcaaggcctccaggccctgagccccacttctgccttcacctctgcctgggacccgagctgggctcctgggccttggtccccagaagatggcggctagggcctcgccgccaggacagagaagggacggggtggctgggcagtcagggaaggagggtcgcccggatccgacattttggagagattccttcactctcctgtcccccctacctcccttctctaatttcttcttttttttaatgataaagtcttaaaaacacgga

SEQ ID NO: 152458 - DNA, 1758 bp, Homo sapiens
  Payload ID: 9983
  Gene Symbol: MEIS3
  Gene Name: Meis homeobox 3
  Uniprot ID: Q99687
  ENST ID: ENST00000441740
  CDS Start-End: 235-1311
atgcgctcctggccgtgacccccgctgggggcgggggccggggtccatgcgcggagtccccacccggcccggcgcctgccgctgacggcggcgggggtgggggggcgcgcgcctggcctcctgcccaccccctggcgtcaacaccgcgggccgtcaggggctgcggccccgggctgcgccctcccccgcggccaggctctggagggacccaggagctgccgccggcctcagcccatggcccggaggtatgatgagctgccgcactacccaggcatcgtggatggccccgcagccctggctagcttcccagagacagtgcccgcagtaccagggccctatggcccgcaccggcctccccagcccctgcccccaggcttggacagcgacggcctgaagagggagaaggatgagatctatggacacccgctcttccccctcttggccctggtctttgagaaatgtgaactggctacatgctctccccgtgacggggccggagctgggctggggacaccccctggaggtgacgtctgctcctctgattccttcaacgaggacatcgctgcctttgccaagcaggttcgctctgagaggcccctcttctcctccaacccagaactggacaatctgatgatccaggccatccaggtgctgcggttccacctgctggagctggagaagggaaagatgcccatcgacctggtcatcgaggatcgggacggcggctgcagggaggacttcgaggactacccagcctcctgccccagcctcccagaccagaataatatgtggattcgagaccatgaggatagtgggtctgtacatttggggaccccaggtccatccagtgggggcctggcctcccagagtggggacaactccagtgaccaaggagacgggctggacaccagcgtggcctctcccagttctggtggagaagatgaggacttggaccaggagcgacggcgaaacaagaagagggggatcttccccaaggtggccaccaacatcatgcgagcctggttgttccagcacctctcgcacccgtacccctcggaggagcagaagaaacagctggcgcaggacacggggctcaccatcctgcaagtcaacaactggttcattaacgcccggagacgcatcgtgcaacctatgatcgatcaatccaaccgcacagggcagggtgcagccttcagcccagagggccagcccatcgggggctataccgagacgcagccacacgtggccgtccggcctccgggatcagtggggatgagtttgaacttggaaggagaatggcattatctatagaggctgatgcaggagagacccagcctccggctgtgacccccagcctcacacctgcctctggttcccgcctggtcctccagcttcaggaccccacctccaaaggcccctctgctcaatgcctacctccctagggccctgctgggacatgggggcctgagtgcccatccaagggctctcaaggacaccggcaaggcctccaggccctgagccccacttctgccttcacctctgcctgggacccgagctgggctcctgggccttggtccccagaagatggcggctagggcctcgccgccaggacagagaagggacggggtggctgggcagtcagggaaggagggtcgcccggatccgacattttggagagattccttcactctcctgtcccccctacctcccttctctaatttcttcttttttttaatgataaagtcttaaaaacacgga

SEQ ID NO: 152459 - DNA, 1828 bp, Homo sapiens
  Payload ID: 9983
  Gene Symbol: MEIS3
  Gene Name: Meis homeobox 3
  Uniprot ID: Q99687
  ENST ID: ENST00000559524
  CDS Start-End: 42-1307
aggctctggagggacccaggagctgccgccggcctcagcccatggcccggaggtatgatgagctgccgcactacccaggcatcgtggatggccccgcagccctggctagcttcccagagacagtgcccgcagtaccagggccctatggcccgcaccggcctccccagcccctgcccccaggcttggacagcgacggcctgaagagggagaaggatgagatctatggacacccgctcttccccctcttggccctggtctttgagaaatgtgaactggctacatgctctccccgtgacggggccggagctgggctggggacaccccctggaggtgacgtctgctcctctgattccttcaacgaggacatcgctgcctttgccaagcaggttcgctctgagaggcccctcttctcctccaacccagaactggacaatctgatgatccaggccatccaggtgctgcggttccacctgctggagctggagaaggtccacgacctgtgcgacaacttctgtcaccgctacatcacctgcctcaagggaaagatgcccatcgacctggtcatcgaggatcgggacggcggctgcagggaggacttcgaggactacccagcctcctgccccagcctcccagaccagaataatatgtggattcgagaccatgaggatagtgggtctgtacatttggggaccccaggtccatccagtgggggcctggcctcccagagtggggacaactccagtgaccaaggagacgggctggacaccagcgtggcctctcccagttctggtggagaagatgaggacttggaccaggagcgacggcgaaacaagaagagggggatcttccccaaggtggccaccaacatcatgcgagcctggttgttccagcacctctcgagacgctcagaagcgccggttctcccagacgtctgcctgggcctgggctccccatcccccggaccccggtgggccagaccttggggttcagactgcggccggccaggcaggcagagtgactcttgctggtggctgcagcacccgtacccctcggaggagcagaagaaacagctggcgcaggacacggggctcaccatcctgcaagtcaacaactggttcattaacgcccggagacgcatcgtgcaacctatgatcgatcaatccaaccgcacagggcagggtgcagccttcagcccagagggccagcccatcgggggctataccgagacgcagccacacgtggccgtccggcctccgggatcagtggggatgagtttgaacttggaaggagaatggcattatctatagaggctgatgcaggagaggtgtgagggtctaagggctggggattgtgcaattctcaaacctccattagacctcaggactccaagagtgggcacttccagagtagtgggtcagcctgggtccctgtactgtgggttctctgaggcttgatgggaagatattcatccatctgtccgtccgtccatccatccatccatccatccatcctcctcctccatgtatccatccatctacccactcactcacccatccatatctttatccatccgttactcaattactcattcacccgcaatccatccatccaaacctagtccacccacctacccactcattacccatctgaccacacattcacccactcactccattcatctctccactcgccaacccactcatccatctacctccacactgaccaaccacccacacatctacccatttatctgtgcattcacccacctccctacccaggcttccacccacctacccatcaactcacccatccatccacccacacatcc

SEQ ID NO: 152460 - DNA, 532 bp, Homo sapiens
  Payload ID: 9983
  Gene Symbol: MEIS3
  Gene Name: Meis homeobox 3
  ENST ID: ENST00000559338
  CDS Start-End: 1-532
ccggcctctctcttccctcccaggttcgctctgagaggcccctcttctcctccaacccagaactggacaatctgggaaagatgcccatcgacctggtcatcgaggatcgggacggcggctgcagggaggacttcgaggactacccagcctcctgccccagcctcccagaccagaataatatgtggattcgagaccatgaggatagtgggtctgtacatttggggaccccaggtccatccagtgggggcctggcctcccagagtggggacaactccagtgaccaaggagacgggctggacaccagcgtggcctctcccagttctggtggagaagatgaggacttggaccaggagcgacggcgaaacaagaagagggggatcttccccaaggtggccaccaacatcatgcgagcctggttgttccagcacctctcgagacgctcagaagcgccggttctcccagacgtctgcctgggcctgggctccccatcccccggaccccggtgggccagaccttggggttcagactgcgg

SEQ ID NO: 152461 - DNA, 1918 bp, Homo sapiens
  Payload ID: 9983
  Gene Symbol: MEIS3
  Gene Name: Meis homeobox 3
  Uniprot ID: Q99687
  ENST ID: ENST00000561293
  CDS Start-End: 208-1473
ggggcgggggccggggtccatgcgcggagtccccacccggcccggcgcctgccgctgacggcggcgggggtgggggggcgcgcgcctggcctcctgcccaccccctggcgtcaacaccgcgggccgtcaggggctgcggccccgggctgcgccctcccccgcggccaggctctggagggacccaggagctgccgccggcctcagcccatggcccggaggtatgatgagctgccgcactacccaggcatcgtggatggccccgcagccctggctagcttcccagagacagtgcccgcagtaccagggccctatggcccgcaccggcctccccagcccctgcccccaggcttggacagcgacggcctgaagagggagaaggatgagatctatggacacccgctcttccccctcttggccctggtctttgagaaatgtgaactggctacatgctctccccgtgacggggccggagctgggctggggacaccccctggaggtgacgtctgctcctctgattccttcaacgaggacatcgctgcctttgccaagcaggttcgctctgagaggcccctcttctcctccaacccagaactggacaatctgatgatccaggccatccaggtgctgcggttccacctgctggagctggagaaggtccacgacctgtgcgacaacttctgtcaccgctacatcacctgcctcaagggaaagatgcccatcgacctggtcatcgaggatcgggacggcggctgcagggaggacttcgaggactacccagcctcctgccccagcctcccagaccagaataatatgtggattcgagaccatgaggatagtgggtctgtacatttggggaccccaggtccatccagtgggggcctggcctcccagagtggggacaactccagtgaccaaggagacgggctggacaccagcgtggcctctcccagttctggtggagaagatgaggacttggaccaggagcgacggcgaaacaagaagagggggatcttccccaaggtggccaccaacatcatgcgagcctggttgttccagcacctctcgagacgctcagaagcgccggttctcccagacgtctgcctgggcctgggctccccatcccccggaccccggtgggccagaccttggggttcagactgcggccggccaggcaggcagagtgactcttgctggtggctgcagcacccgtacccctcggaggagcagaagaaacagctggcgcaggacacggggctcaccatcctgcaagtcaacaactggttcattaacgcccggagacgcatcgtgcaacctatgatcgatcaatccaaccgcacagggcagggtgcagccttcagcccagagggccagcccatcgggggctataccgagacgcagccacacgtggccgtccggcctccgggatcagtggggatgagtttgaacttggaaggagaatggcattatctatagaggctgatgcaggagagacccagcctccggctgtgacccccagcctcacacctgcctctggttcccgcctggtcctccagcttcaggaccccacctccaaaggcccctctgctcaatgcctacctccctagggccctgctgggacatgggggcctgagtgcccatccaagggctctcaaggacaccggcaaggcctccaggccctgagccccacttctgccttcacctctgcctgggacccgagctgggctcctgggccttggtccccagaagatggcggctagggcctcgccgccaggacagagaagggacggggtggctgggcagtcagggaaggagggtcgcccggatccgacattttggagagattccttcactctcctgtcccccctacctcccttctctaatttcttcttttttttaatgataaagtcttaaaaacacg

SEQ ID NO: 152462 - DNA, 1199 bp, Homo sapiens
  Payload ID: 9983
  Gene Symbol: MEIS3
  Gene Name: Meis homeobox 3
  ENST ID: ENST00000560245
  CDS Start-End: 1-753
ccgcccccgtccctgagcacccccgccctgcccccgtgggtggccccccccagtaccccggtgcccccccaggtccacgacctgtgcgacaacttctgtcaccgctacatcacctgcctcaagggaaagatgcccatcgacctggtcatcgaggatcgggacggcggctgcagggaggacttcgaggactacccagcctcctgccccagcctcccagaccagaataatatgtggattcgagaccatgaggatagtgggtctgtacatttggggaccccaggtccatccagtgggggcctggcctcccagagtggggacaactccagtgaccaaggagacgggctggacaccagcgtggcctctcccagttctggtggagaagatgaggacttggaccaggagcgacggcgaaacaagaagagggggatcttccccaaggtggccaccaacatcatgcgagcctggttgttccagcacctctcgcacccgtacccctcggaggagcagaagaaacagctggcgcaggacacggggctcaccatcctgcaagtcaacaactggttcattaacgcccggagacgcatcgtgcaacctatgatcgatcaatccaaccgcacagggcagggtgcagccttcagcccagagggccagcccatcgggggctataccgagacgcagccacacgtggccgtccggcctccgggatcagtggggatgagtttgaacttggaaggagaatggcattatctatagaggctgatgcaggagagacccagcctccggctgtgacccccagcctcacacctgcctctggttcccgcctggtcctccagcttcaggaccccacctccaaaggcccctctgctcaatgcctacctccctagggccctgctgggacatgggggcctgagtgcccatccaagggctctcaaggacaccggcaaggcctccaggccctgagccccacttctgccttcacctctgcctgggacccgagctgggctcctgggccttggtccccagaagatggcggctagggcctcgccgccaggacagagaagggacggggtggctgggcagtcagggaaggagggtcgcccggatccgacattttggagagattccttcactctcctgtcccccctacctcccttctctaatttcttcttttttttaatgataaagtcttaaaaacacgg

SEQ ID NO: 152463 - DNA, 1883 bp, Homo sapiens
  Payload ID: 9983
  Gene Symbol: MEIS3
  Gene Name: Meis homeobox 3
  ENST ID: ENST00000561096
  CDS Start-End: 46-1437
ttatctgccaactgtgaaatgaaatagaagacagggaggcttcgtatgtgtactttgtgtacaacaatgcgcggttcctacaggaggtgtccatggatctccctctctgtctgtctctctctctgtctctgtcactgtcttctcacgccactttctccatctcttttccctcccagccagaccctgccgtctctccctctgggtcctcctgcccacatgtcaggaatctctgcctggacggggtcctcactccccaccgaggcagctccaggggacctggagggcttcaagcttgggggctcagacacctggggaccacagtatgatgagctgccgcactacccaggcatcgtggatggccccgcagccctggctagcttcccagagacagtgcccgcagtaccagggccctatggcccgcaccggcctccccagcccctgcccccaggcttggacagcgacggcctgaagagggagaaggatgagatctatggacacccgctcttccccctcttggccctggtctttgagaaatgtgaactggctacatgctctccccgtgacggggccggagctgggctggggacaccccctggaggtgacgtctgctcctctgattccttcaacgaggacatcgctgcctttgccaagcaggttcgctctgagaggcccctcttctcctccaacccagaactggacaatctgatgatccaggccatccaggtgctgcggttccacctgctggagctggagaaggtccacgacctgtgcgacaacttctgtcaccgctacatcacctgcctcaagggaaagatgcccatcgacctggtcatcgaggatcgggacggcggctgcagggaggacttcgaggactacccagcctcctgccccagcctcccagaccagaataatatgtggattcgagaccatgaggatagtgggtctgtacatttggggaccccaggtccatccagtgggggcctggcctcccagagtggggacaactccagtgaccaaggagacgggctggacaccagcgtggcctctcccagttctggtggagaagatgaggacttggaccaggagcgacggcgaaacaagaagagggggatcttccccaaggtggccaccaacatcatgcgagcctggttgttccagcacctctcgcacccgtacccctcggaggagcagaagaaacagctggcgcaggacacggggctcaccatcctgcaagtcaacaactggttcattaacgcccggagacgcatcgtgcaacctatgatcgatcaatccaaccgcacagggcagggtgcagccttcagcccagagggccagcccatcgggggctataccgagacgcagccacacgtggccgtccggcctccgggatcagtggggatgagtttgaacttggaaggagaatggcattatctatagaggctgatgcaggagagacccagcctccggctgtgacccccagcctcacacctgcctctggttcccgcctggtcctccagcttcaggaccccacctccaaaggcccctctgctcaatgcctacctccctagggccctgctgggacatgggggcctgagtgcccatccaagggctctcaaggacaccggcaaggcctccaggccctgagccccacttctgccttcacctctgcctgggacccgagctgggctcctgggccttggtccccagaagatggcggctagggcctcgccgccaggacagagaagggacggggtggctgggcagtcagggaaggagggtcgcccggatccgacattttggagagattccttcactctcctgtcccccctacctcccttctctaatttcttcttttttttaatgataaagtcttaaaaacacgg

SEQ ID NO: 152464 - DNA, 1715 bp, Homo sapiens
  Payload ID: 9983
  Gene Symbol: MEIS3
  Gene Name: Meis homeobox 3
  Uniprot ID: Q99687
  ENST ID: ENST00000558555
  CDS Start-End: 189-1316
atgcgcggagtccccacccggcccggcgcctgccgctgacggcggcgggggtgggggggcgcgcgcctggcctcctgcccaccccctggcgtcaacaccgcgggccgtcaggggctgcggccccgggctgcgccctcccccgcggccaggctctggagggacccaggagctgccgccggcctcagcccatggcccggaggtatgatgagctgccgcactacccaggcatcgtggatggccccgcagccctggctagcttcccagagacagtgcccgcagtaccagggccctatggcccgcaccggcctccccagcccctgcccccaggcttggacagcgacggcctgaagagggagaaggatgagatctatggacacccgctcttccccctcttggccctggtctttgagaaatgtgaactggctacatgctctccccgtgacggggccggagctgggctggggacaccccctggaggtgacgtctgctcctctgattccttcaacgaggacatcgctgcctttgccaagcaggttcgctctgagaggcccctcttctcctccaacccagaactggacaatctgatgatccaggccatccaggtgctgcggttccacctgctggagctggagaaggtccacgacctgtgcgacaacttctgtcaccgctacatcacctgcctcaagggaaagatgcccatcgacctggtcatcgaggatcgggacggcggctgcagggaggacttcgaggactacccagcctcctgccccagcctcccagaccagaataatatgtggattcgagaccatgaggatagtgggtctgtacatttggggaccccaggtccatccagtgggggcctggcctcccagagtggggacaactccagtgaccaaggagacgggctggacaccagcgtggcctctcccagttctggtggagaagatgaggacttggaccaggagcgacggcgaaacaagaagagggggatcttccccaaggtggccaccaacatcatgcgagcctggttgttccagcacctctcgcacccgtacccctcggaggagcagaagaaacagctggcgcaggacacggggctcaccatcctgcaagtcaacaactggttcattaacgcccggagacgcatcgtgcaacctatgatcgatcaatccaaccgcacagggcagggtgcagccttcagcccagagggccagcccatcgggggctataccgagacgcagccacacgtggccgtccggcctccgggatcagtggggatgagtttgaacttggaaggagaatggcattatctatagaggctgatgcaggagagacccagcctccggctgtgacccccagcctcacacctgcctctggttcccgcctggtcctccagcttcaggaccccacctccaaaggcccctctgctcaatgcctacctccctagggccctgctgggacatgggggcctgagtgcccatccaagggctctcaaggacaccggcaaggcctccaggccctgagccccacttctgccttcacctctgcctgggacccgagctgggctcctgggccttggtccccagaagatggcggctagggcctcgccgccaggacagagaagggacggggtggctgggcagtcagggaaggagggtcgcccggatccgacattttggagagattccttcactctcctgtcccccctacctccc

SEQ ID NO: 152465 - DNA, 378 bp, Homo sapiens
  Payload ID: 9983
  Gene Symbol: MEIS3
  Gene Name: Meis homeobox 3
  ENST ID: ENST00000607695
  CDS Start-End: 1-378
ttccccaaggtggccaccaacatcatgcgagcctggttgttccagcacctctcggcgggggctggcaggcatgtaattgccccaagcctgaggctcccttggtctccatcctggggagcgcagagacgctcagaagcgccggttctcccagacgtctgcctgggcctgggctccccatcccccggaccccggtgggccagaccttggggttcagactgcggccggccaggcaggcagagtgactcttgctggtggctgcagcacccgtacccctcggaggagcagaagaaacagctggcgcaggacacggggctcaccatcctgcaagtcaacaactggttcattaacgcccggagacgcatcgtgcaacctatgatc

SEQ ID NO: 152466 - DNA, 733 bp, Homo sapiens
  Payload ID: 9983
  Gene Symbol: MEIS3
  Gene Name: Meis homeobox 3
  ENST ID: ENST00000557833
  CDS Start-End: 72-733
cggccccgggctgcgccctcccccgcggccaggctctggagggacccaggagctgccgccggcctcagcccatggcccggaggtatgatgagctgccgcactacccaggcatcgtggatggccccgcagccctggctagcttcccagagacagtgcccgcagtaccagggccctatggcccgcaccggcctccccagcccctgcccccaggcttggacagcgacggcctgaagagggagaaggatgagatctatggacacccgctcttccccctcttggccctggtctttgagaaatgtgaactggctacatgctctccccgtgacggggccggagctgggctggggacaccccctggaggtgacgtctgctcctctgattccttcaacgaggacatcgctgcctttgccaagcaggttcgctctgagaggcccctcttctcctccaacccagaactggacaatctgatgatccaggccatccaggtgctgcggttccacctgctggagctggagaaggtgagcgcgtctcacctccccacaccctcacttgcccctgtcatcccaccccctctcgtcgcctctgccccccaccttccagctctctccccaccggagttgaagcagaatgccgcccccgtccctgagcacccccgccctgcccccgtgggtggccccccccagtaccccggtgcccccccaggtccacgacctgtgcgacaacttctgtcacc

SEQ ID NO: 152467 - DNA, 1000 bp, Homo sapiens
  Payload ID: 9984
  Gene Symbol: MLANA
  Gene Name: melan-A
  Uniprot ID: Q16655
  ENST ID: ENST00000381471
  CDS Start-End: 407-763
ctctcattaaggaaggtaagagcgttgccttctcgccataatcatagtcctcttctcccagaataggatttgggaaattctggctaagtcctctgcctaccctcattgccccgctgatgtgtgacatcaacagaatttctccgcaacgtttgtcagtctccaacctcagagggctcacaaagcctcctcctgaatcctctctcagtcctccaacactaccaagaagaaaagcaattattcaggatggcatcttgctggggagaagcagcctccctgaggtagatgtgttctcctgtcacttaaagaaccacttctcctggtctgagtagtaagaggcgcatttgctgttgctgcaccatttgccaaggctctgagtttgaggtgtcctgtgccctgaccctacaagatgccaagagaagatgctcacttcatctatggttaccccaagaaggggcacggccactcttacaccacggctgaagaggccgctgggatcggcatcctgacagtgatcctgggagtcttactgctcatcggctgttggtattgtagaagacgaaatggatacagagccttgatggataaaagtcttcatgttggcactcaatgtgccttaacaagaagatgcccacaagaagggtttgatcatcgggacagcaaagtgtctcttcaagagaaaaactgtgaacctgtggttcccaatgctccacctgcttatgagaaactctctgcagaacagtcaccaccaccttattcaccttaagagccagcgagacacctgagacatgctgaaattatttctctcacacttttgcttgaatttaatacagacatctaatgttctcctttggaatggtgtaggaaaaatgcaagccatctctaataataagtcagtgttaaaattttagtaggtccgctagcagtactaatcatgtgaggaaatgatgagaaatattaaattgggaaaactccatcaataaatgttgcaatgcatgatact

SEQ ID NO: 152468 - DNA, 791 bp, Homo sapiens
  Payload ID: 9984
  Gene Symbol: MLANA
  Gene Name: melan-A
  Uniprot ID: Q16655
  ENST ID: ENST00000381476
  CDS Start-End: 200-556
cagcagacagaggactctcattaaggaagaatttctccgcaacgtttgtcagtctccaacctcagagggctcacaaagcctcctcctgaatcctctctcagtcctccaacactaccaagaagaaaagcaattattcaggatggcatcttgctggggagaagcagcctccctgaggtgtcctgtgccctgaccctacaagatgccaagagaagatgctcacttcatctatggttaccccaagaaggggcacggccactcttacaccacggctgaagaggccgctgggatcggcatcctgacagtgatcctgggagtcttactgctcatcggctgttggtattgtagaagacgaaatggatacagagccttgatggataaaagtcttcatgttggcactcaatgtgccttaacaagaagatgcccacaagaagggtttgatcatcgggacagcaaagtgtctcttcaagagaaaaactgtgaacctgtggttcccaatgctccacctgcttatgagaaactctctgcagaacagtcaccaccaccttattcaccttaagagccagcgagacacctgagacatgctgaaattatttctctcacacttttgcttgaatttaatacagacatctaatgttctcctttggaatggtgtaggaaaaatgcaagccatctctaataataagtcagtgttaaaattttagtaggtccgctagcagtactaatcatgtgaggaaatgatgagaaatattaaattgggaaaactccatcaataaatgttgcaatgcatgata

SEQ ID NO: 152469 - DNA, 2415 bp, Homo sapiens
  Payload ID: 9984
  Gene Symbol: MLANA
  Gene Name: melan-A
  Uniprot ID: Q16655
  ENST ID: ENST00000381477
  CDS Start-End: 161-517
ccgtcagaaatctaaacccgtgactatcatgggactcaaaaccaggaaaaaaaataagtcaaaacgattaagagccagagaagcagtcttcatacacgcggccagccagcagacagaggactctcattaaggaaggtgtcctgtgccctgaccctacaagatgccaagagaagatgctcacttcatctatggttaccccaagaaggggcacggccactcttacaccacggctgaagaggccgctgggatcggcatcctgacagtgatcctgggagtcttactgctcatcggctgttggtattgtagaagacgaaatggatacagagccttgatggataaaagtcttcatgttggcactcaatgtgccttaacaagaagatgcccacaagaagggtttgatcatcgggacagcaaagtgtctcttcaagagaaaaactgtgaacctgtggttcccaatgctccacctgcttatgagaaactctctgcagaacagtcaccaccaccttattcaccttaagagccagcgagacacctgagacatgctgaaattatttctctcacacttttgcttgaatttaatacagacatctaatgttctcctttggaatggtgtaggaaaaatgcaagccatctctaataataagtcagtgttaaaattttagtaggtccgctagcagtactaatcatgtgaggaaatgatgagaaatattaaattgggaaaactccatcaataaatgttgcaatgcatgatactatctgtgccagaggtaatgttagtaaatccatggtgttattttctgagagacagaattcaagtgggtattctggggccatccaatttctctttacttgaaatttggctaataacaaactagtcaggttttcgaaccttgaccgacatgaactgtacacagaattgttccagtactatggagtgctcacaaaggatacttttacaggttaagacaaagggttgactggcctatttatctgatcaagaacatgtcagcaatgtctctttgtgctctaaaattctattatactacaataatatattgtaaagatcctatagctctttttttttgagatggagtttcgcttttgttgcccaggctggagtgcaatggcgcgatcttggctcaccataacctccgcctcccaggttcaagcaattctcctgccttagcctcctgagtagctgggattacaggcgtgcgccactatgcctgactaattttgtagttttagtagagacggggtttctccatgttggtcaggctggtctcaaactcctgacctcaggtgatctgcccgcctcagcctcccaaagtgctggaattacaggcgtgagccaccacgcctggctggatcctatatcttaggtaagacatataacgcagtctaattacatttcacttcaaggctcaatgctattctaactaatgacaagtattttctactaaaccagaaattggtagaaggatttaaataagtaaaagctactatgtactgccttagtgctgatgcctgtgtactgccttaaatgtacctatggcaatttagctctcttgggttcccaaatccctctcacaagaatgtgcagaagaaatcataaaggatcagagattctggaatggtgtcattatttgcatagcaacattgcaatttgttttcctttggctacatcaacgtatcacctacactattatttatctaatatttctctttcaggcagctcatttaaactttttttggctttaattcctattgccatcctgagtggaaaaccagtatcattttccatagtagaggataactataacaacgaagataatgaaagtaatttttttaacctaagaaaatactaatggtcacagaaggctatgaacctgagacctgctctctttgtcaaacagagattaacaaggatcagagaaaagttaaaggctgtctttgacataactggaaggcttacaagagttttaaagaaattactttctcactatatgattcattgctatttaacggtgagtcagtaaaccacctaaaaatcatcttgtctcatcagaaacactagtgtaacataactgcatcattttctactaaagacaaaatttcaccaaaggggaaaaagaaaacacaggataaagagatgtattacacacatcgaaaaaaacaacatttaacaaaatattaaaatatttccccactcttctgatactgtcaagtcttactacttaaaataaggcttccacctctcccacttcaaacaaataaatgaattctaaaccaaagaaacttcatcaggcatttgggtacctcctcccctcaccacgaggtctctgctgaacctcaatcctgtacactgaggaacctgtggcttgaaccctacatccctccagaacccccagactg

SEQ ID NO: 152470 - DNA, 2851 bp, Homo sapiens
  Payload ID: 9985
  Gene Symbol: MCHR1
  Gene Name: melanin-concentrating hormone receptor 1
  Uniprot ID: Q99705
  ENST ID: ENST00000249016
  CDS Start-End: 697-1965
cagatatttgtctcaaagagtcccaggccaaacctcagggacctcagagcgtttagaaaaataacacctctgtgagcttggtccaggcagatcccatgcagagaggagtttgtccccttccagtccccgaggtcctggctattgccagcatggagtgacctgtgtcacctctgagtgccaggcaagggttcagcagctgacgactcagcttctgcaggatgctggcagcatagccagcgagatagttggaagccgtcagggcacagggaaggggccgagggtgccctgagtgtgcatggggggcagccctgctgcagtccaagcctttgattcccaagctatgtgcacagtttcctctggactctgccatgtggcccagccacccatacctggaataggggctaagccaagctgctctctcctccaaagggaggcagcctgtgtgctttgtccgtttgcctttgcagagacctcgatcttcacgcaaggcaagcagcagcccctgtaagcacacgagacaatcccaagtgtcagtgggaaggagatccctttcctgatggggctgcctgtgtccagtccctcccagcttccccagggccctggggctctgcaggcattcagaagtggaagccagccacagcctgggactgaagaggttaatgtgcatctgcctccgaatgttaatgtgtctaggtgatgtcagtgggagccatgaagaagggagtggggagggcagttgggcttggaggcggcagcggctgccaggctacggaggaagacccccttcccaactgcggggcttgcgctccgggacaaggtggcaggcgctggaggctgccgcagcctgcgtgggtggaggggagctcagctcggttgtgggagcaggcgaccggcactggctggatggacctggaagcctcgctgctgcccactggtcccaacgccagcaacacctctgatggccccgataacctcacttcggcaggatcacctcctcgcacggggagcatctcctacatcaacatcatcatgccttcggtgttcggcaccatctgcctcctgggcatcatcgggaactccacggtcatcttcgcggtcgtgaagaagtccaagctgcactggtgcaacaacgtccccgacatcttcatcatcaacctctcggtagtagatctcctctttctcctgggcatgcccttcatgatccaccagctcatgggcaatggggtgtggcactttggggagaccatgtgcaccctcatcacggccatggatgccaatagtcagttcaccagcacctacatcctgaccgccatggccattgaccgctacctggccactgtccaccccatctcttccacgaagttccggaagccctctgtggccaccctggtgatctgcctcctgtgggccctctccttcatcagcatcacccctgtgtggctgtatgccagactcatccccttcccaggaggtgcagtgggctgcggcatacgcctgcccaacccagacactgacctctactggttcaccctgtaccagtttttcctggcctttgccctgccttttgtggtcatcacagccgcatacgtgaggatcctgcagcgcatgacgtcctcagtggcccccgcctcccagcgcagcatccggctgcggacaaagagggtgacccgcacagccatcgccatctgtctggtcttctttgtgtgctgggcaccctactatgtgctacagctgacccagttgtccatcagccgcccgaccctcacctttgtctacttatacaatgcggccatcagcttgggctatgccaacagctgcctcaacccctttgtgtacatcgtgctctgtgagacgttccgcaaacgcttggtcctgtcggtgaagcctgcagcccaggggcagcttcgcgctgtcagcaacgctcagacggctgacgaggagaggacagaaagcaaaggcacctgatacttcccctgccaccctgcacacctccaagtcagggcaccacaacacgccaccgggagagatgctgagaaaaacccaagaccgctcgggaaatgcaggaaggccgggttgtgaggggttgttgcaatgaaataaatacattccatggggctcacacgttgctggggaggcctggagtcaggtttggggttttcagatatcagaaatccccttgggggagcaggatgagacctttggatagaacagaagctgagcaagagaacatgttggtttggataaccggttgcactatatctgtgagctctcaaatgtcttcttcccaaggcaagaggtggaagggtactgactgggtttgtttaaagtcaggcagggctggagtgagcagccagggccatgttgcacaaggcctgagagacgggaaagggcccgatcgctctttcccgcctctcactggtgcgatggaaggtggcctttctcccaagctggtggataatgaaaaataaagcatcccatctctcggcgttccagcatcctgtcaatttcccttttgctctagaggatgcatgtttatttgaggggatgtggcactgagcccacaggagtaaaagcccagtttgctaggaggtctgcttactgaaaacaaggagacctggggtgggtgtggttgggggtcttaaaactaataaaagctggggtcggggggcttttgcagctctggtgacattctctccacggggcacatttgctcagtcactaatccagcttgagtgtccgtgtgttctgcatgtgcaggggtcattctagtgcccggtgtgttggcatcatctttttgctctagcccttcctctccaaaataaaatcaaataaaggaaaatctccacccaca

SEQ ID NO: 152471 - DNA, 1219 bp, Homo sapiens
  Payload ID: 9985
  Gene Symbol: MCHR1
  Gene Name: melanin-concentrating hormone receptor 1
  ENST ID: ENST00000381433
  CDS Start-End: 174-1064
ccaagtgtcagtgggaaggagatccctttcctgatggggctgcctgtgtccagtccctcccagcttccccagggccctggggctctgcaggcattcagaagtggaagccagccacagcctgggactgaagaggttaatgtgcatctgcctccgaatgttaatgtgtctaggtgatgtcagtgggagccatgaagaagggagtggggagggcagttgggcttggaggcggcagcggctgccaggctacggaggaagacccccttcccaactgcggggcttgcgctccgggacaaggtggcaggcgctggaggctgccgcagcctgcgtgggtggaggggagctcagctcggttgtgggagcaggcgaccggcactggctggatggacctggaagcctcgctgctgcccactggtcccaacgccagcaacacctctgatggccccgataacctcacttcggcaggatcacctcctcgcacggggagcatctcctacatcaacatcatcatgccttcggtgttcggcaccatctgcctcctgggcatcatcgggaactccacggtcatcttcgcggtcgtgaagaagtccaagctgcactggtgcaacaacgtccccgacatcttcatcatcaacctctcgtttttcctggcctttgccctgccttttgtggtcatcacagccgcatacgtgaggatcctgcagcgcatgacgtcctcagtggcccccgcctcccagcgcagcatccggctgcggacaaagagggtgacccgcacagccatcgccatctgtctggtcttctttgtgtgctgggcaccctactatgtgctacagctgacccagttgtccatcagccgcccgaccctcacctttgtctacttatacaatgcggccatcagcttgggctatgccaacagctgcctcaacccctttgtgtacatcgtgctctgtgagacgttccgcaaacgcttggtcctgtcggtgaagcctgcagcccaggggcagcttcgcgctgtcagcaacgctcagacggctgacgaggagaggacagaaagcaaaggcacctgatacttcccctgccaccctgcacacctccaagtcagggcaccacaacacgccaccgggagagatgctgagaaaaacccaagaccgctcgggaaatgcaggaaggccgggttgtgaggggttgttgcaatgaaataaatacattccatggggctcac

SEQ ID NO: 152472 - DNA, 2368 bp, Homo sapiens
  Payload ID: 9986
  Gene Symbol: MCHR2
  Gene Name: melanin-concentrating hormone receptor 2
  Uniprot ID: Q969V1
  ENST ID: ENST00000281806
  CDS Start-End: 316-1338
agaaaagagcacgacgcacccgatgctcggattggatgaagtggcaaaggtaaccccgctggttcgggcgtttggctgttcctgtgcctggacccccgctttggaaatggaggtggggctggctcccaacctgtctcagagaccctcgcactcctcccccaccttccgtcagctgggacccgctgagagccgtttttggtcacgcgcgcttagcggatagacctgcagtcccgcagagaggaagggcgcccgggctgtccgccgcgcggggaggacgcgagcacccagctttaatccctggaaagtccacgaacaatgaatccatttcatgcatcttgttggaacacctctgccgaacttttaaacaaatcctggaataaagagtttgcttatcaaactgccagtgtggtagatacagtcatcctcccttccatgattgggattatctgttcaacagggctggttggcaacatcctcattgtattcactataataagatccaggaaaaaaacagtccctgacatctatatctgcaacctggctgtggctgatttggtccacatagttggaatgccttttcttattcaccaatgggcccgagggggagagtgggtgtttggggggcctctctgcaccatcatcacatccctggatacttgtaaccaatttgcctgtagtgccatcatgactgtaatgagtgtggacaggtactttgccctcgtccaaccatttcgactgacacgttggagaacaaggtacaagaccatccggatcaatttgggcctttgggcagcttcctttatcctggcattgcctgtctgggtctactcgaaggtcatcaaatttaaagacggtgttgagagttgtgcttttgatttgacatcccctgacgatgtactctggtatacactttatttgacgataacaactttttttttccctctacccttgattttggtgtgctatattttaattttatgctatacttgggagatgtatcaacagaataaggatgccagatgctgcaatcccagtgtaccaaaacagagagtgatgaagttgacaaagatggtgctggtgctggtggtagtctttatcctgagtgctgccccttatcatgtgatacaactggtgaacttacagatggaacagcccacactggccttctatgtgggttattacctctccatctgtctcagctatgccagcagcagcattaacccttttctctacatcctgctgagtggaaatttccagaaacgtctgcctcaaatccaaagaagagcgactgagaaggaaatcaacaatatgggaaacactctgaaatcacacttttaggaaagtacatggatcaccatgagtctagacatgattgtctatcttactggtattatcagaaagggcaggtgtaccgatatgtttatgcccattcttcttgtgtacttgtgactcttagcagcatggaagagaagtgtaaccatgcaaatacaatgagcttaatatgctaactttagcaagatgtaaaatgttgatctatattgtgggtagggaatgggatagtctgagatacccaggcttcatgatggtgtatattatttcagcatattataaactagtcactaatgaaaatggccatccatgaccattgactcaaaactcaccaaggaacctgaccttgccctccacactgtggcctcactgtaacagtttcctcaaggttcctaggagggtatcaccttagagtgaagtctaaaatttggctattttttatctataaaaaatgtcagttttatatggtccaatactaataccctcaacaactaagccccaccttttagaataagttaccatttattgcacacatgcaatgtgtaagattacatgtaacaaacctgtgaaataagtattattacctttgtttgctaaggctcagaaaggagaaatgataggcctaatgctgcaacagctatctaagagctgagctaacattcagctctgcctgtttcttttctactgcacgaccttgacaacctttacttatcatactggagaacccagtaacttggagtttcttttgctttctcctgtagccctacaagaggagaactaaagtctgatagaaatgagttgatgttttaagcatcattttggattatctttgttctcacacctgctaactgtagaaactggcatctgcactttaataataatactttacttctggactttaagcataattaggaaacattcctggccgggtgcagtggctcatgcctgtaatcccagcactttgggaggtggaggcaggtggatcacaaagtcagaagttcaagaccagtctggccaacatagtgagaccctgtctact

SEQ ID NO: 152473 - DNA, 1311 bp, Homo sapiens
  Payload ID: 9986
  Gene Symbol: MCHR2
  Gene Name: melanin-concentrating hormone receptor 2
  Uniprot ID: Q969V1
  ENST ID: ENST00000369212
  CDS Start-End: 101-1123
ttcgcgaaggcaccccacgctcctagaaaagagcacgacgcacccgatgctcggattggatgaagtggcaaagctttaatccctggaaagtccacgaacaatgaatccatttcatgcatcttgttggaacacctctgccgaacttttaaacaaatcctggaataaagagtttgcttatcaaactgccagtgtggtagatacagtcatcctcccttccatgattgggattatctgttcaacagggctggttggcaacatcctcattgtattcactataataagatccaggaaaaaaacagtccctgacatctatatctgcaacctggctgtggctgatttggtccacatagttggaatgccttttcttattcaccaatgggcccgagggggagagtgggtgtttggggggcctctctgcaccatcatcacatccctggatacttgtaaccaatttgcctgtagtgccatcatgactgtaatgagtgtggacaggtactttgccctcgtccaaccatttcgactgacacgttggagaacaaggtacaagaccatccggatcaatttgggcctttgggcagcttcctttatcctggcattgcctgtctgggtctactcgaaggtcatcaaatttaaagacggtgttgagagttgtgcttttgatttgacatcccctgacgatgtactctggtatacactttatttgacgataacaactttttttttccctctacccttgattttggtgtgctatattttaattttatgctatacttgggagatgtatcaacagaataaggatgccagatgctgcaatcccagtgtaccaaaacagagagtgatgaagttgacaaagatggtgctggtgctggtggtagtctttatcctgagtgctgccccttatcatgtgatacaactggtgaacttacagatggaacagcccacactggccttctatgtgggttattacctctccatctgtctcagctatgccagcagcagcattaacccttttctctacatcctgctgagtggaaatttccagaaacgtctgcctcaaatccaaagaagagcgactgagaaggaaatcaacaatatgggaaacactctgaaatcacacttttaggaaagtacatggatcaccatgagtctagacatgattgtctatcttactggtattatcagaaagggcaggtgtaccgatatgtttatgcccattcttcttgtgtacttgtgactcttagcagcatggaagagaagtgtaaccatgcaaatacaatgagcttaatatgctaactttagcaagatgtaaaa

SEQ ID NO: 152474 - DNA, 3099 bp, Homo sapiens
  Payload ID: 9987
  Gene Symbol: MC1R
  Gene Name: melanocortin 1 receptor (alpha melanocyte stimulating hormone receptor)
  Uniprot ID: Q01726
  ENST ID: ENST00000555147
  CDS Start-End: 1381-2334
agacgcagtcttcagcaaggaagtgctgggaacgccctggagtgaacccaggaagatgcctgcagtgggtgccagggcccctctccaccgtccctgctgggcttcggggccacgcccgactgctgtgaacggcctgcggagcaccacgtgcgacggctggaggcgagaggtctgcctttgatgtggctgttggtgcagggcctgtggtgccttccgcagcggaaatggcgcgccgcccggggagggcgggagcagcgtcccgggtgcccctgtgaggatgagcgacgagatgactggagggtccctgaagacctcactagggtgcccccagccggtccgctcccaggaagcgacacccccacagccccagggctgcagctgagggggtcgccactctggctgggcgaggctgggcccttgggggcaggcgccagagtggcctcaggctctacaagatgcctgaaaacaccaacctctccagggctcactagcattggacgctttcacgctctgccctggccggaagccccctcaccccgcgcgatgtgcaaactcctgcagggctcactcagtttccagaactttaattattggaaagttctccctggtccagcccccaaatctgccgtgaacgttgacagctgagttgctgctccatgcgtgctttggctgagagcagaggggacccctgtcctccctgagctgctgacgaggggaggggtgaagggtggggcctctggagagggcaggtcccggggaagctccggactcctagaggggcggccaggtgggggccctggtgaccaggacagactgtggtgttttttaacgtaaaggagatccgcggtgtgagggaccccctgggtcctgcacgccgcctggtggcaggccgggccatggtgggtgctcacgcccccggcatgtggccgccctcagtgggaggggctctgagaacgactttttaaaacgcagagaaaagctccattcttcccaggacctcagcgcagccctggcccaggaaggcaggagacagaggccaggacggtccagaggtgtcgaaatgtcctggggacctgagcagcagccaccagggaagaggcagggagggagctgaggaccaggcttggttgtgagaatccctgagcccaggcggtagatgccaggaggtgtctggactggctgggccatgcctgggctgacctgtccagccagggagagggtgtgagggcagatctgggggtgcccagatggaaggaggcaggcatgggggacacccaaggccccctggcagcaccatgaactaagcaggacacctggaggggaagaactgtggggacctggaggcctccaacgactccttcctgcttcctggacaggactatggctgtgcagggatcccagagaagacttctgggctccctcaactccacccccacagccatcccccagctggggctggctgccaaccagacaggagcccggtgcctggaggtgtccatctctgacgggctcttcctcagcctggggctggtgagcttggtggagaacgcgctggtggtggccaccatcgccaagaaccggaacctgcactcacccatgtactgcttcatctgctgcctggccttgtcggacctgctggtgagcgggagcaacgtgctggagacggccgtcatcctcctgctggaggccggtgcactggtggcccgggctgcggtgctgcagcagctggacaatgtcattgacgtgatcacctgcagctccatgctgtccagcctctgcttcctgggcgccatcgccgtggaccgctacatctccatcttctacgcactgcgctaccacagcatcgtgaccctgccgcgggcgcggcgagccgttgcggccatctgggtggccagtgtcgtcttcagcacgctcttcatcgcctactacgaccacgtggccgtcctgctgtgcctcgtggtcttcttcctggctatgctggtgctcatggccgtgctgtacgtccacatgctggcccgggcctgccagcacgcccagggcatcgcccggctccacaagaggcagcgcccggtccaccagggctttggccttaaaggcgctgtcaccctcaccatcctgctgggcattttcttcctctgctggggccccttcttcctgcatctcacactcatcgtcctctgccccgagcaccccacgtgcggctgcatcttcaagaacttcaacctctttctcgccctcatcatctgcaatgccatcatcgaccccctcatctacgccttccacagccaggagctccgcaggacgctcaaggaggtgctgacatgctcctggtgagcgcggtgcacgcggctttaagtgtgctgggcagagggaggtggtgatattgtgtggtctggttcctgtgtgaccctgggcagttccttacctccctggtccccgtttgtcaaagaggatggactaaatgatctctgaaagtgttgaagcgcggacccttctgggtccagggaggggtccctgcaaaactccaggcaggacttctcaccagcagtcgtggggaacggaggaggacatggggaggttgtggggcctcaggctccgggcaccaggggccaacctcaggctcctaaagagacattttccgcccactcctgggacactccgtctgctccaatgactgagcagcatccaccccaccccatctttgctgccagctctcaggaccgtgccctcgtcagctgggatgtgaagtctctgggtggaagtgtgtgccaagagctactcccacagcagccccaggagaaggggctttgtgaccagaaagcttcatccacagccttgcagcggctcctgcaaaaggaggtgaaatccctgcctcaggccaagggaccaggtttgcaggagcccccctagtggtatggggctgagccctcctgagggccggttctaaggctcagactgggcactggggcctcagcctgctttcctgcagcagtcgcccaagcagacagccctggcaaatgcctgactcagtgaccagtgcctgtgagcatggggccaggaaagtctggtaataaatgtgactcagcatcacccacctta

SEQ ID NO: 152475 - DNA, 3637 bp, Homo sapiens
  Payload ID: 9987
  Gene Symbol: MC1R
  Gene Name: melanocortin 1 receptor (alpha melanocyte stimulating hormone receptor)
  ENST ID: ENST00000555427
  CDS Start-End: 2304-3452
ctgcagctgagcctacttccaatgaccgtgagatctgaaagactgttttgagggcgtagcctctgccatgattgtggggaatgctgtcctgtttcctcccttggccctgctcagcccagcgagaggctgaggcgcacgtggctccccgggtgcccacaggcagcgtggctcaccagccgggcccttttccactgagccagaaccccccaaagccttcaatgcaggcaccacggtgagcccacgagaaaccctgcttgccacctcccacacccccacccccaagttcaaaggaaatggtccctgaaccaagggctgagatcagctgtgggtccagctgtcctggggagctgtactggagcccaccacggtgggactgttggtccggcggtgacccccacctccatgtctgtggccgcagctggacaggccactccctgggccacagagatgttttacctctcgcagccctcgggcacacattgagcagatgtgtgtgtgtgtgcgtgtgtgggtgggtgcgcatttgtgtgtgcctgtgtgtgtgcgcatgtggtgtgggtgcacgtgtgtgcacgtgtgtgggtaaacattgtgtgtgcgcatacgtgtgtgggtaaacatttgtatgtgcacgcgtgtgtgggtaaacgtgtgtgcgcacgtatgtatgtgtgtacatttgtatgtgtgtacatttgtatgcatgtgtgcctgtgtgtgtgtgcctgtgtgtgtgggtgcacatttgtgtgtgtgtgtgtgcctgtgtgtgtgtgtgcacgtatgtatgtgtgcacacttgtatgcatgtgtgcctgtgtgtgtgggtgcacatttgtgtgtgtgtgcctgtgtgtgtgggtgcacatttgtgtgtgtgggtgcacatttgtgtgtgtgtgcgcctgtgtgggtgcacatttgtgtgtgtgtgtgcctgtgtgtgtgcctgtgtgtgtgggtgcctgtgtgtgtggggcacatttgtgtgtgtgtgtgcctgtgtgtgggtgcacatttgtgtgtgtgcctctgtgtgtgtgcctgtgtgtgggggtgcacatttgtgtgtgcgcctgtgtgtgggggtgcacatttgtgtgtgcgcctgtgtgtgtgggtgcacatttgtgtgtgtgtgcgcctgtgtgtgtgggtgcctgtgtgtgtgtggggcacatttgtgtgtgtgtgtgtgcctgtgtgtgggtgcacatttgtgtgtgtgcctgtgtgtgtgtgcctgtgtgtgggggtgcacatttgtgtgtgtgtgtgcctgtgtgtgggggtgcacatttgtgtgtgtgtgtgcctgtgtgtgtgggtgcacatttgtgtgtgtgtgtgcctgtgtgtgtgggtgcacatttgtgtgtgtgtgcctgtgtgtgtgggtgcacatttgtgtgtgtgtgtgcctgtgtgtgtgggtgcacatttgtgtgtgtgcctgtgtgtgggtgcacatttgtgtgtgtgtgcctgtgtgtgtgtgcctgtgtgtgtgggtgcacatttgtgtgtgtgtgtgcctgtgtgtgtgggtgcacatttgtgtgtgtgtgtgtgcctgtgtgtgtgttgcaggccctggatgccagacactgaataaacgcaggaagacgtctgtcttcattctcctcgtgggtcgctggtccagaaacacctggatggaaagtgctctgcaggaacggtgcctctgcctgtggcggggaccctgcacagacgcagtcttcagcaaggaagtgctgggaacgccctggagtgaacccaggaagatgcctgcagtgggtgccagggcccctctccaccgtccctgctgggcttcggggccacgcccgactgctgtgaacggcctgcggagcaccacgtgcgacggctggaggcgagagagaaaagctccattcttcccaggacctcagcgcagccctggcccaggaaggcaggagacagaggccaggacggtccagaggtgtcgaaatgtcctggggacctgagcagcagccaccagggaagaggcagggagggagctgaggaccaggcttggttgtgagaatccctgagcccaggcggtagatgccaggaggtgtctggactggctgggccatgcctgggctgacctgtccagccagggagagggtgtgagggcagatctgggggtgcccagatggaaggaggcaggcatgggggacacccaaggccccctggcagcaccatgaactaagcaggacacctggaggggaagaactgtggggacctggaggcctccaacgactccttcctgcttcctggacaggactatggctgtgcagggatcccagagaagacttctgggctccctcaactccacccccacagccatcccccagctggggctggctgccaaccagacaggagcccggtgcctggaggtgtccatctctgacgggctcttcctcagcctggggctggtgagcttggtggagaacgcgctggtggtggccaccatcgccaagaaccggaacctgcactcacccatgtactgcttcatctgctgcctggccttgtcggacctgctggtgagcgggagcaacgtgctggagacggccgtcatcctcctgctggaggccggtgcactggtggcccgggctgcggtgctgcagcagctggacaatgtcattgacgtgatcacctgcagctccatgctgtccagcctctgcttcctgggcgccatcgccgtggaccgctacatctccatcttctacgcactgcgctaccacagcatcgtgaccctgccgcgggcgcggcgagccgttgcggccatctgggtggccagtgtcgtcttcagcacgctcttcatcgcctactacgaccacgtggccgtcctgctgtgcctcgtggtcttcttcctggctatgctggtgctcatggccgtgctgtacgtccacatgctggcccgggcctgccagcacgcccagggcatcgcccggctccacaagaggcagcgcccggtccaccagggctttggccttaaaggcgctgtcaccctcaccatcctgctgggcattttcttcctctgctggggccccttcttcctgcatctcacactcatcgtcctctgccccgagcaccccacgtgcggctgcatcttcaagaacttcaacctctttctcgccctcatcatctgcaatgccatcatcgaccccctcatctacgccttccacagccaggagctccgcaggacgctcaaggaggtgctgacatgctcctgctctcaggaccgtgccctcgtcagctgggatgtgaagtctctgggtggaagtgtgtgccaagagctactcccacagcagccccaggagaaggggctttgtgaccagaaagcttcatccacagccttgcagcggctcctgcaaaaggaggtgaaatccctgcctcaggccaagggaccaggtttgcaggagcccccctagtggtatggggctgagccctcctgagggccggttctaaggctcagactgggcactggggcctcagcctgctttcctgcagcagtcgcccaagcagacagccctggcaaatgcctgactcagtgaccagtgcctgtgagcatggggccaggaaagtctggtaataaatgtgactcagcatcacccac

SEQ ID NO: 152476 - DNA, 3656 bp, Homo sapiens
  Payload ID: 9988
  Gene Symbol: MC2R
  Gene Name: melanocortin 2 receptor (adrenocorticotropic hormone)
  Uniprot ID: Q01718
  ENST ID: ENST00000327606
  CDS Start-End: 182-1075
gctcattccttctcattcattttgcccagaaagttcctgcttcagagctgaaggtgattgggagattttaacttagatctccagcaagtgctacaaggaagaaaagatcctgaagaatcaatcaagttttccgtgaagtcaagtccaagtaacatccccgccttaaccacaagcaggagaaatgaagcacattatcaactcgtatgaaaacatcaacaacacagcaagaaataattccgactgtcctcgtgtggttttgccggaggagatatttttcacaatttccattgttggagttttggagaatctgatcgtcctgctggctgtgttcaagaataagaatctccaggcacccatgtactttttcatctgtagcttggccatatctgatatgctgggcagcctatataagatcttggaaaatatcctgatcatattgagaaacatgggctatctcaagccacgtggcagttttgaaaccacagccgatgacatcatcgactccctgtttgtcctctccctgcttggctccatcttcagcctgtctgtgattgctgcggaccgctacatcaccatcttccacgcactgcggtaccacagcatcgtgaccatgcgccgcactgtggtggtgcttacggtcatctggacgttctgcacggggactggcatcaccatggtgatcttctcccatcatgtgcccacagtgatcaccttcacgtcgctgttcccgctgatgctggtcttcatcctgtgcctctatgtgcacatgttcctgctggctcgatcccacaccaggaagatctccaccctccccagagccaacatgaaaggggccatcacactgaccatcctgctcggggtcttcatcttctgctgggccccctttgtgcttcatgtcctcttgatgacattctgcccaagtaacccctactgcgcctgctacatgtctctcttccaggtgaacggcatgttgatcatgtgcaatgccgtcattgaccccttcatatatgccttccggagcccagagctcagggacgcattcaaaaagatgatcttctgcagcaggtactggtagaatggctgatccctggttttagaatccatgggaataacgttgccaagtgccagaatagtgtaacattccaacaaatgccagtgctcctcactggccttccttccctaatggatgcaaggatgatcccaccagctagtgtttctaatagctaggttctatgtgaacagtcttattgtaggggcaacctcttaactttgtgactggacagataaaacgatgtagtaaaagaaggatagaatacaaagtattaggtaggtacaaaagtaattaaggtttttgccattactttcaatgaccaaaaattgcaattacttttgcaccaatctagtaaaacagcaataaaaattcaagggctttgggctaaggcaaagacttgctttcctgtggacatctaacaagccagttctgaggtggcctttccaggtggaggccattgcagccaatttccagaagttaagtacctggacatgcgactccaggcagaagatgtagggtctctgtaagccaataataaattggaaggaatgcattgctgcagctgaatttgtctgtctcccacagccatgtggaatctccaccctcctctttctccctgttagtctgatgtattgatgccacctcagtttcagaaagtaggctgagtataaactataaatgtcaaataacgagcttcgagtttccaatgataaatggaccttctctgttagtcttctttgctcactcagtatcccactggccttaaaaccctttcctgttacatttcctcatgctttatgagcatacatttcaaaggaagaaatgaaaatttaatccatttagttcccatgtgggaatacataaaggccagatgaaaattgtcactatttgaagaagctgtaaccaaactatgtgtgttacaatgtagaagtacaagaaaagagccccaacatgtattttaagaaataaagagagagagacagagacagacagagagagagagagagagagagagagagagtgtgtgtgtgtgtgtgtgtgtgtgtgtgtgtgtgtgtgtgtgtgtgtgtgtattttccccatgcttttggactatggggaaaaccaaaaccaaagcaagacatcaagcaatggtgctgttattatagccccaagtcaaagacctgagggaggcaaacaccacctcattctgcagatgaatgtgaaagcagacccagtcactgggaaatgtcatcctcccatcagccaagatgccagcaatggaagagtggcaaccccagtaggaataaaagaaacataatttgcaagttcattcatttttaatagctaaaaatcagcttaaaggagaagcacatcctgattgtaagtccccactaagttggagggtgacttgaatggggtgaaaggtgaaagggacagaggagagcagtggggcttcagaggccaccaggctcaggatctgcaggatggatggtatcttccagaacaggcaatgctttgccctcaggagaatttcccagagctgctgaggggagaagacagccacacacaggacagaccatttggtgatgggtttgatattagaagtggcagggacaggaacttcagaagcaaaggaggcaaggcagctggagtcaagtgaggacagtggcaggcgtgctttcacatggcctgtcccacagatggaggtgaaaggtgcaccttcttgtcctctgttctgtagaaatccttccctgtttgatccttcccctgccaaatgaactatgttactctaatactaacctgtattaattaatatatgagatatatataagttaatttttcatgaaatctaaagcacaaccctagaactaatttttaaaagtgttatttctaccattgaaaaagtaatgtataacatattttatgtgattaaagtgcgtattctcaataagaggtaacctttttttgatgctgcaatgctctgtgataccacagaggtaagcaatgccacttaacctgtatcataaatagtcccaaactgctcttcctataaaattctgcctttgtcaacagctttgctgtctcctaatcactctcaagctctctgctgtgcatgtgactgttgtcagaaggaaaatcaccaagaaacttcacctctcactgcctttgatttgttgcagttaatctaagaaacaaaatgaagatggctagtctaatggtggatgaaacaaaaatgaagtctgagtgctaattcagagaacttgcaattccagacattttcaattctaggtcttctgctatattccaatcagaacagaagcttcagggctcatagttactgagaaaactcacgtttttctacctctaacttcatatagaattccaaatgaaagcaccaccaaactgcacatatttgtgtgaggaagatcaacaagcttcagacttttcccatgaggacttaattcttttatcaaattacccaatttttaaactgctgtgtggatactgtgagtgttcagctttatcgatgacctagccttggaccagatagctgaaaatgttcaggatgtgtactcaagctgatagtaattctgagccctgtctaataaaaaaggaaggatgt

SEQ ID NO: 152477 - DNA, 576 bp, Homo sapiens
  Payload ID: 9988
  Gene Symbol: MC2R
  Gene Name: melanocortin 2 receptor (adrenocorticotropic hormone)
  ENST ID: ENST00000399821
  CDS Start-End: 207-576
atctgcctgtgtctttccatttctctaacttcacattaccagaaatgcacagttcatgtgggatgacatttattcaaggtgattgggagattttaacttagatctccagcaagtgctacaaggaagaaaagatcctgaagaatcaatcaagttttccgtgaagtcaagtccaagtaacatccccgccttaaccacaagcaggagaaatgaagcacattatcaactcgtatgaaaacatcaacaacacagcaagaaataattccgactgtcctcgtgtggttttgccggaggagatatttttcacaatttccattgttggagttttggagaatctgatcgtcctgctggctgtgttcaagaataagaatctccaggcacccatgtactttttcatctgtagcttggccatatctgatatgctgggcagcctatataagatcttggaaaatatcctgatcatattgagaaacatgggctatctcaagccacgtggcagttttgaaaccacagccgatgacatcatcgactccctgtttgtcctctccctgcttggctccatcttcagcctgtctgtga

SEQ ID NO: 152478 - DNA, 935 bp, Homo sapiens
  Payload ID: 9989
  Gene Symbol: MRAP
  Gene Name: melanocortin 2 receptor accessory protein
  Uniprot ID: Q8TCY5
  ENST ID: ENST00000303645
  CDS Start-End: 123-641
gacccacagacacacttggacgattcctgcagaaatcagtgaggcagtctcctcccaggggcttggcgcctggctcgaggcgaggctgccggcccggacgctgactgcccagtgccacagacatggccaacgggaccaacgcctctgccccatactacagctatgaatactacctggactatctggacctcattcccgtggacgagaagaagctgaaagcccacaaacattccatcgtgatcgcattctgggtgagcctggctgccttcgtggtgctgctcttcctcatcttgctctacatgtcctggtccgcctccccgcagatgaggaacagccccaagcaccaccaaacatgcccctggagtcacggcctcaacctccacctctgcatccagaagtgcctgccgtgccacagggaacccctggcaacctcacaggctcaggcgagctcagtggagccagggagcagaactggccctgaccagccgctacgacaggagagctcctccaccttgcccctcgggggtttccagacccaccccactctcctctgggaactgaccctcaatgggggtcccctcgtcaggagcaagcccagcgagcctccccctggagacaggacctctcaattgcagagctgatgtcagtaaatcgtggccatagctgagtgaactggtgaaatcaagccaacctggacacatacgttcctcgttcttcttagaggccatttgcatgtagcagaaagggcacctaggtcaagtgcaactagagcaggagcatcctatgcctttgacaaagattgcagtggcccctcgagtgcagaggtcatcccaggtgttgctgagtttattgagcacacctagcctgcttgcttactgcttatatttgctcagggaagagtaggaaaataaaatatatgcaaatcaagaggaaaa

SEQ ID NO: 152479 - DNA, 440 bp, Homo sapiens
  Payload ID: 9989
  Gene Symbol: MRAP
  Gene Name: melanocortin 2 receptor accessory protein
  Uniprot ID: Q8TCY5
  ENST ID: ENST00000339944
  CDS Start-End: 1-309
atggccaacgggaccaacgcctctgccccatactacagctatgaatactacctggactatctggacctcattcccgtggacgagaagaagctgaaagcccacaaacattccatcgtgatcgcattctgggtgagcctggctgccttcgtggtgctgctcttcctcatcttgctctacatgtcctggtccgcctccccgcagatgagctttaacacagatgaatctcttctgcattcagaagtgctgcctcaaactcgagctatttcctgtgatgagctccaagcccctagagaggaaggggcggcctgacgaggcactggatgggcctcatggcctagaagtccccacattccttgcaactctgatgctgggcacctacaggcccgagtttatcatttactgggcagttcaataaagtcctctcaacttttcttgtcaaa

SEQ ID NO: 152480 - DNA, 1000 bp, Homo sapiens
  Payload ID: 9989
  Gene Symbol: MRAP
  Gene Name: melanocortin 2 receptor accessory protein
  Uniprot ID: Q8TCY5
  ENST ID: ENST00000399784
  CDS Start-End: 188-706
ggataatggggaggctatgcaggtgtgtgggctggagggactttgcagatgtgattaaggattgtgagatggaaaaattatccttgattacctgcacggacccagtataatcacaactgtccttataagaagaggagctttggaagaagagagagttgactacggaagagggaaaagtgccacagacatggccaacgggaccaacgcctctgccccatactacagctatgaatactacctggactatctggacctcattcccgtggacgagaagaagctgaaagcccacaaacattccatcgtgatcgcattctgggtgagcctggctgccttcgtggtgctgctcttcctcatcttgctctacatgtcctggtccgcctccccgcagatgaggaacagccccaagcaccaccaaacatgcccctggagtcacggcctcaacctccacctctgcatccagaagtgcctgccgtgccacagggaacccctggcaacctcacaggctcaggcgagctcagtggagccagggagcagaactggccctgaccagccgctacgacaggagagctcctccaccttgcccctcgggggtttccagacccaccccactctcctctgggaactgaccctcaatgggggtcccctcgtcaggagcaagcccagcgagcctccccctggagacaggacctctcaattgcagagctgatgtcagtaaatcgtggccatagctgagtgaactggtgaaatcaagccaacctggacacatacgttcctcgttcttcttagaggccatttgcatgtagcagaaagggcacctaggtcaagtgcaactagagcaggagcatcctatgcctttgacaaagattgcagtggcccctcgagtgcagaggtcatcccaggtgttgctgagtttattgagcacacctagcctgcttgcttactgcttatatttgctcagggaagagtaggaaaataaaatatatgcaaatcaagaggaaaa

SEQ ID NO: 152481 - DNA, 2153 bp, Homo sapiens
  Payload ID: 9990
  Gene Symbol: MRAP2
  Gene Name: melanocortin 2 receptor accessory protein 2
  Uniprot ID: Q96G30
  ENST ID: ENST00000257776
  CDS Start-End: 136-753
ctcggatctaggagctactcgcccggccctgggcggtgggaggcggcggcggcggcggcgctcgcgcacctcggaggagccaggagccggaaccagggccgagcccgcgggccggggctagccagccggtcggagatgtccgcccagaggttaatttctaacagaacctcccagcaatcggcatctaattctgattacacctgggaatatgaatattatgagattggaccagtttcctttgaaggactgaaggctcataaatattccattgtgattggattttgggttggtcttgcagtcttcgtgatttttatgttttttgtgctgaccttgctgaccaagacaggagccccacaccaagacaatgcagagtcctcagagaagagattcagaatgaacagctttgtgtcagactttggaagacctctggagccagataaagtattttctcgccaaggcaacgaggagtccaggtctctctttcactgctacatcaatgaggtggaacgcttggacagagccaaagcttgtcaccagaccacagcccttgacagtgacgtccaactccaggaagccatcagaagcagtgggcagccagaggaggagctgaacaggctcatgaagtttgacatccccaactttgtgaacacagaccagaactactttggggaggatgatcttctgatttctgaaccacctattgttctggaaactaagccactttcccagacctcacacaaagacctggattgagaaacatgctctgtaaagggtcttcctgaagatgtggattctatctttatgtagcaagaaatctacatccaccaaaattgtgtgtgtttgggggagagagagacatagagatagagacagagaggcagagaagagacccctttagaagagagctgagctgattaagctgagtggttttttgttttgttttgtttttgctttttaatacatttggagctttgggagtattaaagtatttacaccaagcttgtccaacccgtggcatgtgtcccaggacagctttgaatgtggcccaatacaaattttaaactttattaaaacatgagttttgtttttttttttgctattttttttaaagctcgtcagctatcgttagtgttagtgtactttatgtgtggcccaagacaactcttcttccagtgtggcacagggaagctaaaagattggacacctctgatttatactagctcgttttgcttgttgaaaaatttggccaaatacctattgtcagcattcttgggtgaggattagcctaccatgttctaatctggccctgccactactatgctctacctttggtgagttgctttacctctctgggctgccccatttttaactgtaggttgacaggtctagagtgatccatcccacctctaatattttgtgaatttatgactttgccttcagatgaggctgagctatacataaaacagtataaactagggtactgcctcgtatctcttgtaggctctctcaaatctctgtaccttccacttaaccctaattgagccaagctttagtcaggggatctggttgtctaccagaatgtcaggagactcatcttacacagtcatggtggccaatgtttctggtgggttgtgctgaaacagctcttctgagaacttccaaccacccatgctctaacctggagacagccatcccctgcctcagaataagtaccaattcgtagtacatgtatggtactcttgtccccaagaaatgttaggaagcttgtcagctgaatgagaggaggtgccttctgggtatctctgtgttggtgtatctgtgccattggctacagaacaagaaaaatactatttgccatgctattaccttggcagatgtgtaggtgatagtcatctggctttgagctgagatggtcagtgggttgtaaattccccactagcagatattcagggtggcctgagttatgtaaacaagtgagcaacacagctttaatttcatggaggaatcaaagctgcacactggtattaaaacaacttgattttgcgcacacagttgcatgcatggcaagctgttaacctctgggtggcattttcattatgaatttgttcaccacctgtcttgcttaagctacaaaataaatgcatttgactgca

SEQ ID NO: 152482 - DNA, 1084 bp, Homo sapiens
  Payload ID: 9991
  Gene Symbol: MC3R
  Gene Name: melanocortin 3 receptor
  Uniprot ID: P41968
  ENST ID: ENST00000243911
  CDS Start-End: 113-1084
aatgagcatccaaaagacgtatctggagggagattttgtctttcctgtgagcagcagcagcttcctacggaccctgctggagccccagctcggatcagcccttctgacagcaatgaatgcttcgtgctgcctgccctctgttcagccaacactgcctaatggctcggagcacctccaagcccctttcttcagcaaccagagcagcagcgccttctgtgagcaggtcttcatcaagcccgaggttttcctgtctctgggcatcgtcagtctgctggaaaacatcctggttatcctggccgtggtcaggaacggcaacctgcactccccgatgtacttctttctctgcagcctggcggtggccgacatgctggtaagtgtgtccaatgccctggagaccatcatgatcgccatcgtccacagcgactacctgaccttcgaggaccagtttatccagcacatggacaacatcttcgactccatgatctgcatctccctggtggcctccatctgcaacctcctggccatcgccgtcgacaggtacgtcaccatcttttacgcgctccgctaccacagcatcatgaccgtgaggaaggccctcaccttgatcgtggccatctgggtctgctgcggcgtctgtggcgtggtgttcatcgtctactcggagagcaaaatggtcattgtgtgcctcatcaccatgttcttcgccatgatgctcctcatgggcaccctctacgtgcacatgttcctctttgcgcggctgcacgtcaagcgcatagcagcactgccacctgccgacggggtggccccacagcaacactcatgcatgaagggggcagtcaccatcaccattctcctgggcgtgttcatcttctgctgggcccccttcttcctccacctggtcctcatcatcacctgccccaccaacccctactgcatctgctacactgcccacttcaacacctacctggtcctcatcatgtgcaactccgtcatcgacccactcatctacgctttccggagcctggaattgcgcaacacctttagggagattctctgtggctgcaacggcatgaacttgggatag

SEQ ID NO: 152483 - DNA, 1666 bp, Homo sapiens
  Payload ID: 9992
  Gene Symbol: MC4R
  Gene Name: melanocortin 4 receptor
  Uniprot ID: P32245
  ENST ID: ENST00000299766
  CDS Start-End: 427-1425
aacactcaaagcaacgctcaggctggaaacagaagcttccgagaggcagccgatgtgagcatgtgcgcacagattcgtctcccaatggcatggcagcttcaaggaaaattattttgaacagacttgaatgcataagattaaagttaaagcagaagtgagaacaagaaagcaaagagcagactctttcaactgagaatgaatattttgaagcccaagattttaaagtgatgatgattagagtcgtacctaaaagagactaaaaactccatgtcaagctctggacttgtgacatttactcacagcaggcatggcaattttagcctcacaactttcagacagataaagacttggaggaaataactgagacgactccctgacccaggaggttaaatcaattcagggggacactggaattctcctgccagcatggtgaactccacccaccgtgggatgcacacttctctgcacctctggaaccgcagcagttacagactgcacagcaatgccagtgagtcccttggaaaaggctactctgatggagggtgctacgagcaactttttgtctctcctgaggtgtttgtgactctgggtgtcatcagcttgttggagaatatcttagtgattgtggcaatagccaagaacaagaatctgcattcacccatgtactttttcatctgcagcttggctgtggctgatatgctggtgagcgtttcaaatggatcagaaaccattgtcatcaccctattaaacagtacagatacggatgcacagagtttcacagtgaatattgataatgtcattgactcggtgatctgtagctccttgcttgcatccatttgcagcctgctttcaattgcagtggacaggtactttactatcttctatgctctccagtaccataacattatgacagttaagcgggttgggatcatcataagttgtatctgggcagcttgcacggtttcaggcattttgttcatcatttactcagatagtagtgctgtcatcatctgcctcatcaccatgttcttcaccatgctggctctcatggcttctctctatgtccacatgttcctgatggccaggcttcacattaagaggattgctgtcctccccggcactggtgccatccgccaaggtgccaatatgaagggagcgattaccttgaccatcctgattggcgtctttgttgtctgctgggccccattcttcctccacttaatattctacatctcttgtcctcagaatccatattgtgtgtgcttcatgtctcactttaacttgtatctcatactgatcatgtgtaattcaatcatcgatcctctgatttatgcactccggagtcaagaactgaggaaaaccttcaaagagatcatctgttgctatcccctgggaggcctttgtgacttgtctagcagatattaaatggggacagagcacgcaatataggaacatgcataagagactttttcactcttaccctacctgaatattgtacttctgcaacagctttctcttccgtgtagggtactggttgagaatatccattgtgtaaatttaagcctatgatttttaatgagaaaaaatgcccagtctctgtattatttccaatgtcatgctacttttttggccataaaatatgaatctatgttataggttgtaggca

SEQ ID NO: 152484 - DNA, 1200 bp, Homo sapiens
  Payload ID: 9993
  Gene Symbol: MC5R
  Gene Name: melanocortin 5 receptor
  Uniprot ID: P33032
  ENST ID: ENST00000324750
  CDS Start-End: 223-1200
catagggagaccctgtctcttaaaaaaaaaaaaaaaaaaggactgagtgagccgagcccagtcctctgatgcactgtgtcattcatcccctttcttaggctgtgttggttctaggctagctgctgtctttctttggtaggctgctaacctctttggattgtgaatttaaaacatgttttacagtaaatttgctgccaagacaagaggtgtatttctccagcaatgaattcctcatttcacctgcatttcttggatctcaacctgaatgccacagagggcaacctttcaggacccaatgtcaaaaacaagtcttcaccatgtgaagacatgggcattgctgtggaggtgtttctcactctgggtgtcatcagcctcttggagaacatcttggtcataggggccatagtgaagaacaaaaacctgcactcccccatgtacttcttcgtgtgcagcctggcagtggcggacatgctggtgagcatgtccagtgcctgggagaccatcaccatctacctactcaacaacaagcacctagtgatagcagacgcctttgtgcgccacattgacaatgtgtttgactccatgatctgcatttccgtggtggcatccatgtgcagcttactggccattgcagtggataggtacgtcaccatcttctacgccctgcgctaccaccacatcatgacggcgaggcgctcaggggccatcatcgccggcatctgggctttctgcacgggctgcggcattgtcttcatcctgtactcagaatccacctacgtcatcctgtgcctcatctccatgttcttcgctatgctgttcctcctggtgtctctgtacatacacatgttcctcctggcgcggactcacgtcaagcggatcgcggctctgcccggggccagctctgcgcggcagaggaccagcatgcagggcgcggtcaccgtcaccatgctgctgggcgtgtttaccgtgtgctgggccccgttcttccttcatctcactttaatgctttcttgccctcagaacctctactgctctcgcttcatgtctcacttcaatatgtacctcatactcatcatgtgtaattccgtgatggaccctctcatatatgccttccgcagccaagagatgcggaagacctttaaggagattatttgctgccgtggtttcaggatcgcctgcagctttcccagaagggattaa

SEQ ID NO: 152485 - DNA, 678 bp, Homo sapiens
  Payload ID: 9993
  Gene Symbol: MC5R
  Gene Name: melanocortin 5 receptor
  ENST ID: ENST00000589410
  CDS Start-End: 160-678
gcagccgcctagctgggggagaggcccgtccggggctggctctgagcgccgcacggccgtcggatcccggggacgccgggggcccgggctgagcgccgcggcccgcgaggaggagcaccgtaaatttgctgccaagacaagaggtgtatttctccagcaatgaattcctcatttcacctgcatttcttggatctcaacctgaatgccacagagggcaacctttcaggacccaatgtcaaaaacaagtcttcaccatgtgaagacatgggcattgctgtggaggtgtttctcactctgggtgtcatcagcctcttggagaacatcttggtcataggggccatagtgaagaacaaaaacctgcactcccccatgtacttcttcgtgtgcagcctggcagtggcggacatgctggtgagcatgtccagtgcctgggagaccatcaccatctacctactcaacaacaagcacctagtgatagcagacgcctttgtgcgccacattgacaatgtgtttgactccatgatctgcatttccgtggtggcatccatgtgcagcttactggccattgcagtggataggtacgtcaccatcttctacgccctgcgctaccaccacatcatgacggcgaggcgctcaggggccatcatcgccggcatctgggctttctgcacgggctgc

SEQ ID NO: 152486 - DNA, 1710 bp, Homo sapiens
  Payload ID: 9994
  Gene Symbol: MAGEA1
  Gene Name: melanoma antigen family A1
  Uniprot ID: P43355
  ENST ID: ENST00000356661
  CDS Start-End: 220-1149
gagagaagcgaggtttccattctgagggacggcgtagagttcggccgaaggaacctgacccaggctctgtgaggaggcaaggttttcaggggacaggccaacccagaggacaggattccctggaggccacagaggagcaccaaggagaagatctgcctgtgggtcttcattgcccagctcctgcccacactcctgcctgctgccctgacgagagtcatcatgtctcttgagcagaggagtctgcactgcaagcctgaggaagcccttgaggcccaacaagaggccctgggcctggtgtgtgtgcaggctgccacctcctcctcctctcctctggtcctgggcaccctggaggaggtgcccactgctgggtcaacagatcctccccagagtcctcagggagcctccgcctttcccactaccatcaacttcactcgacagaggcaacccagtgagggttccagcagccgtgaagaggaggggccaagcacctcttgtatcctggagtccttgttccgagcagtaatcactaagaaggtggctgatttggttggttttctgctcctcaaatatcgagccagggagccagtcacaaaggcagaaatgctggagagtgtcatcaaaaattacaagcactgttttcctgagatcttcggcaaagcctctgagtccttgcagctggtctttggcattgacgtgaaggaagcagaccccaccggccactcctatgtccttgtcacctgcctaggtctctcctatgatggcctgctgggtgataatcagatcatgcccaagacaggcttcctgataattgtcctggtcatgattgcaatggagggcggccatgctcctgaggaggaaatctgggaggagctgagtgtgatggaggtgtatgatgggagggagcacagtgcctatggggagcccaggaagctgctcacccaagatttggtgcaggaaaagtacctggagtaccggcaggtgccggacagtgatcccgcacgctatgagttcctgtggggtccaagggccctcgctgaaaccagctatgtgaaagtccttgagtatgtgatcaaggtcagtgcaagagttcgctttttcttcccatccctgcgtgaagcagctttgagagaggaggaagagggagtctgagcatgagttgcagccaaggccagtgggagggggactgggccagtgcaccttccagggccgcgtccagcagcttcccctgcctcgtgtgacatgaggcccattcttcactctgaagagagcggtcagtgttctcagtagtaggtttctgttctattgggtgacttggagatttatctttgttctcttttggaattgttcaaatgtttttttttaagggatggttgaatgaacttcagcatccaagtttatgaatgacagcagtcacacagttctgtgtatatagtttaagggtaagagtcttgtgttttattcagattgggaaatccattctattttgtgaattgggataataacagcagtggaataagtacttagaaatgtgaaaaatgagcagtaaaatagatgagataaagaactaaagaaattaagagatagtcaattcttgccttatacctcagtctattctgtaaaatttttaaagatatatgcatacctggatttccttggcttctttgagaatgtaagagaaattaaatctgaataaagaattcttcctgttca

SEQ ID NO: 152487 - DNA, 2741 bp, Homo sapiens
  Payload ID: 9995
  Gene Symbol: MAGEA10
  Gene Name: melanoma antigen family A10
  Uniprot ID: P43363
  ENST ID: ENST00000244096
  CDS Start-End: 434-1543
actaacttacgcctcggggatcagagagaagcgaggttctcgttctgagggacaggcttgagatcggctgaagagagcgggcccaggctctgtgaggaggcaagggaggtgagaaccttgctctcagagggtgactcaagtcaacacagggaacccctcttttctacagacacagtgggtcgcaggatctgacaagagtccaggagctccagggactgtgaggtgaggccttggtctaaggcagtgttttcaggtcacagagcagaaagggcccagacagtgccaggagtcaaggttctcaggggacagggagagcaagaggtcaagagctgtgggacaccacagagcagcactgaaggagaagacctgcctgtgggtccccatcgcccaagtcctgcccacactcccacctgctaccctgatcagagtcatcatgcctcgagctccaaagcgtcagcgctgcatgcctgaagaagatcttcaatcccaaagtgagacacagggcctcgagggtgcacaggctcccctggctgtggaggaggatgcttcatcatccacttccaccagctcctcttttccatcctcttttccctcctcctcctcttcctcctcctcctcctgctatcctctaataccaagcaccccagaggaggtttctgctgatgatgagacaccaaatcctccccagagtgctcagatagcctgctcctccccctcggtcgttgcttcccttccattagatcaatctgatgagggctccagcagccaaaaggaggagagtccaagcaccctacaggtcctgccagacagtgagtctttacccagaagtgagatagatgaaaaggtgactgatttggtgcagtttctgctcttcaagtatcaaatgaaggagccgatcacaaaggcagaaatactggagagtgtcataagaaattatgaagaccacttccctttgttgtttagtgaagcctccgagtgcatgctgctggtctttggcattgatgtaaaggaagtggatcccactggccactcctttgtccttgtcacctccctgggcctcacctatgatgggatgctgagtgatgtccagagcatgcccaagactggcattctcatacttatcctaagcatagtcttcatagagggctactgcacccctgaggaggtcatctgggaagcactgaatatgatggggctgtatgatgggatggagcacctcatttatggggagcccaggaagctgctcacccaagattgggtgcaggaaaactacctggagtaccggcaggtgcctggcagtgatcctgcacggtatgagtttctgtggggtccaagggctcatgctgaaattaggaagatgagtctcctgaaatttttggccaaggtaaatgggagtgatccaagatccttcccactgtggtatgaggaggctttgaaagatgaggaagagagagcccaggacagaattgccaccacagatgatactactgccatggccagtgcaagttctagcgctacaggtagcttctcctaccctgaataaagtaagacagattcttcactgtgttttaaaaggcaagtcaaataccacatgattttactcatatgtggaatctaaaaaaaaaaaaaaaaaaagttggtatcatggaagtagagagtagagcagtagttacattacaattaaataggaggaataagttctagtgttctattgcacagtaggatgactatagttaacattaagatattgtatattacaaaacagctagaaggaaggcttttcaatattgtcaccaaaaagaaatgataaatgcatgaggtgatggatacactacctgatttgatcattatactacatatacatgaatcagaacatcaaattgtacctcataaatatctacaattacatgtcagtttttgtttatgtttttgtttttttttaatttatgaaaacaaatgagaatggaaatcaatgatgtatgtggtggagggccaggctgaggctgaggaaaatacagtgcataacatctttgtcttactgttttctttggataacctggggacttcttttcttttcttcttggtattttattttctttttcttcttcttctttttttttttttaacaaagtctcactctattgctctggcaggagtgcagtggtgcagtctcggctcactgcaacttccgcctcctgggttcaagcgattctcctgcctcagtctcctgagtagctgggattacaagtgtgcaccaccatacccggctaattttgtattttttagtagagatggggtttcaccatgttggccaggctggtctcaaactcctgacctcaggtaatctgcccgcctcagcctcccaaagtgctgggataacaggtgtgagccactgcacccagcctcttcttggtattttaaaatgttgttacttttactagaatgtttatgagcttcagaatctaaggtcacacgttcgtttctgtttatccagtttaagaaacagttttgctattttgtaaaacaaattgggaacccttccatcatatttgtaatctgtaataaaataacatggaattggaatagtaattttcttggaaatatgaaaaaaatagtaaaatagagaaaataattttaagtgttagtatttttatttctttattatttttagtttatcatcctgcaaaattaaaagttatatccctggatcttgttaagtcgaaattaaactgtaataaatg

SEQ ID NO: 152488 - DNA, 2628 bp, Homo sapiens
  Payload ID: 9995
  Gene Symbol: MAGEA10
  Gene Name: melanoma antigen family A10
  Uniprot ID: P43363
  ENST ID: ENST00000370323
  CDS Start-End: 318-1427
gagaagcgaggttctcgttctgagggacaggcttgagatcggctgaagagagcgggcccaggctctgtgaggaggcaagggaggtgagaaccttgctctcagagggtgactcaagtcaacacagggaacccctcttttctacagacacagtgggtcgcaggatctgacaagagtccaggttctcaggggacagggagagcaagaggtcaagagctgtgggacaccacagagcagcactgaaggagaagacctgcctgtgggtccccatcgcccaagtcctgcccacactcccacctgctaccctgatcagagtcatcatgcctcgagctccaaagcgtcagcgctgcatgcctgaagaagatcttcaatcccaaagtgagacacagggcctcgagggtgcacaggctcccctggctgtggaggaggatgcttcatcatccacttccaccagctcctcttttccatcctcttttccctcctcctcctcttcctcctcctcctcctgctatcctctaataccaagcaccccagaggaggtttctgctgatgatgagacaccaaatcctccccagagtgctcagatagcctgctcctccccctcggtcgttgcttcccttccattagatcaatctgatgagggctccagcagccaaaaggaggagagtccaagcaccctacaggtcctgccagacagtgagtctttacccagaagtgagatagatgaaaaggtgactgatttggtgcagtttctgctcttcaagtatcaaatgaaggagccgatcacaaaggcagaaatactggagagtgtcataagaaattatgaagaccacttccctttgttgtttagtgaagcctccgagtgcatgctgctggtctttggcattgatgtaaaggaagtggatcccactggccactcctttgtccttgtcacctccctgggcctcacctatgatgggatgctgagtgatgtccagagcatgcccaagactggcattctcatacttatcctaagcatagtcttcatagagggctactgcacccctgaggaggtcatctgggaagcactgaatatgatggggctgtatgatgggatggagcacctcatttatggggagcccaggaagctgctcacccaagattgggtgcaggaaaactacctggagtaccggcaggtgcctggcagtgatcctgcacggtatgagtttctgtggggtccaagggctcatgctgaaattaggaagatgagtctcctgaaatttttggccaaggtaaatgggagtgatccaagatccttcccactgtggtatgaggaggctttgaaagatgaggaagagagagcccaggacagaattgccaccacagatgatactactgccatggccagtgcaagttctagcgctacaggtagcttctcctaccctgaataaagtaagacagattcttcactgtgttttaaaaggcaagtcaaataccacatgattttactcatatgtggaatctaaaaaaaaaaaaaaaaaaagttggtatcatggaagtagagagtagagcagtagttacattacaattaaataggaggaataagttctagtgttctattgcacagtaggatgactatagttaacattaagatattgtatattacaaaacagctagaaggaaggcttttcaatattgtcaccaaaaagaaatgataaatgcatgaggtgatggatacactacctgatttgatcattatactacatatacatgaatcagaacatcaaattgtacctcataaatatctacaattacatgtcagtttttgtttatgtttttgtttttttttaatttatgaaaacaaatgagaatggaaatcaatgatgtatgtggtggagggccaggctgaggctgaggaaaatacagtgcataacatctttgtcttactgttttctttggataacctggggacttcttttcttttcttcttggtattttattttctttttcttcttcttctttttttttttttaacaaagtctcactctattgctctggcaggagtgcagtggtgcagtctcggctcactgcaacttccgcctcctgggttcaagcgattctcctgcctcagtctcctgagtagctgggattacaagtgtgcaccaccatacccggctaattttgtattttttagtagagatggggtttcaccatgttggccaggctggtctcaaactcctgacctcaggtaatctgcccgcctcagcctcccaaagtgctgggataacaggtgtgagccactgcacccagcctcttcttggtattttaaaatgttgttacttttactagaatgtttatgagcttcagaatctaaggtcacacgttcgtttctgtttatccagtttaagaaacagttttgctattttgtaaaacaaattgggaacccttccatcatatttgtaatctgtaataaaataacatggaattggaatagtaattttcttggaaatatgaaaaaaatagtaaaatagagaaaataattttaagtgttagtatttttatttctttattatttttagtttatcatcctgcaaaattaaaagttatatccctggatcttgttaagtcgaaattaaactgtaataaatgaaa

SEQ ID NO: 152489 - DNA, 901 bp, Homo sapiens
  Payload ID: 9995
  Gene Symbol: MAGEA10
  Gene Name: melanoma antigen family A10
  ENST ID: ENST00000427322
  CDS Start-End: 417-901
ggatcagagagaagcgaggttctcgttctgagggacaggcttgagatcggctgaagagagcgggcccaggctctgtgaggaggcaagggaggtgagaaccttgctctcagagggtgactcaagtcaacacagggaacccctcttttctacagacacagtgggtcgcaggatctgacaagagtccaggagctccagggactgtgaggtgaggccttggtctaaggcagtgttttcaggtcacagagcagaaagggcccagacagtgccaggagtcaaggttctcaggggacagggagagcaagaggtcaagagctgtgggacaccacagagcagcactgaaggagaagacctgcctgtgggtccccatcgcccaagtcctgcccacactcccacctgctaccctgatcagagtcatcatgcctcgagctccaaagcgtcagcgctgcatgcctgaagaagatcttcaatcccaaagtgagacacagggcctcgagggtgcacaggctcccctggctgtggaggaggatgcttcatcatccacttccaccagctcctcttttccatcctcttttccctcctcctcctcttcctcctcctcctcctgctatcctctaataccaagcaccccagaggaggtttctgctgatgatgagacaccaaatcctccccagagtgctcagatagcctgctcctccccctcggtcgttgcttcccttccattagatcaatctgatgagggctccagcagccaaaaggaggagagtccaagcaccctacaggtcctgccagacagtgagtctttacccagaagtgagatagatgaaaaggtgactgatttggtgcagtttctgctcttcaagtatcaaatgaaggagccgatcacaaaggcagaaatactgga

SEQ ID NO: 152490 - DNA, 781 bp, Homo sapiens
  Payload ID: 9995
  Gene Symbol: MAGEA10
  Gene Name: melanoma antigen family A10
  ENST ID: ENST00000444834
  CDS Start-End: 229-781
tgaagagagcgggcccaggctctgtgaggaggcaagacacagtgggtcgcaggatctgacaagagtccaggagctccagggactgtgaggttctcaggggacagggagagcaagaggtcaagagctgtgggacaccacagagcagcactgaaggagaagacctgcctgtgggtccccatcgcccaagtcctgcccacactcccacctgctaccctgatcagagtcatcatgcctcgagctccaaagcgtcagcgctgcatgcctgaagaagatcttcaatcccaaagtgagacacagggcctcgagggtgcacaggctcccctggctgtggaggaggatgcttcatcatccacttccaccagctcctcttttccatcctcttttccctcctcctcctcttcctcctcctcctcctgctatcctctaataccaagcaccccagaggaggtttctgctgatgatgagacaccaaatcctccccagagtgctcagatagcctgctcctccccctcggtcgttgcttcccttccattagatcaatctgatgagggctccagcagccaaaaggaggagagtccaagcaccctacaggtcctgccagacagtgagtctttacccagaagtgagatagatgaaaaggtgactgatttggtgcagtttctgctcttcaagtatcaaatgaaggagccgatcacaaaggcagaaatactggagagtgtcataagaaattatgaagaccacttccctttgttgtttagtgaagcctccgagtgcatgctgc

SEQ ID NO: 152491 - DNA, 713 bp, Homo sapiens
  Payload ID: 9995
  Gene Symbol: MAGEA10
  Gene Name: melanoma antigen family A10
  ENST ID: ENST00000579960
  CDS Start-End: 539-713
gacaggcttgagatcggctgaagagagcgggcccaggctctgtgaggaggcaagggaggtgagaaccttgctctcagagggtgactcaagtcaacacagggaacccctcttttctacagacacagtgggtcgcaggatctgacaagagtccaggagctccagggactgtgaggtgaggccttggtctaaggcagtgttttcaggtcacagagcagaaagggcccagacagtgccaggagtcaaggtgaggtgcatgccctgaatgtgtaccaagggccccacctgctccaggacaaagtggaccccactgcatcagctccacctaccctactgtcagtcctggagccttggcctctgccggctgcatcctgaggagccatctctcacttccttcttcaggttctcaggggacagggagagcaagaggtcaagagctgtgggacaccacagagcagcactgaaggagaagacctgcctgtgggtccccatcgcccaagtcctgcccacactcccacctgctaccctgatcagagtcatcatgcctcgagctccaaagcgtcagcgctgcatgcctgaagaagatcttcaatcccaaagtgagacacagggcctcgagggtgcacaggctcccctggctgtggaggaggatgcttcatcatccacttccaccagctcctcttttccatcctcttttccctcctcctcctcttcct

SEQ ID NO: 152492 - DNA, 536 bp, Homo sapiens
  Payload ID: 9995
  Gene Symbol: MAGEA10
  Gene Name: melanoma antigen family A10
  ENST ID: ENST00000583480
  CDS Start-End: 324-536
ctcgttctgagggacaggcttgagatcggctgaagagagcgggcccaggctctgtgaggaggcaagggaggtgagaaccttgctctcagagggtgactcaagtcaacacagggaacccctcttttctacagacacagtgggtcgcaggatctgacaagagtccaggagctccagggactgtgaggttctcaggggacagggagagcaagaggtcaagagctgtgggacaccacagagcagcactgaaggagaagacctgcctgtgggtccccatcgcccaagtcctgcccacactcccacctgctaccctgatcagagtcatcatgcctcgagctccaaagcgtcagcgctgcatgcctgaagaagatcttcaatcccaaagtgagacacagggcctcgagggtgcacaggctcccctggctgtggaggaggatgcttcatcatccacttccaccagctcctcttttccatcctcttttccctcctcctcctcttcctcctcctcctcctgctatcctctaataccaagcacccca

SEQ ID NO: 152493 - DNA, 1845 bp, Homo sapiens
  Payload ID: 9996
  Gene Symbol: MAGEA11
  Gene Name: melanoma antigen family A11
  ENST ID: ENST00000333104
  CDS Start-End: 153-1355
tgcactctcaccagggcagggagctgtcttgacccccagtggaggctgacaatttttttcctgtgtacactggacccctttcatagaggtgggtgctatgcaagtggagctggtgactgatggctgaccattgatacaggctaggaataccaatgagcaaggtgagcactatgttctcagaggacgacttccagtcaacagaaagagccccatatggtccacaactacagtggtcccaggatctgccaagagtccaggtttttagagaacaggccaacctggaggacaggagtcccaggagaacccagaggatcactggaggagaacaagtgctgtggggccccatcacccagatatttcccacagttcggcctgctgacctaaccagagtcatcatgcctcttgagcaaagaagtcagcactgcaagcctgaggaaggccttcaggcccaagaagaagacctgggcctggtgggtgcacaggctctccaagctgaggagcaggaggctgccttcttctcctctactctgaatgtgggcactctagaggagttgcctgctgctgagtcaccaagtcctccccagagtcctcaggaagagtccttctctcccactgccatggatgccatctttgggagcctatctgatgagggctctggcagccaagaaaaggaggggccaagtacctcgcctgacctgatagaccctgagtccttttcccaagatatactacatgacaagataattgatttggttcatttattgctccgcaagtatcgagtcaaggggctgatcacaaaggcagaaatgctggggagtgtcatcaaaaattatgaggactactttcctgagatatttagggaagcctctgtatgcatgcaactgctctttggcattgatgtgaaggaagtggaccccactagccactcctatgtccttgtcacctccctcaacctctcttatgatggcatacagtgtaatgagcagagcatgcccaagtctggcctcctgataatagtcctgggtgtaatcttcatggaggggaactgcatccctgaagaggttatgtgggaagtcctgagcattatgggggtgtatgctggaagggagcacttcctctttggggagcccaagaggctccttacccaaaattgggtgcaggaaaagtacctggtgtaccggcaggtgcccggcactgatcctgcatgctatgagttcctgtggggtccaagggcccacgctgagaccagcaagatgaaagttcttgagtacatagccaatgccaatgggagggatcccacttcttacccatccctgtatgaagatgctttgagagaggagggagagggagtctgagcatgagatgcaaccagggccagcgggcagggaaatgggccaatgcatgcttcagggccacacccagcagtttccctgtcctgtgtgaaatcaggcccattcttccctctgtgtttgatgagagaagtcagtgttctcagtagtagaaggcacagtgaatggaagggaacacattgtatactgcctttaggtttctcttccatcgggtgacttggagatttctttttgtttccctttggtaattttcaaatattgttcctgtaataaaagttttagttagcttcaacatctaagtgtatggatgatactgaccacacatgttgttttgcttatccatttcaagtgcaagtgtttgccattttgtaaaacattttgggaaatcttccatcttgctgtgatttgcaataggtattttcttggagaatgtaagaacttaacaataaagctgaactggtgttgtgaaacagagaaataaaaggagaaggtcatt

SEQ ID NO: 152494 - DNA, 1864 bp, Homo sapiens
  Payload ID: 9996
  Gene Symbol: MAGEA11
  Gene Name: melanoma antigen family A11
  Uniprot ID: P43364
  ENST ID: ENST00000355220
  CDS Start-End: 103-1392
gatctgagagaagcgaaagcgtctttctgaggggtgtcttgagagtggcagagggcagcgggtccaggctccatgaggaggcaagccttgggaatctgagggatggagactcagttccgcagagggggtctggggtgcagccctgccagcatcaagaggaagaagaagagggaggactcaggagactttggactccaggtgagcactatgttctcagaggacgacttccagtcaacagaaagagccccatatggtccacaactacagtggtcccaggatctgccaagagtccaggtttttagagaacaggccaacctggaggacaggagtcccaggagaacccagaggatcactggaggagaacaagtgctgtggggccccatcacccagatatttcccacagttcggcctgctgacctaaccagagtcatcatgcctcttgagcaaagaagtcagcactgcaagcctgaggaaggccttcaggcccaagaagaagacctgggcctggtgggtgcacaggctctccaagctgaggagcaggaggctgccttcttctcctctactctgaatgtgggcactctagaggagttgcctgctgctgagtcaccaagtcctccccagagtcctcaggaagagtccttctctcccactgccatggatgccatctttgggagcctatctgatgagggctctggcagccaagaaaaggaggggccaagtacctcgcctgacctgatagaccctgagtccttttcccaagatatactacatgacaagataattgatttggttcatttattgctccgcaagtatcgagtcaaggggctgatcacaaaggcagaaatgctggggagtgtcatcaaaaattatgaggactactttcctgagatatttagggaagcctctgtatgcatgcaactgctctttggcattgatgtgaaggaagtggaccccactagccactcctatgtccttgtcacctccctcaacctctcttatgatggcatacagtgtaatgagcagagcatgcccaagtctggcctcctgataatagtcctgggtgtaatcttcatggaggggaactgcatccctgaagaggttatgtgggaagtcctgagcattatgggggtgtatgctggaagggagcacttcctctttggggagcccaagaggctccttacccaaaattgggtgcaggaaaagtacctggtgtaccggcaggtgcccggcactgatcctgcatgctatgagttcctgtggggtccaagggcccacgctgagaccagcaagatgaaagttcttgagtacatagccaatgccaatgggagggatcccacttcttacccatccctgtatgaagatgctttgagagaggagggagagggagtctgagcatgagatgcaaccagggccagcgggcagggaaatgggccaatgcatgcttcagggccacacccagcagtttccctgtcctgtgtgaaatcaggcccattcttccctctgtgtttgatgagagaagtcagtgttctcagtagtagaaggcacagtgaatggaagggaacacattgtatactgcctttaggtttctcttccatcgggtgacttggagatttctttttgtttccctttggtaattttcaaatattgttcctgtaataaaagttttagttagcttcaacatctaagtgtatggatgatactgaccacacatgttgttttgcttatccatttcaagtgcaagtgtttgccattttgtaaaacattttgggaaatcttccatcttgctgtgatttgcaataggtattttcttggagaatgtaagaacttaacaataaagctgaactggtgttgtgaaacagagaaa

SEQ ID NO: 152495 - DNA, 1085 bp, Homo sapiens
  Payload ID: 9996
  Gene Symbol: MAGEA11
  Gene Name: melanoma antigen family A11
  ENST ID: ENST00000412632
  CDS Start-End: 200-1085
ctccagggtatgggtcaggacctcttctgaaatgggagtttaagacctacaatcagacaagggcagggagctgtcttgacccccagtggaggctgacaatttttttcctgtgtacactggacccctttcatagaggtgggtgctatgcaagtggagctggtgactgatggctgaccattgatacaggctaggaataccaatgagcaaggtgagcactatgttctcagaggacgacttccagtcaacagaaagagccccatatggtccacaactacagtggtcccaggatctgccaagagtccaggtttttagagaacaggccaacctggaggacaggagtcccaggagaacccagaggatcactggaggagaacaagtgctgtggggccccatcacccagatatttcccacagttcggcctgctgacctaaccagagtcatcatgcctcttgagcaaagaagtcagcactgcaagcctgaggaaggccttcaggcccaagaagaagacctgggcctggtgggtgcacaggctctccaagctgaggagcaggaggctgccttcttctcctctactctgaatgtgggcactctagaggagttgcctgctgctgagtcaccaagtcctccccagagtcctcaggaagagtccttctctcccactgccatggatgccatctttgggagcctatctgatgagggctctggcagccaagaaaaggaggggccaagtacctcgcctgacctgatagaccctgagtccttttcccaagatatactacatgacaagataattgatttggttcatttattgctccgcaagtatcgagtcaaggggctgatcacaaaggcagaaatgctggggagtgtcatcaaaaattatgaggactactttcctgagatatttagggaagcctctgtatgcatgcaactgctctttggcattgatgtgaaggaagtggaccccactagccactcctatgtccttgtcacctccctcaacctctcttatgatggcatacagtgtaatgagcagagcatgcccaagtctggcctcctgataatagtcctgggtgtaatcttcatgg

SEQ ID NO: 152496 - DNA, 1664 bp, Homo sapiens
  Payload ID: 9997
  Gene Symbol: MAGEA12
  Gene Name: melanoma antigen family A12
  Uniprot ID: P43365
  ENST ID: ENST00000357916
  CDS Start-End: 157-1101
agagaacagcgagattctcgccctgagcaacggcctgacgtcggtggagggaagcaggcgcaggctccgtgaggaggcaaggttctgaggagacaggccccggagcagcactagctcctgcccacactcctacctgctgccctgaccagagtcatcatgccacttgagcagaggagtcagcactgcaagcctgaggaaggccttgaggcccaaggagaggccctgggcttggtgggtgcgcaggctcctgctactgaggagcaggagactgcctcctcctcctctactctagtggaagtcaccctgcgggaggtgcctgctgccgagtcaccaagtcctccccacagtcctcagggagcctccaccctccccactaccatcaactatactctctggagtcaatccgatgagggctccagcaacgaagaacaggaagggccaagcacctttcctgacctggagacgagcttccaagtagcactcagtaggaagatggctgagttggttcattttctgctcctcaagtatcgagccagggagccattcacaaaggcagaaatgctggggagtgtcatcagaaatttccaggacttctttcctgtgatcttcagcaaagcctccgagtacttgcagctggtctttggcatcgaggtggtggaagtggtccgcatcggccacttgtacatccttgtcacctgcctgggcctctcctacgatggcctgctgggcgacaatcagatcgtgcccaagacaggcctcctgataatcgtcctggccataatcgcaaaagagggcgactgtgcccctgaggagaaaatctgggaggagctgagtgtgttggaggcatctgatgggagggaggacagtgtctttgcgcatcccaggaagctgctcacccaagatttggtgcaggaaaactacctggagtaccggcaggtccccggcagtgatcctgcatgctacgagttcctgtggggtccaagggccctcgttgaaaccagctatgtgaaagtcctgcaccatttgctaaagatcagtggaggacctcacatttcctacccacccctgcatgaatgggcttttagagagggggaagagtgagtctgagcacgagttgcagccagggccagtgggagggggtctgggccagtgcaccttccaaggccccatccattagtttccactgcctcgtgtgacatgaggcccattcttcactctttgaagagagcagtcagtattgttagtagtgagtttctgttctattggatgactttgagatttatctttgtttcctgttggaattgttcaaatgttccttttaacggatggttgaatgaacttcagcatccaagtttatgaatgacagtagtcacacatagtgctgtttatatagtttaggagtaagagtgttgttttttattcagattgggaaatccattccattttgtgaattgtgacaaataacagcagtggaaaaagtatgtgcttagaattgtgaaagaattagcagtaaaatacatgagataaagacctcaagaagttaaaagatacttaattcttgccttatacctcactctattctgtaaatttgaaaaaaaagcatggatacctggatatccttggcttctttgagaatttaagagaaattaaatctgaataaataa

SEQ ID NO: 152497 - DNA, 1761 bp, Homo sapiens
  Payload ID: 9997
  Gene Symbol: MAGEA12
  Gene Name: melanoma antigen family A12
  Uniprot ID: P43365
  ENST ID: ENST00000393869
  CDS Start-End: 263-1207
agagaacagcgagattctcgccctgagcaacggcctgacgtcggtggagggaagcaggcgcaggctccgtgaggaggcaagatctcagggagttgaggaccttttcttcagagggtgactcaggtcaacacaggggcccccatgtagtcgacagacacagtggtcctaagatctaccaagcatccaggttctgaggagacaggccccggagcagcactagctcctgcccacactcctacctgctgccctgaccagagtcatcatgccacttgagcagaggagtcagcactgcaagcctgaggaaggccttgaggcccaaggagaggccctgggcttggtgggtgcgcaggctcctgctactgaggagcaggagactgcctcctcctcctctactctagtggaagtcaccctgcgggaggtgcctgctgccgagtcaccaagtcctccccacagtcctcagggagcctccaccctccccactaccatcaactatactctctggagtcaatccgatgagggctccagcaacgaagaacaggaagggccaagcacctttcctgacctggagacgagcttccaagtagcactcagtaggaagatggctgagttggttcattttctgctcctcaagtatcgagccagggagccattcacaaaggcagaaatgctggggagtgtcatcagaaatttccaggacttctttcctgtgatcttcagcaaagcctccgagtacttgcagctggtctttggcatcgaggtggtggaagtggtccgcatcggccacttgtacatccttgtcacctgcctgggcctctcctacgatggcctgctgggcgacaatcagatcgtgcccaagacaggcctcctgataatcgtcctggccataatcgcaaaagagggcgactgtgcccctgaggagaaaatctgggaggagctgagtgtgttggaggcatctgatgggagggaggacagtgtctttgcgcatcccaggaagctgctcacccaagatttggtgcaggaaaactacctggagtaccggcaggtccccggcagtgatcctgcatgctacgagttcctgtggggtccaagggccctcgttgaaaccagctatgtgaaagtcctgcaccatttgctaaagatcagtggaggacctcacatttcctacccacccctgcatgaatgggcttttagagagggggaagagtgagtctgagcacgagttgcagccagggccagtgggagggggtctgggccagtgcaccttccaaggccccatccattagtttccactgcctcgtgtgacatgaggcccattcttcactctttgaagagagcagtcagtattgttagtagtgagtttctgttctattggatgactttgagatttatctttgtttcctgttggaattgttcaaatgttccttttaacggatggttgaatgaacttcagcatccaagtttatgaatgacagtagtcacacatagtgctgtttatatagtttaggagtaagagtgttgttttttattcagattgggaaatccattccattttgtgaattgtgacaaataacagcagtggaaaaagtatgtgcttagaattgtgaaagaattagcagtaaaatacatgagataaagacctcaagaagttaaaagatacttaattcttgccttatacctcactctattctgtaaatttgaaaaaaaagcatggatacctggatatccttggcttctttgagaatttaagagaaattaaatctg

SEQ ID NO: 152498 - DNA, 1853 bp, Homo sapiens
  Payload ID: 9997
  Gene Symbol: MAGEA12
  Gene Name: melanoma antigen family A12
  Uniprot ID: P43365
  ENST ID: ENST00000393900
  CDS Start-End: 355-1299
aagatgccgagggaggactgaggcgggcctcaccccagacagagggcccccaataatccagcgctgcctctgctgccgggcctggaccaccctgcaggggaagacttctcaggctgagtcgccaccacctcaccccgccaccccccgccgctttaaccgcagggaactctggtatctcagggagttgaggaccttttcttcagagggtgactcaggtcaacacaggggcccccatgtagtcgacagacacagtggtcctaagatctaccaagcatccaggttctgaggagacaggccccggagcagcactagctcctgcccacactcctacctgctgccctgaccagagtcatcatgccacttgagcagaggagtcagcactgcaagcctgaggaaggccttgaggcccaaggagaggccctgggcttggtgggtgcgcaggctcctgctactgaggagcaggagactgcctcctcctcctctactctagtggaagtcaccctgcgggaggtgcctgctgccgagtcaccaagtcctccccacagtcctcagggagcctccaccctccccactaccatcaactatactctctggagtcaatccgatgagggctccagcaacgaagaacaggaagggccaagcacctttcctgacctggagacgagcttccaagtagcactcagtaggaagatggctgagttggttcattttctgctcctcaagtatcgagccagggagccattcacaaaggcagaaatgctggggagtgtcatcagaaatttccaggacttctttcctgtgatcttcagcaaagcctccgagtacttgcagctggtctttggcatcgaggtggtggaagtggtccgcatcggccacttgtacatccttgtcacctgcctgggcctctcctacgatggcctgctgggcgacaatcagatcgtgcccaagacaggcctcctgataatcgtcctggccataatcgcaaaagagggcgactgtgcccctgaggagaaaatctgggaggagctgagtgtgttggaggcatctgatgggagggaggacagtgtctttgcgcatcccaggaagctgctcacccaagatttggtgcaggaaaactacctggagtaccggcaggtccccggcagtgatcctgcatgctacgagttcctgtggggtccaagggccctcgttgaaaccagctatgtgaaagtcctgcaccatttgctaaagatcagtggaggacctcacatttcctacccacccctgcatgaatgggcttttagagagggggaagagtgagtctgagcacgagttgcagccagggccagtgggagggggtctgggccagtgcaccttccaaggccccatccattagtttccactgcctcgtgtgacatgaggcccattcttcactctttgaagagagcagtcagtattgttagtagtgagtttctgttctattggatgactttgagatttatctttgtttcctgttggaattgttcaaatgttccttttaacggatggttgaatgaacttcagcatccaagtttatgaatgacagtagtcacacatagtgctgtttatatagtttaggagtaagagtgttgttttttattcagattgggaaatccattccattttgtgaattgtgacaaataacagcagtggaaaaagtatgtgcttagaattgtgaaagaattagcagtaaaatacatgagataaagacctcaagaagttaaaagatacttaattcttgccttatacctcactctattctgtaaatttgaaaaaaaagcatggatacctggatatccttggcttctttgagaatttaagagaaattaaatctg

SEQ ID NO: 152499 - DNA, 1662 bp, Homo sapiens
  Payload ID: 9998
  Gene Symbol: MAGEA2
  Gene Name: melanoma antigen family A2
  Uniprot ID: P43356
  ENST ID: ENST00000598543
  CDS Start-End: 163-1107
ttgcgcattggaggtcagaggacagcgagattctcgccctgagcaacggcctgacgtcggcggagggaagcaggcgcaggctccgtgaggaggcaaggcctgtgggtcttcattgcccagctcctgcccgcactcctgcctgctgccctgaccagagtcatcatgcctcttgagcagaggagtcagcactgcaagcctgaagaaggccttgaggcccgaggagaggccctgggcctggtgggtgcgcaggctcctgctactgaggagcagcagaccgcttcttcctcttctactctagtggaagttaccctgggggaggtgcctgctgccgactcaccgagtcctccccacagtcctcagggagcctccagcttctcgactaccatcaactacactctttggagacaatccgatgagggctccagcaaccaagaagaggaggggccaagaatgtttcccgacctggagtccgagttccaagcagcaatcagtaggaagatggttgagttggttcattttctgctcctcaagtatcgagccagggagccggtcacaaaggcagaaatgctggagagtgtcctcagaaattgccaggacttctttcccgtgatcttcagcaaagcctccgagtacttgcagctggtctttggcatcgaggtggtggaagtggtccccatcagccacttgtacatccttgtcacctgcctgggcctctcctacgatggcctgctgggcgacaatcaggtcatgcccaagacaggcctcctgataatcgtcctggccataatcgcaatagagggcgactgtgcccctgaggagaaaatctgggaggagctgagtatgttggaggtgtttgaggggagggaggacagtgtcttcgcacatcccaggaagctgctcatgcaagatctggtgcaggaaaactacctggagtaccggcaggtgcccggcagtgatcctgcatgctacgagttcctgtggggtccaagggccctcattgaaaccagctatgtgaaagtcctgcaccatacactaaagatcggtggagaacctcacatttcctacccacccctgcatgaacgggctttgagagagggagaagagtgagtctcagcacatgttgcagccagggccagtgggagggggtctgggccagtgcaccttccagggccccatccattagcttccactgcctcgtgtgatatgaggcccattcctgcctctttgaagagagcagtcagcattcttagcagtgagtttctgttctgttggatgactttgagatttatctttgtttcctgttggaattgttcaaatgttccttttaacaaatggttggatgaacttcagcatccaagtttatgaatgacagtagtcacacatagtgctgtttatatagtttaggggtaagagtcctgttttttattcagattgggaaatccattccattttgtgagttgtcacataataacagcagtggaatatgtatttgcctatattgtgaacgaattagcagtaaaatacatgatacaaggaactcaaaagatagttaattcttgccttatacctcagtctattatgtaaaattaaaaatatgtgtatgtttttgcttctttgagaatgcaaaagaaattaaatctgaataaataattcttcctgttc

SEQ ID NO: 152500 - DNA, 1830 bp, Homo sapiens
  Payload ID: 9998
  Gene Symbol: MAGEA2
  Gene Name: melanoma antigen family A2
  Uniprot ID: P43356
  ENST ID: ENST00000595583
  CDS Start-End: 343-1287
attggaggtcagaggacagcgagattctcgccctgagcaacggcctgacgtcggcggagggaagcaggcgcaggctccgtgaggaggcaagatctcagggagttgatgaccttgttttcagaaggtgactcaggtcaacacaggggcccccatctggtcgacagatgcagtggttctaggatctgccaagcatccaggtggagagcctgaggttctgagggggacaggctgacaagtaggacccgaggcactggaggagcattgaaggagaagatctgcctgtgggtcttcattgcccagctcctgcccgcactcctgcctgctgccctgaccagagtcatcatgcctcttgagcagaggagtcagcactgcaagcctgaagaaggccttgaggcccgaggagaggccctgggcctggtgggtgcgcaggctcctgctactgaggagcagcagaccgcttcttcctcttctactctagtggaagttaccctgggggaggtgcctgctgccgactcaccgagtcctccccacagtcctcagggagcctccagcttctcgactaccatcaactacactctttggagacaatccgatgagggctccagcaaccaagaagaggaggggccaagaatgtttcccgacctggagtccgagttccaagcagcaatcagtaggaagatggttgagttggttcattttctgctcctcaagtatcgagccagggagccggtcacaaaggcagaaatgctggagagtgtcctcagaaattgccaggacttctttcccgtgatcttcagcaaagcctccgagtacttgcagctggtctttggcatcgaggtggtggaagtggtccccatcagccacttgtacatccttgtcacctgcctgggcctctcctacgatggcctgctgggcgacaatcaggtcatgcccaagacaggcctcctgataatcgtcctggccataatcgcaatagagggcgactgtgcccctgaggagaaaatctgggaggagctgagtatgttggaggtgtttgaggggagggaggacagtgtcttcgcacatcccaggaagctgctcatgcaagatctggtgcaggaaaactacctggagtaccggcaggtgcccggcagtgatcctgcatgctacgagttcctgtggggtccaagggccctcattgaaaccagctatgtgaaagtcctgcaccatacactaaagatcggtggagaacctcacatttcctacccacccctgcatgaacgggctttgagagagggagaagagtgagtctcagcacatgttgcagccagggccagtgggagggggtctgggccagtgcaccttccagggccccatccattagcttccactgcctcgtgtgatatgaggcccattcctgcctctttgaagagagcagtcagcattcttagcagtgagtttctgttctgttggatgactttgagatttatctttgtttcctgttggaattgttcaaatgttccttttaacaaatggttggatgaacttcagcatccaagtttatgaatgacagtagtcacacatagtgctgtttatatagtttaggggtaagagtcctgttttttattcagattgggaaatccattccattttgtgagttgtcacataataacagcagtggaatatgtatttgcctatattgtgaacgaattagcagtaaaatacatgatacaaggaactcaaaagatagttaattcttgccttatacctcagtctattatgtaaaattaaaaatatgtgtatgtttttgcttctttgagaatgcaaaagaaattaaatctgaataaataa

SEQ ID NO: 152501 - DNA, 1728 bp, Homo sapiens
  Payload ID: 9998
  Gene Symbol: MAGEA2
  Gene Name: melanoma antigen family A2
  Uniprot ID: P43356
  ENST ID: ENST00000611674
  CDS Start-End: 229-1173
ttgcgcattggaggtcagaggacagcgagattctcgccctgagcaacggcctgacgtcggcggagggaagcaggcgcaggctccgtgaggaggcaaggttctgagggggacaggctgacaagtaggacccgaggcactggaggagcattgaaggagaagatctgcctgtgggtcttcattgcccagctcctgcccgcactcctgcctgctgccctgaccagagtcatcatgcctcttgagcagaggagtcagcactgcaagcctgaagaaggccttgaggcccgaggagaggccctgggcctggtgggtgcgcaggctcctgctactgaggagcagcagaccgcttcttcctcttctactctagtggaagttaccctgggggaggtgcctgctgccgactcaccgagtcctccccacagtcctcagggagcctccagcttctcgactaccatcaactacactctttggagacaatccgatgagggctccagcaaccaagaagaggaggggccaagaatgtttcccgacctggagtccgagttccaagcagcaatcagtaggaagatggttgagttggttcattttctgctcctcaagtatcgagccagggagccggtcacaaaggcagaaatgctggagagtgtcctcagaaattgccaggacttctttcccgtgatcttcagcaaagcctccgagtacttgcagctggtctttggcatcgaggtggtggaagtggtccccatcagccacttgtacatccttgtcacctgcctgggcctctcctacgatggcctgctgggcgacaatcaggtcatgcccaagacaggcctcctgataatcgtcctggccataatcgcaatagagggcgactgtgcccctgaggagaaaatctgggaggagctgagtatgttggaggtgtttgaggggagggaggacagtgtcttcgcacatcccaggaagctgctcatgcaagatctggtgcaggaaaactacctggagtaccggcaggtgcccggcagtgatcctgcatgctacgagttcctgtggggtccaagggccctcattgaaaccagctatgtgaaagtcctgcaccatacactaaagatcggtggagaacctcacatttcctacccacccctgcatgaacgggctttgagagagggagaagagtgagtctcagcacatgttgcagccagggccagtgggagggggtctgggccagtgcaccttccagggccccatccattagcttccactgcctcgtgtgatatgaggcccattcctgcctctttgaagagagcagtcagcattcttagcagtgagtttctgttctgttggatgactttgagatttatctttgtttcctgttggaattgttcaaatgttccttttaacaaatggttggatgaacttcagcatccaagtttatgaatgacagtagtcacacatagtgctgtttatatagtttaggggtaagagtcctgttttttattcagattgggaaatccattccattttgtgagttgtcacataataacagcagtggaatatgtatttgcctatattgtgaacgaattagcagtaaaatacatgatacaaggaactcaaaagatagttaattcttgccttatacctcagtctattatgtaaaattaaaaatatgtgtatgtttttgcttctttgagaatgcaaaagaaattaaatctgaataaataattcttcctgttc

SEQ ID NO: 152502 - DNA, 2024 bp, Homo sapiens
  Payload ID: 9998
  Gene Symbol: MAGEA2
  Gene Name: melanoma antigen family A2
  Uniprot ID: P43356
  ENST ID: ENST00000611557
  CDS Start-End: 524-1468
ttgcgcattggaggtcagaggacagcgagattctcgccctgagcaacggcctgacgtcggcggagggaagcaggcgcaggctccgtgaggaggcaaggtaagacgccgagggaggactgaggcgggcctcaccccagacagagggcccccaataatccagcgctgcctctgctgccgggcctggaccaccctgcaggggaagacttctcaggctgagtcgccaccacctcaccccgccaccccccgccgctttaaccgcagggaactctggcatctcagggagttgatgaccttgttttcagaaggtgactcaggtcaacacaggggcccccatctggtcgacagatgcagtggttctaggatctgccaagcatccaggtggagagcctgaggttctgagggggacaggctgacaagtaggacccgaggcactggaggagcattgaaggagaagatctgcctgtgggtcttcattgcccagctcctgcccgcactcctgcctgctgccctgaccagagtcatcatgcctcttgagcagaggagtcagcactgcaagcctgaagaaggccttgaggcccgaggagaggccctgggcctggtgggtgcgcaggctcctgctactgaggagcagcagaccgcttcttcctcttctactctagtggaagttaccctgggggaggtgcctgctgccgactcaccgagtcctccccacagtcctcagggagcctccagcttctcgactaccatcaactacactctttggagacaatccgatgagggctccagcaaccaagaagaggaggggccaagaatgtttcccgacctggagtccgagttccaagcagcaatcagtaggaagatggttgagttggttcattttctgctcctcaagtatcgagccagggagccggtcacaaaggcagaaatgctggagagtgtcctcagaaattgccaggacttctttcccgtgatcttcagcaaagcctccgagtacttgcagctggtctttggcatcgaggtggtggaagtggtccccatcagccacttgtacatccttgtcacctgcctgggcctctcctacgatggcctgctgggcgacaatcaggtcatgcccaagacaggcctcctgataatcgtcctggccataatcgcaatagagggcgactgtgcccctgaggagaaaatctgggaggagctgagtatgttggaggtgtttgaggggagggaggacagtgtcttcgcacatcccaggaagctgctcatgcaagatctggtgcaggaaaactacctggagtaccggcaggtgcccggcagtgatcctgcatgctacgagttcctgtggggtccaagggccctcattgaaaccagctatgtgaaagtcctgcaccatacactaaagatcggtggagaacctcacatttcctacccacccctgcatgaacgggctttgagagagggagaagagtgagtctcagcacatgttgcagccagggccagtgggagggggtctgggccagtgcaccttccagggccccatccattagcttccactgcctcgtgtgatatgaggcccattcctgcctctttgaagagagcagtcagcattcttagcagtgagtttctgttctgttggatgactttgagatttatctttgtttcctgttggaattgttcaaatgttccttttaacaaatggttggatgaacttcagcatccaagtttatgaatgacagtagtcacacatagtgctgtttatatagtttaggggtaagagtcctgttttttattcagattgggaaatccattccattttgtgagttgtcacataataacagcagtggaatatgtatttgcctatattgtgaacgaattagcagtaaaatacatgatacaaggaactcaaaagatagttaattcttgccttatacctcagtctattatgtaaaattaaaaatatgtgtatgtttttgcttctttgagaatgcaaaagaaattaaatctgaataaataattcttcctgttca

SEQ ID NO: 152503 - DNA, 725 bp, Homo sapiens
  Payload ID: 9998
  Gene Symbol: MAGEA2
  Gene Name: melanoma antigen family A2
  ENST ID: ENST00000617846
  CDS Start-End: 484-725
gcaacggcctgacgtcggcggagggaagcaggcgcaggctccgtgaggaggcaagaatccgggctttgcccctgcaatcaacccacggaagctccgggaatggcggccaagcacgcggatcctgacgttcacatatctcagggagttgatgaccttgttttcagaaggtgactcaggtcaacacaggggcccccatctggtcgacagatgcagtggttctaggatctgccaagcatccaggtggagagcctgaggaatcaggagctccaggaaccaggcagtgaggccttggtctgagtcagtgtcctcaggtcacagagcagaggggacgcagacagtgccaacactgaaggttctgagggggacaggctgacaagtaggacccgaggcactggaggagcattgaaggagaagatctgcctgtgggtcttcattgcccagctcctgcccgcactcctgcctgctgccctgaccagagtcatcatgcctcttgagcagaggagtcagcactgcaagcctgaagaaggccttgaggcccgaggagaggccctgggcctggtgggtgcgcaggctcctgctactgaggagcagcagaccgcttcttcctcttctactctagtggaagttaccctgggggaggtgcctgctgccgactcaccgagtcctccccacagtcctcagggagcctccagcttctcgactaccatcaactacactctttggag

SEQ ID NO: 152504 - DNA, 576 bp, Homo sapiens
  Payload ID: 9998
  Gene Symbol: MAGEA2
  Gene Name: melanoma antigen family A2
  ENST ID: ENST00000617505
  CDS Start-End: 466-576
aacggcctgacgtcggcggagggaagcaggcgcaggctccgtgaggaggcaagggaactctggcgtaagagctttgtgtgaccagggcagggctggttagaagtgctcagggcccagactcagccaggaatcaagaatccgggctttgcccctgcaatcaacccacggaagctccgggaatggcggccaagcacgcggatcctgacgttcacatatctcagggagttgatgaccttgttttcagaaggtgactcaggtcaacacaggggcccccatctggtcgacagatgcagtggttctaggatctgccaagcatccaggtggagagcctgaggttctgagggggacaggctgacaagtaggacccgaggcactggaggagcattgaaggagaagatctgcctgtgggtcttcattgcccagctcctgcccgcactcctgcctgctgccctgaccagagtcatcatgcctcttgagcagaggagtcagcactgcaagcctgaagaaggccttgaggcccgaggagaggccctgggcctggtgggtgcgcaggctcctgctactgaggagcagcag

SEQ ID NO: 152505 - DNA, 1947 bp, Homo sapiens
  Payload ID: 9998
  Gene Symbol: MAGEA2
  Gene Name: melanoma antigen family A2
  Uniprot ID: P43356
  ENST ID: ENST00000620710
  CDS Start-End: 447-1391
ttgcgcattggaggtcagaggacagcgagattctcgccctgagcaacggcctgacgtcggcggagggaagcaggcgcaggctccgtgaggaggcaagatctcagggagttgatgaccttgttttcagaaggtgactcaggtcaacacaggggcccccatctggtcgacagatgcagtggttctaggatctgccaagcatccaggtggagagcctgaggaatcaggagctccaggaaccaggcagtgaggccttggtctgagtcagtgtcctcaggtcacagagcagaggggacgcagacagtgccaacactgaaggttctgagggggacaggctgacaagtaggacccgaggcactggaggagcattgaaggagaagatctgcctgtgggtcttcattgcccagctcctgcccgcactcctgcctgctgccctgaccagagtcatcatgcctcttgagcagaggagtcagcactgcaagcctgaagaaggccttgaggcccgaggagaggccctgggcctggtgggtgcgcaggctcctgctactgaggagcagcagaccgcttcttcctcttctactctagtggaagttaccctgggggaggtgcctgctgccgactcaccgagtcctccccacagtcctcagggagcctccagcttctcgactaccatcaactacactctttggagacaatccgatgagggctccagcaaccaagaagaggaggggccaagaatgtttcccgacctggagtccgagttccaagcagcaatcagtaggaagatggttgagttggttcattttctgctcctcaagtatcgagccagggagccggtcacaaaggcagaaatgctggagagtgtcctcagaaattgccaggacttctttcccgtgatcttcagcaaagcctccgagtacttgcagctggtctttggcatcgaggtggtggaagtggtccccatcagccacttgtacatccttgtcacctgcctgggcctctcctacgatggcctgctgggcgacaatcaggtcatgcccaagacaggcctcctgataatcgtcctggccataatcgcaatagagggcgactgtgcccctgaggagaaaatctgggaggagctgagtatgttggaggtgtttgaggggagggaggacagtgtcttcgcacatcccaggaagctgctcatgcaagatctggtgcaggaaaactacctggagtaccggcaggtgcccggcagtgatcctgcatgctacgagttcctgtggggtccaagggccctcattgaaaccagctatgtgaaagtcctgcaccatacactaaagatcggtggagaacctcacatttcctacccacccctgcatgaacgggctttgagagagggagaagagtgagtctcagcacatgttgcagccagggccagtgggagggggtctgggccagtgcaccttccagggccccatccattagcttccactgcctcgtgtgatatgaggcccattcctgcctctttgaagagagcagtcagcattcttagcagtgagtttctgttctgttggatgactttgagatttatctttgtttcctgttggaattgttcaaatgttccttttaacaaatggttggatgaacttcagcatccaagtttatgaatgacagtagtcacacatagtgctgtttatatagtttaggggtaagagtcctgttttttattcagattgggaaatccattccattttgtgagttgtcacataataacagcagtggaatatgtatttgcctatattgtgaacgaattagcagtaaaatacatgatacaaggaactcaaaagatagttaattcttgccttatacctcagtctattatgtaaaattaaaaatatgtgtatgtttttgcttctttgagaatgcaaaagaaattaaatctgaataaataattcttcctgttca

SEQ ID NO: 152506 - DNA, 2009 bp, Homo sapiens
  Payload ID: 9998
  Gene Symbol: MAGEA2
  Gene Name: melanoma antigen family A2
  Uniprot ID: P43356
  ENST ID: ENST00000623438
  CDS Start-End: 510-1454
ttgcgcattggaggtcagaggacagcgagattctcgccctgagcaacggcctgacgtcggcggagggaagcaggcgcaggctccgtgaggaggcaagggaactctggcgtaagagctttgtgtgaccagggcagggctggttagaagtgctcagggcccagactcagccaggaatcaagaatccgggctttgcccctgcaatcaacccacggaagctccgggaatggcggccaagcacgcggatcctgacgttcacatatctcagggagttgatgaccttgttttcagaaggtgactcaggtcaacacaggggcccccatctggtcgacagatgcagtggttctaggatctgccaagcatccaggtggagagcctgaggttctgagggggacaggctgacaagtaggacccgaggcactggaggagcattgaaggagaagatctgcctgtgggtcttcattgcccagctcctgcccgcactcctgcctgctgccctgaccagagtcatcatgcctcttgagcagaggagtcagcactgcaagcctgaagaaggccttgaggcccgaggagaggccctgggcctggtgggtgcgcaggctcctgctactgaggagcagcagaccgcttcttcctcttctactctagtggaagttaccctgggggaggtgcctgctgccgactcaccgagtcctccccacagtcctcagggagcctccagcttctcgactaccatcaactacactctttggagacaatccgatgagggctccagcaaccaagaagaggaggggccaagaatgtttcccgacctggagtccgagttccaagcagcaatcagtaggaagatggttgagttggttcattttctgctcctcaagtatcgagccagggagccggtcacaaaggcagaaatgctggagagtgtcctcagaaattgccaggacttctttcccgtgatcttcagcaaagcctccgagtacttgcagctggtctttggcatcgaggtggtggaagtggtccccatcagccacttgtacatccttgtcacctgcctgggcctctcctacgatggcctgctgggcgacaatcaggtcatgcccaagacaggcctcctgataatcgtcctggccataatcgcaatagagggcgactgtgcccctgaggagaaaatctgggaggagctgagtatgttggaggtgtttgaggggagggaggacagtgtcttcgcacatcccaggaagctgctcatgcaagatctggtgcaggaaaactacctggagtaccggcaggtgcccggcagtgatcctgcatgctacgagttcctgtggggtccaagggccctcattgaaaccagctatgtgaaagtcctgcaccatacactaaagatcggtggagaacctcacatttcctacccacccctgcatgaacgggctttgagagagggagaagagtgagtctcagcacatgttgcagccagggccagtgggagggggtctgggccagtgcaccttccagggccccatccattagcttccactgcctcgtgtgatatgaggcccattcctgcctctttgaagagagcagtcagcattcttagcagtgagtttctgttctgttggatgactttgagatttatctttgtttcctgttggaattgttcaaatgttccttttaacaaatggttggatgaacttcagcatccaagtttatgaatgacagtagtcacacatagtgctgtttatatagtttaggggtaagagtcctgttttttattcagattgggaaatccattccattttgtgagttgtcacataataacagcagtggaatatgtatttgcctatattgtgaacgaattagcagtaaaatacatgatacaaggaactcaaaagatagttaattcttgccttatacctcagtctattatgtaaaattaaaaatatgtgtatgtttttgcttctttgagaatgcaaaagaaattaaatctgaataaataattcttcctgttc

SEQ ID NO: 152507 - DNA, 2025 bp, Homo sapiens
  Payload ID: 9998
  Gene Symbol: MAGEA2
  Gene Name: melanoma antigen family A2
  Uniprot ID: P43356
  ENST ID: ENST00000623806
  CDS Start-End: 526-1470
ttgcgcattggaggtcagaggacagcgagattctcgccctgagcaacggcctgacgtcggcggagggaagcaggcgcaggctccgtgaggaggcaagaatccgggctttgcccctgcaatcaacccacggaagctccgggaatggcggccaagcacgcggatcctgacgttcacatatctcagggagttgatgaccttgttttcagaaggtgactcaggtcaacacaggggcccccatctggtcgacagatgcagtggttctaggatctgccaagcatccaggtggagagcctgaggaatcaggagctccaggaaccaggcagtgaggccttggtctgagtcagtgtcctcaggtcacagagcagaggggacgcagacagtgccaacactgaaggttctgagggggacaggctgacaagtaggacccgaggcactggaggagcattgaaggagaagatctgcctgtgggtcttcattgcccagctcctgcccgcactcctgcctgctgccctgaccagagtcatcatgcctcttgagcagaggagtcagcactgcaagcctgaagaaggccttgaggcccgaggagaggccctgggcctggtgggtgcgcaggctcctgctactgaggagcagcagaccgcttcttcctcttctactctagtggaagttaccctgggggaggtgcctgctgccgactcaccgagtcctccccacagtcctcagggagcctccagcttctcgactaccatcaactacactctttggagacaatccgatgagggctccagcaaccaagaagaggaggggccaagaatgtttcccgacctggagtccgagttccaagcagcaatcagtaggaagatggttgagttggttcattttctgctcctcaagtatcgagccagggagccggtcacaaaggcagaaatgctggagagtgtcctcagaaattgccaggacttctttcccgtgatcttcagcaaagcctccgagtacttgcagctggtctttggcatcgaggtggtggaagtggtccccatcagccacttgtacatccttgtcacctgcctgggcctctcctacgatggcctgctgggcgacaatcaggtcatgcccaagacaggcctcctgataatcgtcctggccataatcgcaatagagggcgactgtgcccctgaggagaaaatctgggaggagctgagtatgttggaggtgtttgaggggagggaggacagtgtcttcgcacatcccaggaagctgctcatgcaagatctggtgcaggaaaactacctggagtaccggcaggtgcccggcagtgatcctgcatgctacgagttcctgtggggtccaagggccctcattgaaaccagctatgtgaaagtcctgcaccatacactaaagatcggtggagaacctcacatttcctacccacccctgcatgaacgggctttgagagagggagaagagtgagtctcagcacatgttgcagccagggccagtgggagggggtctgggccagtgcaccttccagggccccatccattagcttccactgcctcgtgtgatatgaggcccattcctgcctctttgaagagagcagtcagcattcttagcagtgagtttctgttctgttggatgactttgagatttatctttgtttcctgttggaattgttcaaatgttccttttaacaaatggttggatgaacttcagcatccaagtttatgaatgacagtagtcacacatagtgctgtttatatagtttaggggtaagagtcctgttttttattcagattgggaaatccattccattttgtgagttgtcacataataacagcagtggaatatgtatttgcctatattgtgaacgaattagcagtaaaatacatgatacaaggaactcaaaagatagttaattcttgccttatacctcagtctattatgtaaaattaaaaatatgtgtatgtttttgcttctttgagaatgcaaaagaaattaaatctgaataaataattcttcctgttc

SEQ ID NO: 152508 - DNA, 1946 bp, Homo sapiens
  Payload ID: 9999
  Gene Symbol: MAGEA2B
  Gene Name: melanoma antigen family A2B
  Uniprot ID: P43356
  ENST ID: ENST00000331220
  CDS Start-End: 447-1391
ttgcgcattggaggtcagaggacagcgagattctcgccctgagcaacggcctgacgtcggcggagggaagcaggcgcaggctccgtgaggaggcaagatctcagggagttgatgaccttgttttcagaaggtgactcaggtcaacacaggggcccccatctggtcgacagatgcagtggttctaggatctgccaagcatccaggtggagagcctgaggaatcaggagctccaggaaccaggcagtgaggccttggtctgagtcagtgtcctcaggtcacagagcagaggggacgcagacagtgccaacactgaaggttctgagggggacaggctgacaagtaggacccgaggcactggaggagcattgaaggagaagatctgcctgtgggtcttcattgcccagctcctgcccgcactcctgcctgctgccctgaccagagtcatcatgcctcttgagcagaggagtcagcactgcaagcctgaagaaggccttgaggcccgaggagaggccctgggcctggtgggtgcgcaggctcctgctactgaggagcagcagaccgcttcttcctcttctactctagtggaagttaccctgggggaggtgcctgctgccgactcaccgagtcctccccacagtcctcagggagcctccagcttctcgactaccatcaactacactctttggagacaatccgatgagggctccagcaaccaagaagaggaggggccaagaatgtttcccgacctggagtccgagttccaagcagcaatcagtaggaagatggttgagttggttcattttctgctcctcaagtatcgagccagggagccggtcacaaaggcagaaatgctggagagtgtcctcagaaattgccaggacttctttcccgtgatcttcagcaaagcctccgagtacttgcagctggtctttggcatcgaggtggtggaagtggtccccatcagccacttgtacatccttgtcacctgcctgggcctctcctacgatggcctgctgggcgacaatcaggtcatgcccaagacaggcctcctgataatcgtcctggccataatcgcaatagagggcgactgtgcccctgaggagaaaatctgggaggagctgagtatgttggaggtgtttgaggggagggaggacagtgtcttcgcacatcccaggaagctgctcatgcaagatctggtgcaggaaaactacctggagtaccggcaggtgcccggcagtgatcctgcatgctacgagttcctgtggggtccaagggccctcattgaaaccagctatgtgaaagtcctgcaccatacactaaagatcggtggagaacctcacatttcctacccacccctgcatgaacgggctttgagagagggagaagagtgagtctcagcacatgttgcagccagggccagtgggagggggtctgggccagtgcaccttccagggccccatccattagcttccactgcctcgtgtgatatgaggcccattcctgcctctttgaagagagcagtcagcattcttagcagtgagtttctgttctgttggatgactttgagatttatctttgtttcctgttggaattgttcaaatgttccttttaacaaatggttggatgaacttcagcatccaagtttatgaatgacagtagtcacacatagtgctgtttatatagtttaggggtaagagtcctgttttttattcagattgggaaatccattccattttgtgagttgtcacataataacagcagtggaatatgtatttgcctatattgtgaacgaattagcagtaaaatacatgatacaaggaactcaaaagatagttaattcttgccttatacctcagtctattatgtaaaattaaaaatatgtgtatgtttttgcttctttgagaatgcaaaagaaattaaatctgaataaataattcttcctgttc

SEQ ID NO: 152509 - DNA, 1714 bp, Homo sapiens
  Payload ID: 9999
  Gene Symbol: MAGEA2B
  Gene Name: melanoma antigen family A2B
  Uniprot ID: P43356
  ENST ID: ENST00000370293
  CDS Start-End: 214-1158
cagaggacagcgagattctcgccctgagcaacggcctgacgtcggcggagggaagcaggcgcaggctccgtgaggaggcaaggttctgagggggacaggctgacaagtaggacccgaggcactggaggagcattgaaggagaagatctgcctgtgggtcttcattgcccagctcctgcccgcactcctgcctgctgccctgaccagagtcatcatgcctcttgagcagaggagtcagcactgcaagcctgaagaaggccttgaggcccgaggagaggccctgggcctggtgggtgcgcaggctcctgctactgaggagcagcagaccgcttcttcctcttctactctagtggaagttaccctgggggaggtgcctgctgccgactcaccgagtcctccccacagtcctcagggagcctccagcttctcgactaccatcaactacactctttggagacaatccgatgagggctccagcaaccaagaagaggaggggccaagaatgtttcccgacctggagtccgagttccaagcagcaatcagtaggaagatggttgagttggttcattttctgctcctcaagtatcgagccagggagccggtcacaaaggcagaaatgctggagagtgtcctcagaaattgccaggacttctttcccgtgatcttcagcaaagcctccgagtacttgcagctggtctttggcatcgaggtggtggaagtggtccccatcagccacttgtacatccttgtcacctgcctgggcctctcctacgatggcctgctgggcgacaatcaggtcatgcccaagacaggcctcctgataatcgtcctggccataatcgcaatagagggcgactgtgcccctgaggagaaaatctgggaggagctgagtatgttggaggtgtttgaggggagggaggacagtgtcttcgcacatcccaggaagctgctcatgcaagatctggtgcaggaaaactacctggagtaccggcaggtgcccggcagtgatcctgcatgctacgagttcctgtggggtccaagggccctcattgaaaccagctatgtgaaagtcctgcaccatacactaaagatcggtggagaacctcacatttcctacccacccctgcatgaacgggctttgagagagggagaagagtgagtctcagcacatgttgcagccagggccagtgggagggggtctgggccagtgcaccttccagggccccatccattagcttccactgcctcgtgtgatatgaggcccattcctgcctctttgaagagagcagtcagcattcttagcagtgagtttctgttctgttggatgactttgagatttatctttgtttcctgttggaattgttcaaatgttccttttaacaaatggttggatgaacttcagcatccaagtttatgaatgacagtagtcacacatagtgctgtttatatagtttaggggtaagagtcctgttttttattcagattgggaaatccattccattttgtgagttgtcacataataacagcagtggaatatgtatttgcctatattgtgaacgaattagcagtaaaatacatgatacaaggaactcaaaagatagttaattcttgccttatacctcagtctattatgtaaaattaaaaatatgtgtatgtttttgcttctttgagaatgcaaaagaaattaaatctgaataaataattcttcctgttca

SEQ ID NO: 152510 - DNA, 445 bp, Homo sapiens
  Payload ID: 9999
  Gene Symbol: MAGEA2B
  Gene Name: melanoma antigen family A2B
  ENST ID: ENST00000409560
  CDS Start-End: 345-445
aagacgccgagggaggactgaggcgggcctcaccccagacagagggcccccaataatccagcgctgcctctgctgccgggcctggaccaccctgcaggggaagacttctcaggctgagtcgccaccacctcaccccgccaccccccgccgctttaaccgcagggaactctggcatctcagggagttgatgaccttgttttcagaaggtgactcaggtcaacacaggggcccccatctggtcgacagatgcagtggttctaggatctgccaagcatccaggcctgtgggtcttcattgcccagctcctgcccgcactcctgcctgctgccctgaccagagtcatcatgcctcttgagcagaggagtcagcactgcaagcctgaagaaggccttgaggcccgaggagaggccctgggcctggtgggtgcgcaggctcctgctactga

SEQ ID NO: 152511 - DNA, 750 bp, Homo sapiens
  Payload ID: 9999
  Gene Symbol: MAGEA2B
  Gene Name: melanoma antigen family A2B
  ENST ID: ENST00000447530
  CDS Start-End: 484-750
gcaacggcctgacgtcggcggagggaagcaggcgcaggctccgtgaggaggcaagaatccgggctttgcccctgcaatcaacccacggaagctccgggaatggcggccaagcacgcggatcctgacgttcacatatctcagggagttgatgaccttgttttcagaaggtgactcaggtcaacacaggggcccccatctggtcgacagatgcagtggttctaggatctgccaagcatccaggtggagagcctgaggaatcaggagctccaggaaccaggcagtgaggccttggtctgagtcagtgtcctcaggtcacagagcagaggggacgcagacagtgccaacactgaaggttctgagggggacaggctgacaagtaggacccgaggcactggaggagcattgaaggagaagatctgcctgtgggtcttcattgcccagctcctgcccgcactcctgcctgctgccctgaccagagtcatcatgcctcttgagcagaggagtcagcactgcaagcctgaagaaggccttgaggcccgaggagaggccctgggcctggtgggtgcgcaggctcctgctactgaggagcagcagaccgcttcttcctcttctactctagtggaagttaccctgggggaggtgcctgctgccgactcaccgagtcctccccacagtcctcagggagcctccagcttctcgactaccatcaactacactctttggagacaatccgatgagggctccagcaac

SEQ ID NO: 152512 - DNA, 576 bp, Homo sapiens; identical to SEQ ID NO: 152504
  Payload ID: 9999
  Gene Symbol: MAGEA2B
  Gene Name: melanoma antigen family A2B
  ENST ID: ENST00000458057
  CDS Start-End: 466-576

SEQ ID NO: 152513 - DNA, 879 bp, Homo sapiens
  Payload ID: 9999
  Gene Symbol: MAGEA2B
  Gene Name: melanoma antigen family A2B
  ENST ID: ENST00000423993
  CDS Start-End: 424-879
agcgagattctcgccctgagcaacggcctgacgtcggcggagggaagcaggcgcaggctccgtgaggaggcaagatctcagggagttgatgaccttgttttcagaaggtgactcaggtcaacacaggggcccccatctggtcgacagatgcagtggttctaggatctgccaagcatccaggtggagagcctgaggaatcaggagctccaggaaccaggcagtgaggccttggtctgagtcagtgtcctcaggtcacagagcagaggggacgcagacagtgccaacactgaaggttctgagggggacaggctgacaagtaggacccgaggcactggaggagcattgaaggagaagatctgcctgtgggtcttcattgcccagctcctgcccgcactcctgcctgctgccctgaccagagtcatcatgcctcttgagcagaggagtcagcactgcaagcctgaagaaggccttgaggcccgaggagaggccctgggcctggtgggtgcgcaggctcctgctactgaggagcagcagaccgcttcttcctcttctactctagtggaagttaccctgggggaggtgcctgctgccgactcaccgagtcctccccacagtcctcagggagcctccagcttctcgactaccatcaactacactctttggagacaatccgatgagggctccagcaaccaagaagaggaggggccaagaatgtttcccgacctggagtccgagttccaagcagcaatcagtaggaagatggttgagttggttcattttctgctcctcaagtatcgagccagggagccggtcacaaaggcagaaatgctggagagtgtcctcagaaattgccaggacttctttcccgtgatcttcagc

SEQ ID NO: 152514 - DNA, 652 bp, Homo sapiens
  Payload ID: 9999
  Gene Symbol: MAGEA2B
  Gene Name: melanoma antigen family A2B
  ENST ID: ENST00000422085
  CDS Start-End: 293-652
tcggcggagggaagcaggcgcaggctccgtgaggaggcaagatctcagggagttgatgaccttgttttcagaaggtgactcaggtcaacacaggggcccccatctggtcgacagatgcagtggttctaggatctgccaagcatccaggtggagagcctgaggttctgagggggacaggctgacaagtaggacccgaggcactggaggagcattgaaggagaagatctgcctgtgggtcttcattgcccagctcctgcccgcactcctgcctgctgccctgaccagagtcatcatgcctcttgagcagaggagtcagcactgcaagcctgaagaaggccttgaggcccgaggagaggccctgggcctggtgggtgcgcaggctcctgctactgaggagcagcagaccgcttcttcctcttctactctagtggaagttaccctgggggaggtgcctgctgccgactcaccgagtcctccccacagtcctcagggagcctccagcttctcgactaccatcaactacactctttggagacaatccgatgagggctccagcaaccaagaagaggaggggccaagaatgtttcccgacctggagtccgagttccaagcagcaatcagtaggaagatggttgagttggttcattttctg

SEQ ID NO: 152515 - DNA, 753 bp, Homo sapiens
  Payload ID: 9999
  Gene Symbol: MAGEA2B
  Gene Name: melanoma antigen family A2B
  ENST ID: ENST00000453150
  CDS Start-End: 309-753
aggtaagacgccgagggaggactgaggcgggcctcaccccagacagagggcccccaataatccagcgctgcctctgctgccgggcctggaccaccctgcaggggaagacttctcaggctgagtcgccaccacctcaccccgccaccccccgccgctttaaccgcagggaactctggcgttctgagggggacaggctgacaagtaggacccgaggcactggaggagcattgaaggagaagatctgcctgtgggtcttcattgcccagctcctgcccgcactcctgcctgctgccctgaccagagtcatcatgcctcttgagcagaggagtcagcactgcaagcctgaagaaggccttgaggcccgaggagaggccctgggcctggtgggtgcgcaggctcctgctactgaggagcagcagaccgcttcttcctcttctactctagtggaagttaccctgggggaggtgcctgctgccgactcaccgagtcctccccacagtcctcagggagcctccagcttctcgactaccatcaactacactctttggagacaatccgatgagggctccagcaaccaagaagaggaggggccaagaatgtttcccgacctggagtccgagttccaagcagcaatcagtaggaagatggttgagttggttcattttctgctcctcaagtatcgagccagggagccggtcacaaaggcagaaatgctggagagtgtcctcagaaattgccaggacttctttcccg

SEQ ID NO: 152516 - DNA, 1724 bp, Homo sapiens
  Payload ID: 10000
  Gene Symbol: MAGEA3
  Gene Name: melanoma antigen family A3
  Uniprot ID: P43357
  ENST ID: ENST00000370278
  CDS Start-End: 210-1154
gagattctcgccctgagcaacgagcgacggcctgacgtcggcggagggaagccggcccaggctcggtgaggaggcaaggttctgaggggacaggctgacctggaggaccagaggcccccggaggagcactgaaggagaagatctgccagtgggtctccattgcccagctcctgcccacactcccgcctgttgccctgaccagagtcatcatgcctcttgagcagaggagtcagcactgcaagcctgaagaaggccttgaggcccgaggagaggccctgggcctggtgggtgcgcaggctcctgctactgaggagcaggaggctgcctcctcctcttctactctagttgaagtcaccctgggggaggtgcctgctgccgagtcaccagatcctccccagagtcctcagggagcctccagcctccccactaccatgaactaccctctctggagccaatcctatgaggactccagcaaccaagaagaggaggggccaagcaccttccctgacctggagtccgagttccaagcagcactcagtaggaaggtggccgagttggttcattttctgctcctcaagtatcgagccagggagccggtcacaaaggcagaaatgctggggagtgtcgtcggaaattggcagtatttctttcctgtgatcttcagcaaagcttccagttccttgcagctggtctttggcatcgagctgatggaagtggaccccatcggccacttgtacatctttgccacctgcctgggcctctcctacgatggcctgctgggtgacaatcagatcatgcccaaggcaggcctcctgataatcgtcctggccataatcgcaagagagggcgactgtgcccctgaggagaaaatctgggaggagctgagtgtgttagaggtgtttgaggggagggaagacagtatcttgggggatcccaagaagctgctcacccaacatttcgtgcaggaaaactacctggagtaccggcaggtccccggcagtgatcctgcatgttatgaattcctgtggggtccaagggccctcgttgaaaccagctatgtgaaagtcctgcaccatatggtaaagatcagtggaggacctcacatttcctacccacccctgcatgagtgggttttgagagagggggaagagtgagtctgagcacgagttgcagccagggccagtgggagggggtctgggccagtgcaccttccggggccgcatcccttagtttccactgcctcctgtgacgtgaggcccattcttcactctttgaagcgagcagtcagcattcttagtagtgggtttctgttctgttggatgactttgagattattctttgtttcctgttggagttgttcaaatgttccttttaacggatggttgaatgagcgtcagcatccaggtttatgaatgacagtagtcacacatagtgctgtttatatagtttaggagtaagagtcttgttttttactcaaattgggaaatccattccattttgtgaattgtgacataataatagcagtggtaaaagtatttgcttaaaattgtgagcgaattagcaataacatacatgagataactcaagaaatcaaaagatagttgattcttgccttgtacctcaatctattctgtaaaattaaacaaatatgcaaaccaggatttccttgacttctttgagaatgcaagcgaaattaaatctgaataaataattcttcctcttca

SEQ ID NO: 152517 - DNA, 853 bp, Homo sapiens
  Payload ID: 10000
  Gene Symbol: MAGEA3
  Gene Name: melanoma antigen family A3
  ENST ID: ENST00000417212
  CDS Start-End: 259-853
agcaacgagcgacggcctgacgtcggcggagggaagccggcccaggctcggtgaggaggcaagtcctgcagcctcagcatgcgctggccggatgtaccctgaggtgccctctcacttcctccttcaggttctgaggggacaggctgacctggaggaccagaggcccccggaggagcactgaaggagaagatctgccagtgggtctccattgcccagctcctgcccacactcccgcctgttgccctgaccagagtcatcatgcctcttgagcagaggagtcagcactgcaagcctgaagaaggccttgaggcccgaggagaggccctgggcctggtgggtgcgcaggctcctgctactgaggagcaggaggctgcctcctcctcttctactctagttgaagtcaccctgggggaggtgcctgctgccgagtcaccagatcctccccagagtcctcagggagcctccagcctccccactaccatgaactaccctctctggagccaatcctatgaggactccagcaaccaagaagaggaggggccaagcaccttccctgacctggagtccgagttccaagcagcactcagtaggaaggtggccgagttggttcattttctgctcctcaagtatcgagccagggagccggtcacaaaggcagaaatgctggggagtgtcgtcggaaattggcagtatttctttcctgtgatcttcagcaaagcttccagttccttgcagctggtctttggcatcgagctgatggaagtggaccccatcggccacttgtacatctttgccacctgcctgggcctctcctacgatggcctgctgggtgacaatcagatcatgcccaagg

SEQ ID NO: 152518 - DNA, 1762 bp, Homo sapiens
  Payload ID: 10000
  Gene Symbol: MAGEA3
  Gene Name: melanoma antigen family A3
  Uniprot ID: P43357
  ENST ID: ENST00000598245
  CDS Start-End: 259-1203
agcaacgagcgacggcctgacgtcggcggagggaagccggcccaggctcggtgaggaggcaagtcctgcagcctcagcatgcgctggccggatgtaccctgaggtgccctctcacttcctccttcaggttctgaggggacaggctgacctggaggaccagaggcccccggaggagcactgaaggagaagatctgccagtgggtctccattgcccagctcctgcccacactcccgcctgttgccctgaccagagtcatcatgcctcttgagcagaggagtcagcactgcaagcctgaagaaggccttgaggcccgaggagaggccctgggcctggtgggtgcgcaggctcctgctactgaggagcaggaggctgcctcctcctcttctactctagttgaagtcaccctgggggaggtgcctgctgccgagtcaccagatcctccccagagtcctcagggagcctccagcctccccactaccatgaactaccctctctggagccaatcctatgaggactccagcaaccaagaagaggaggggccaagcaccttccctgacctggagtccgagttccaagcagcactcagtaggaaggtggccgagttggttcattttctgctcctcaagtatcgagccagggagccggtcacaaaggcagaaatgctggggagtgtcgtcggaaattggcagtatttctttcctgtgatcttcagcaaagcttccagttccttgcagctggtctttggcatcgagctgatggaagtggaccccatcggccacttgtacatctttgccacctgcctgggcctctcctacgatggcctgctgggtgacaatcagatcatgcccaaggcaggcctcctgataatcgtcctggccataatcgcaagagagggcgactgtgcccctgaggagaaaatctgggaggagctgagtgtgttagaggtgtttgaggggagggaagacagtatcttgggggatcccaagaagctgctcacccaacatttcgtgcaggaaaactacctggagtaccggcaggtccccggcagtgatcctgcatgttatgaattcctgtggggtccaagggccctcgttgaaaccagctatgtgaaagtcctgcaccatatggtaaagatcagtggaggacctcacatttcctacccacccctgcatgagtgggttttgagagagggggaagagtgagtctgagcacgagttgcagccagggccagtgggagggggtctgggccagtgcaccttccggggccgcatcccttagtttccactgcctcctgtgacgtgaggcccattcttcactctttgaagcgagcagtcagcattcttagtagtgggtttctgttctgttggatgactttgagattattctttgtttcctgttggagttgttcaaatgttccttttaacggatggttgaatgagcgtcagcatccaggtttatgaatgacagtagtcacacatagtgctgtttatatagtttaggagtaagagtcttgttttttactcaaattgggaaatccattccattttgtgaattgtgacataataatagcagtggtaaaagtatttgcttaaaattgtgagcgaattagcaataacatacatgagataactcaagaaatcaaaagatagttgattcttgccttgtacctcaatctattctgtaaaattaaacaaatatgcaaaccaggatttccttgacttctttgagaatgcaagcgaaattaaatctgaataaataatt

SEQ ID NO: 152519 - DNA, 1724 bp, Homo sapiens
  Payload ID: 10001
  Gene Symbol: MAGEA4
  Gene Name: melanoma antigen family A4
  Uniprot ID: P43358
  ENST ID: ENST00000276344
  CDS Start-End: 219-1172
agagacaagcgagcttctgcgtctgactcgcagcttgagactggcggagggaagcccgcccaggctctataaggagacaaggttctgagcagacaggccaaccggaggacaggattccctggaggccacagaggagcaccaaggagaagatctgcctgtgggtccccattgcccagcttttgcctgcactcttgcctgctgccctgaccagagtcatcatgtcttctgagcagaagagtcagcactgcaagcctgaggaaggcgttgaggcccaagaagaggccctgggcctggtgggtgcacaggctcctactactgaggagcaggaggctgctgtctcctcctcctctcctctggtccctggcaccctggaggaagtgcctgctgctgagtcagcaggtcctccccagagtcctcagggagcctctgccttacccactaccatcagcttcacttgctggaggcaacccaatgagggttccagcagccaagaagaggaggggccaagcacctcgcctgacgcagagtccttgttccgagaagcactcagtaacaaggtggatgagttggctcattttctgctccgcaagtatcgagccaaggagctggtcacaaaggcagaaatgctggagagagtcatcaaaaattacaagcgctgctttcctgtgatcttcggcaaagcctccgagtccctgaagatgatctttggcattgacgtgaaggaagtggaccccgccagcaacacctacacccttgtcacctgcctgggcctttcctatgatggcctgctgggtaataatcagatctttcccaagacaggccttctgataatcgtcctgggcacaattgcaatggagggcgacagcgcctctgaggaggaaatctgggaggagctgggtgtgatgggggtgtatgatgggagggagcacactgtctatggggagcccaggaaactgctcacccaagattgggtgcaggaaaactacctggagtaccggcaggtacccggcagtaatcctgcgcgctatgagttcctgtggggtccaagggctctggctgaaaccagctatgtgaaagtcctggagcatgtggtcagggtcaatgcaagagttcgcattgcctacccatccctgcgtgaagcagctttgttagaggaggaagagggagtctgagcatgagttgcagccagggctgtggggaaggggcagggctgggccagtgcatctaacagccctgtgcagcagcttcccttgcctcgtgtaacatgaggcccattcttcactctgtttgaagaaaatagtcagtgttcttagtagtgggtttctattttgttggatgacttggagatttatctctgtttccttttacaattgttgaaatgttccttttaatggatggttgaattaacttcagcatccaagtttatgaatcgtagttaacgtatattgctgttaatatagtttaggagtaagagtcttgttttttattcagattgggaaatccgttctattttgtgaatttgggacataataacagcagtggagtaagtatttagaagtgtgaattcaccgtgaaataggtgagataaattaaaagatacttaattcccgccttatgcctcagtctattctgtaaaatttaaaaaatatatatgcatacctggatttccttggcttcgtgaatgtaagagaaattaaatctgaataaataattctttctgttaa

SEQ ID NO: 152520 - DNA, 1773 bp, Homo sapiens
  Payload ID: 10001
  Gene Symbol: MAGEA4
  Gene Name: melanoma antigen family A4
  Uniprot ID: P43358
  ENST ID: ENST00000360243
  CDS Start-End: 268-1221
agaaagcctcaggggcccggatgtgatgccactgacttgcgcattgggggttagagagaagcgagctgctgtctgaccagcagcttgggattggtggaaggaagcaggccaggccctgtgaggagtcaaggttctgagcagacaggccaaccggaggacaggattccctggaggccacagaggagcaccaaggagaagatctgcctgtgggtccccattgcccagcttttgcctgcactcttgcctgctgccctgaccagagtcatcatgtcttctgagcagaagagtcagcactgcaagcctgaggaaggcgttgaggcccaagaagaggccctgggcctggtgggtgcacaggctcctactactgaggagcaggaggctgctgtctcctcctcctctcctctggtccctggcaccctggaggaagtgcctgctgctgagtcagcaggtcctccccagagtcctcagggagcctctgccttacccactaccatcagcttcacttgctggaggcaacccaatgagggttccagcagccaagaagaggaggggccaagcacctcgcctgacgcagagtccttgttccgagaagcactcagtaacaaggtggatgagttggctcattttctgctccgcaagtatcgagccaaggagctggtcacaaaggcagaaatgctggagagagtcatcaaaaattacaagcgctgctttcctgtgatcttcggcaaagcctccgagtccctgaagatgatctttggcattgacgtgaaggaagtggaccccgccagcaacacctacacccttgtcacctgcctgggcctttcctatgatggcctgctgggtaataatcagatctttcccaagacaggccttctgataatcgtcctgggcacaattgcaatggagggcgacagcgcctctgaggaggaaatctgggaggagctgggtgtgatgggggtgtatgatgggagggagcacactgtctatggggagcccaggaaactgctcacccaagattgggtgcaggaaaactacctggagtaccggcaggtacccggcagtaatcctgcgcgctatgagttcctgtggggtccaagggctctggctgaaaccagctatgtgaaagtcctggagcatgtggtcagggtcaatgcaagagttcgcattgcctacccatccctgcgtgaagcagctttgttagaggaggaagagggagtctgagcatgagttgcagccagggctgtggggaaggggcagggctgggccagtgcatctaacagccctgtgcagcagcttcccttgcctcgtgtaacatgaggcccattcttcactctgtttgaagaaaatagtcagtgttcttagtagtgggtttctattttgttggatgacttggagatttatctctgtttccttttacaattgttgaaatgttccttttaatggatggttgaattaacttcagcatccaagtttatgaatcgtagttaacgtatattgctgttaatatagtttaggagtaagagtcttgttttttattcagattgggaaatccgttctattttgtgaatttgggacataataacagcagtggagtaagtatttagaagtgtgaattcaccgtgaaataggtgagataaattaaaagatacttaattcccgccttatgcctcagtctattctgtaaaatttaaaaaatatatatgcatacctggatttccttggcttcgtgaatgtaagagaaattaaatctgaataaataattctttctgttaa

SEQ ID NO: 152521 - DNA, 1773 bp, Homo sapiens; identical to SEQ ID NO: 152520
  Payload ID: 10001
  Gene Symbol: MAGEA4
  Gene Name: melanoma antigen family A4
  Uniprot ID: P43358
  ENST ID: ENST00000370335
  CDS Start-End: 268-1221

SEQ ID NO: 152522 - DNA, 1773 bp, Homo sapiens; identical to SEQ ID NO: 152520
  Payload ID: 10001
  Gene Symbol: MAGEA4
  Gene Name: melanoma antigen family A4
  Uniprot ID: P43358
  ENST ID: ENST00000370340
  CDS Start-End: 268-1221

SEQ ID NO: 152523 - DNA, 1721 bp, Homo sapiens
  Payload ID: 10001
  Gene Symbol: MAGEA4
  Gene Name: melanoma antigen family A4
  Uniprot ID: P43358
  ENST ID: ENST00000393920
  CDS Start-End: 216-1169
ttagagagaagcgagctgctctgaccagccgcttgggattggcggagggaagcgggccaggccctgtgaggagtcaaggttctgagcagacaggccaaccggaggacaggattccctggaggccacagaggagcaccaaggagaagatctgcctgtgggtccccattgcccagcttttgcctgcactcttgcctgctgccctgaccagagtcatcatgtcttctgagcagaagagtcagcactgcaagcctgaggaaggcgttgaggcccaagaagaggccctgggcctggtgggtgcacaggctcctactactgaggagcaggaggctgctgtctcctcctcctctcctctggtccctggcaccctggaggaagtgcctgctgctgagtcagcaggtcctccccagagtcctcagggagcctctgccttacccactaccatcagcttcacttgctggaggcaacccaatgagggttccagcagccaagaagaggaggggccaagcacctcgcctgacgcagagtccttgttccgagaagcactcagtaacaaggtggatgagttggctcattttctgctccgcaagtatcgagccaaggagctggtcacaaaggcagaaatgctggagagagtcatcaaaaattacaagcgctgctttcctgtgatcttcggcaaagcctccgagtccctgaagatgatctttggcattgacgtgaaggaagtggaccccgccagcaacacctacacccttgtcacctgcctgggcctttcctatgatggcctgctgggtaataatcagatctttcccaagacaggccttctgataatcgtcctgggcacaattgcaatggagggcgacagcgcctctgaggaggaaatctgggaggagctgggtgtgatgggggtgtatgatgggagggagcacactgtctatggggagcccaggaaactgctcacccaagattgggtgcaggaaaactacctggagtaccggcaggtacccggcagtaatcctgcgcgctatgagttcctgtggggtccaagggctctggctgaaaccagctatgtgaaagtcctggagcatgtggtcagggtcaatgcaagagttcgcattgcctacccatccctgcgtgaagcagctttgttagaggaggaagagggagtctgagcatgagttgcagccagggctgtggggaaggggcagggctgggccagtgcatctaacagccctgtgcagcagcttcccttgcctcgtgtaacatgaggcccattcttcactctgtttgaagaaaatagtcagtgttcttagtagtgggtttctattttgttggatgacttggagatttatctctgtttccttttacaattgttgaaatgttccttttaatggatggttgaattaacttcagcatccaagtttatgaatcgtagttaacgtatattgctgttaatatagtttaggagtaagagtcttgttttttattcagattgggaaatccgttctattttgtgaatttgggacataataacagcagtggagtaagtatttagaagtgtgaattcaccgtgaaataggtgagataaattaaaagatacttaattcccgccttatgcctcagtctattctgtaaaatttaaaaaatatatatgcatacctggatttccttggcttcgtgaatgtaagagaaattaaatctgaataaataattctttctgttaa

SEQ ID NO: 152524 - DNA, 1727 bp, Homo sapiens
  Payload ID: 10001
  Gene Symbol: MAGEA4
  Gene Name: melanoma antigen family A4
  Uniprot ID: P43358
  ENST ID: ENST00000393921
  CDS Start-End: 222-1175
ggttagagagaagcgagctgctctgtctgaccagcagcttgggattggcggagggaagcgggccaggccctgtgaggagtcaaggttctgagcagacaggccaaccggaggacaggattccctggaggccacagaggagcaccaaggagaagatctgcctgtgggtccccattgcccagcttttgcctgcactcttgcctgctgccctgaccagagtcatcatgtcttctgagcagaagagtcagcactgcaagcctgaggaaggcgttgaggcccaagaagaggccctgggcctggtgggtgcacaggctcctactactgaggagcaggaggctgctgtctcctcctcctctcctctggtccctggcaccctggaggaagtgcctgctgctgagtcagcaggtcctccccagagtcctcagggagcctctgccttacccactaccatcagcttcacttgctggaggcaacccaatgagggttccagcagccaagaagaggaggggccaagcacctcgcctgacgcagagtccttgttccgagaagcactcagtaacaaggtggatgagttggctcattttctgctccgcaagtatcgagccaaggagctggtcacaaaggcagaaatgctggagagagtcatcaaaaattacaagcgctgctttcctgtgatcttcggcaaagcctccgagtccctgaagatgatctttggcattgacgtgaaggaagtggaccccgccagcaacacctacacccttgtcacctgcctgggcctttcctatgatggcctgctgggtaataatcagatctttcccaagacaggccttctgataatcgtcctgggcacaattgcaatggagggcgacagcgcctctgaggaggaaatctgggaggagctgggtgtgatgggggtgtatgatgggagggagcacactgtctatggggagcccaggaaactgctcacccaagattgggtgcaggaaaactacctggagtaccggcaggtacccggcagtaatcctgcgcgctatgagttcctgtggggtccaagggctctggctgaaaccagctatgtgaaagtcctggagcatgtggtcagggtcaatgcaagagttcgcattgcctacccatccctgcgtgaagcagctttgttagaggaggaagagggagtctgagcatgagttgcagccagggctgtggggaaggggcagggctgggccagtgcatctaacagccctgtgcagcagcttcccttgcctcgtgtaacatgaggcccattcttcactctgtttgaagaaaatagtcagtgttcttagtagtgggtttctattttgttggatgacttggagatttatctctgtttccttttacaattgttgaaatgttccttttaatggatggttgaattaacttcagcatccaagtttatgaatcgtagttaacgtatattgctgttaatatagtttaggagtaagagtcttgttttttattcagattgggaaatccgttctattttgtgaatttgggacataataacagcagtggagtaagtatttagaagtgtgaattcaccgtgaaataggtgagataaattaaaagatacttaattcccgccttatgcctcagtctattctgtaaaatttaaaaaatatatatgcatacctggatttccttggcttcgtgaatgtaagagaaattaaatctgaataaataattctttctgttaa

SEQ ID NO: 152525 - DNA, 854 bp, Homo sapiens
  Payload ID: 10001
  Gene Symbol: MAGEA4
  Gene Name: melanoma antigen family A4
  ENST ID: ENST00000431963
  CDS Start-End: 340-854
agggaagcaggcgcaggctctgtgaggaggcaaggcaggatccccggttccgcccccgctttcaaccaaggaaagccccagctgcccggatgtgatgccactgacttgcgcactgggggttagagacaagcgagcttctgcgtctgactcgcagcttgagactggcggagggaagcccgcccaggctctataaggagacaaggttctgagcagacaggccaaccggaggacaggattccctggaggccacagaggagcaccaaggagaagatctgcctgtgggtccccattgcccagcttttgcctgcactcttgcctgctgccctgaccagagtcatcatgtcttctgagcagaagagtcagcactgcaagcctgaggaaggcgttgaggcccaagaagaggccctgggcctggtgggtgcacaggctcctactactgaggagcaggaggctgctgtctcctcctcctctcctctggtccctggcaccctggaggaagtgcctgctgctgagtcagcaggtcctccccagagtcctcagggagcctctgccttacccactaccatcagcttcacttgctggaggcaacccaatgagggttccagcagccaagaagaggaggggccaagcacctcgcctgacgcagagtccttgttccgagaagcactcagtaacaaggtggatgagttggctcattttctgctccgcaagtatcgagccaaggagctggtcacaaaggcagaaatgctggagagagtcatcaaaaattacaagcgctgctttcctgtgatcttcggcaaagcctccgagtccctgaagatgatctttggcattgacgtgaaggaagtggaccc

SEQ ID NO: 152526 - DNA, 997 bp, Homo sapiens
  Payload ID: 10001
  Gene Symbol: MAGEA4
  Gene Name: melanoma antigen family A4
  ENST ID: ENST00000431971
  CDS Start-End: 274-997
aacccaagaaagccccaggggcccggatgtgatgccactgacttgcgcattcggggttagagagaagcgagctgctctgtgaccagccgcttgggattggtggagggaagcgggccaggccctgtgaggagtcaaggttctgagcagacaggccaaccggaggacaggattccctggaggccacagaggagcaccaaggagaagatctgcctgtgggtccccattgcccagcttttgcctgcactcttgcctgctgccctgaccagagtcatcatgtcttctgagcagaagagtcagcactgcaagcctgaggaaggcgttgaggcccaagaagaggccctgggcctggtgggtgcacaggctcctactactgaggagcaggaggctgctgtctcctcctcctctcctctggtccctggcaccctggaggaagtgcctgctgctgagtcagcaggtcctccccagagtcctcagggagcctctgccttacccactaccatcagcttcacttgctggaggcaacccaatgagggttccagcagccaagaagaggaggggccaagcacctcgcctgacgcagagtccttgttccgagaagcactcagtaacaaggtggatgagttggctcattttctgctccgcaagtatcgagccaaggagctggtcacaaaggcagaaatgctggagagagtcatcaaaaattacaagcgctgctttcctgtgatcttcggcaaagcctccgagtccctgaagatgatctttggcattgacgtgaaggaagtggaccccgccagcaacacctacacccttgtcacctgcctgggcctttcctatgatggcctgctgggtaataatcagatctttcccaagacaggccttctgataatcgtcctgggcacaattgcaatggagggcgacagcgcctctgaggaggaaatctgggaggagctgggtgtgatgggggtgtatgatgggagggagcacactgtctatgggg

SEQ ID NO: 152527 - DNA, 914 bp, Homo sapiens
  Payload ID: 10001
  Gene Symbol: MAGEA4
  Gene Name: melanoma antigen family A4
  ENST ID: ENST00000448295
  CDS Start-End: 264-914
ccccaggggcccggatgtgatgccactgacttgcgcattgggggttagagagaagcgagctgctctgtctgaccagcagcttgggattggcggagggaagcgggccaggccctgtgaggagtcaaggttctgagcagacaggccaaccggaggacaggattccctggaggccacagaggagcaccaaggagaagatctgcctgtgggtccccattgcccagcttttgcctgcactcttgcctgctgccctgaccagagtcatcatgtcttctgagcagaagagtcagcactgcaagcctgaggaaggcgttgaggcccaagaagaggccctgggcctggtgggtgcacaggctcctactactgaggagcaggaggctgctgtctcctcctcctctcctctggtccctggcaccctggaggaagtgcctgctgctgagtcagcaggtcctccccagagtcctcagggagcctctgccttacccactaccatcagcttcacttgctggaggcaacccaatgagggttccagcagccaagaagaggaggggccaagcacctcgcctgacgcagagtccttgttccgagaagcactcagtaacaaggtggatgagttggctcattttctgctccgcaagtatcgagccaaggagctggtcacaaaggcagaaatgctggagagagtcatcaaaaattacaagcgctgctttcctgtgatcttcggcaaagcctccgagtccctgaagatgatctttggcattgacgtgaaggaagtggaccccgccagcaacacctacacccttgtcacctgcctgggcctttcctatgatggcctgctgggtaataatcagatctttcccaagacaggccttctgataatcgtcctgggcacaattgcaatggagggcgacagcgcc

SEQ ID NO: 152528 - DNA, 1029 bp, Homo sapiens
  Payload ID: 10001
  Gene Symbol: MAGEA4
  Gene Name: melanoma antigen family A4
  ENST ID: ENST00000416020
  CDS Start-End: 339-1029
ccccaggggcccggatgtgatgccactgacttgcgcattgggggttagagagaagcgagctgctctgtctgaccagcagcttgggattggcggagggaagcgggccaggccctgtgaggagtcaaggttctgagcagacaggccaaccggaggacaggattccctggaggccacagaggagcaccaaggagaagatctgtaagtaagcctttgttagagcctctaagatttggttctcagctgaggtctctcacatgctccctctctccgtaggcctgtgggtccccattgcccagcttttgcctgcactcttgcctgctgccctgaccagagtcatcatgtcttctgagcagaagagtcagcactgcaagcctgaggaaggcgttgaggcccaagaagaggccctgggcctggtgggtgcacaggctcctactactgaggagcaggaggctgctgtctcctcctcctctcctctggtccctggcaccctggaggaagtgcctgctgctgagtcagcaggtcctccccagagtcctcagggagcctctgccttacccactaccatcagcttcacttgctggaggcaacccaatgagggttccagcagccaagaagaggaggggccaagcacctcgcctgacgcagagtccttgttccgagaagcactcagtaacaaggtggatgagttggctcattttctgctccgcaagtatcgagccaaggagctggtcacaaaggcagaaatgctggagagagtcatcaaaaattacaagcgctgctttcctgtgatcttcggcaaagcctccgagtccctgaagatgatctttggcattgacgtgaaggaagtggaccccgccagcaacacctacacccttgtcacctgcctgggcctttcctatgatggcctgctgggtaataatcagatctttcccaagacaggccttctgataatcgtcctgggcacaattgcaatggagggcgacagcgcctctgaggaggaaatctgggaggagctgggtgtgatggggg

SEQ ID NO: 152529 - DNA, 986 bp, Homo sapiens
  Payload ID: 10001
  Gene Symbol: MAGEA4
  Gene Name: melanoma antigen family A4
  ENST ID: ENST00000430273
  CDS Start-End: 263-986
cccaggggcccggatgtgatgccactgacttgcgcattgggggttagagagaagcgagctgctctgtctgaccagcagcttgggattggcggagggaagcgggccaggccctgtgaggagtcaaggttctgagcagacaggccaaccggaggacaggattccctggaggccacagaggagcaccaaggagaagatctgcctgtgggtccccattgcccagcttttgcctgcactcttgcctgctgccctgaccagagtcatcatgtcttctgagcagaagagtcagcactgcaagcctgaggaaggcgttgaggcccaagaagaggccctgggcctggtgggtgcacaggctcctactactgaggagcaggaggctgctgtctcctcctcctctcctctggtccctggcaccctggaggaagtgcctgctgctgagtcagcaggtcctccccagagtcctcagggagcctctgccttacccactaccatcagcttcacttgctggaggcaacccaatgagggttccagcagccaagaagaggaggggccaagcacctcgcctgacgcagagtccttgttccgagaagcactcagtaacaaggtggatgagttggctcattttctgctccgcaagtatcgagccaaggagctggtcacaaaggcagaaatgctggagagagtcatcaaaaattacaagcgctgctttcctgtgatcttcggcaaagcctccgagtccctgaagatgatctttggcattgacgtgaaggaagtggaccccgccagcaacacctacacccttgtcacctgcctgggcctttcctatgatggcctgctgggtaataatcagatctttcccaagacaggccttctgataatcgtcctgggcacaattgcaatggagggcgacagcgcctctgaggaggaaatctgggaggagctgggtgtgatgggggtgtatgatgggagggagcacactgtctatgggg

SEQ ID NO: 152530 - DNA, 914 bp, Homo sapiens; identical to SEQ ID NO: 152527
  Payload ID: 10001
  Gene Symbol: MAGEA4
  Gene Name: melanoma antigen family A4
  ENST ID: ENST00000425182
  CDS Start-End: 264-914

SEQ ID NO: 152531 - DNA, 990 bp, Homo sapiens
  Payload ID: 10001
  Gene Symbol: MAGEA4
  Gene Name: melanoma antigen family A4
  ENST ID: ENST00000457310
  CDS Start-End: 267-990
aagaaagtcccaggtgcccggatgtgatgccactgacttgcgcattgggggttagagagaagcgagctgctctgaccagccgcttgggattggcggagggaagcgggccaggccctgtgaggagtcaaggttctgagcagacaggccaaccggaggacaggattccctggaggccacagaggagcaccaaggagaagatctgcctgtgggtccccattgcccagcttttgcctgcactcttgcctgctgccctgaccagagtcatcatgtcttctgagcagaagagtcagcactgcaagcctgaggaaggcgttgaggcccaagaagaggccctgggcctggtgggtgcacaggctcctactactgaggagcaggaggctgctgtctcctcctcctctcctctggtccctggcaccctggaggaagtgcctgctgctgagtcagcaggtcctccccagagtcctcagggagcctctgccttacccactaccatcagcttcacttgctggaggcaacccaatgagggttccagcagccaagaagaggaggggccaagcacctcgcctgacgcagagtccttgttccgagaagcactcagtaacaaggtggatgagttggctcattttctgctccgcaagtatcgagccaaggagctggtcacaaaggcagaaatgctggagagagtcatcaaaaattacaagcgctgctttcctgtgatcttcggcaaagcctccgagtccctgaagatgatctttggcattgacgtgaaggaagtggaccccgccagcaacacctacacccttgtcacctgcctgggcctttcctatgatggcctgctgggtaataatcagatctttcccaagacaggccttctgataatcgtcctgggcacaattgcaatggagggcgacagcgcctctgaggaggaaatctgggaggagctgggtgtgatgggggtgtatgatgggagggagcacactgtctatgggg

SEQ ID NO: 152532 - DNA, 990 bp, Homo sapiens; identical to SEQ ID NO: 152531
  Payload ID: 10001
  Gene Symbol: MAGEA4
  Gene Name: melanoma antigen family A4
  ENST ID: ENST00000441865
  CDS Start-End: 267-990

SEQ ID NO: 152533 - DNA, 1740 bp, Homo sapiens
  Payload ID: 10002
  Gene Symbol: MAGEA6
  Gene Name: melanoma antigen family A6
  Uniprot ID: P43360
  ENST ID: ENST00000329342
  CDS Start-End: 226-1170
gaggtcagaagaccgcgagattctcgccctgagcaacgagcgacggcctgacgtcggcggagggaagccggcccaggctcggtgaggaggcaaggttctgaggggacaggctgacgtggaggaacagaggcccccggaggagcactgaaggagaagatctgccagtgggtctccattgcccagctcctgcccacactcccgcctgttgccctgaccagagtcatcatgcctcttgagcagaggagtcagcactgcaagcctgaagaaggccttgaggcccgaggagaggccctgggcctggtgggtgcgcaggctcctgctactgaggagcaggaggctgcctcctcctcttctactctagttgaagtcaccctgggggaggtgcctgctgccgagtcaccagatcctccccagagtcctcagggagcctccagcctccccactaccatgaactaccctctctggagccaatcctatgaggactccagcaaccaagaagaggaggggccaagcaccttccctgacctggagtctgagttccaagcagcactcagtaggaaggtggccaagttggttcattttctgctcctcaagtatcgagccagggagccggtcacaaaggcagaaatgctggggagtgtcgtcggaaattggcagtacttctttcctgtgatcttcagcaaagcttccgattccttgcagctggtctttggcatcgagctgatggaagtggaccccatcggccacgtgtacatctttgccacctgcctgggcctctcctacgatggcctgctgggtgacaatcagatcatgcccaagacaggcttcctgataatcatcctggccataatcgcaaaagagggcgactgtgcccctgaggagaaaatctgggaggagctgagtgtgttagaggtgtttgaggggagggaagacagtatcttcggggatcccaagaagctgctcacccaatatttcgtgcaggaaaactacctggagtaccggcaggtccccggcagtgatcctgcatgctatgagttcctgtggggtccaagggccctcattgaaaccagctatgtgaaagtcctgcaccatatggtaaagatcagtggaggacctcgcatttcctacccactcctgcatgagtgggctttgagagagggggaagagtgagtctgagcacgagttgcagccagggccagtgggagggggtttgggccagtgcaccttccggggccccatcccttagtttccactgcctcctgtgacgtgaggcccattcttcactctttgaagcgagcagtcagcattcttagtagtgggtttctgttctgttggatgactttgagattattctttgtttcctgttggagttgttcaaatgttccttttaacggatggttgaatgagcgtcagcatccaggtttatgaatgacagtagtcacacatagtgctgtttatatagtttaggagtaagagtcttgttttttattcagattgggaaatccattccattttgtgaattgtgacataataatagcagtggtaaaagtatttgcttaaaattgtgagcgaattagcaataacatacatgagataactcaagaaatcaaaagatagttgattcttgccttgtacctcaatctattctgtaaaattaaacaaatatgcaaaccaggatttccttgacttctttgagaatgcaagcgaaattaaatctgaataaataattcttcctcttca

SEQ ID NO: 152534 - DNA, 921 bp, Homo sapiens
  Payload ID: 10002
  Gene Symbol: MAGEA6
  Gene Name: melanoma antigen family A6
  ENST ID: ENST00000457643
  CDS Start-End: 215-921
gcccaggctcggtgaggaggcaagaatccgggctttgcccctggtatcaagtcacggaagctccgggaatggcggccaggcacgttctgaggggacaggctgacgtggaggaacagaggcccccggaggagcactgaaggagaagatctgccagtgggtctccattgcccagctcctgcccacactcccgcctgttgccctgaccagagtcatcatgcctcttgagcagaggagtcagcactgcaagcctgaagaaggccttgaggcccgaggagaggccctgggcctggtgggtgcgcaggctcctgctactgaggagcaggaggctgcctcctcctcttctactctagttgaagtcaccctgggggaggtgcctgctgccgagtcaccagatcctccccagagtcctcagggagcctccagcctccccactaccatgaactaccctctctggagccaatcctatgaggactccagcaaccaagaagaggaggggccaagcaccttccctgacctggagtctgagttccaagcagcactcagtaggaaggtggccaagttggttcattttctgctcctcaagtatcgagccagggagccggtcacaaaggcagaaatgctggggagtgtcgtcggaaattggcagtacttctttcctgtgatcttcagcaaagcttccgattccttgcagctggtctttggcatcgagctgatggaagtggaccccatcggccacgtgtacatctttgccacctgcctgggcctctcctacgatggcctgctgggtgacaatcagatcatgcccaagacaggcttcctgataatcatcctggccataatcgcaaaagagggcgactgtgcccctgaggagaaaatctgggaggagctgagtgtgttagaggtgtttgaggggagggaaga

SEQ ID NO: 152535 - DNA, 862 bp, Homo sapiens
  Payload ID: 10002
  Gene Symbol: MAGEA6
  Gene Name: melanoma antigen family A6
  ENST ID: ENST00000412733
  CDS Start-End: 259-862
agcaacgagcgacggcctgacgtcggcggagggaagccggcccaggctcggtgaggaggcaagtcctgcagcctcagcatgtgctggccggatgtaccctgaggtgccctctcacttcctccttcaggttctgaggggacaggctgacgtggaggaacagaggcccccggaggagcactgaaggagaagatctgccagtgggtctccattgcccagctcctgcccacactcccgcctgttgccctgaccagagtcatcatgcctcttgagcagaggagtcagcactgcaagcctgaagaaggccttgaggcccgaggagaggccctgggcctggtgggtgcgcaggctcctgctactgaggagcaggaggctgcctcctcctcttctactctagttgaagtcaccctgggggaggtgcctgctgccgagtcaccagatcctccccagagtcctcagggagcctccagcctccccactaccatgaactaccctctctggagccaatcctatgaggactccagcaaccaagaagaggaggggccaagcaccttccctgacctggagtctgagttccaagcagcactcagtaggaaggtggccaagttggttcattttctgctcctcaagtatcgagccagggagccggtcacaaaggcagaaatgctggggagtgtcgtcggaaattggcagtacttctttcctgtgatcttcagcaaagcttccgattccttgcagctggtctttggcatcgagctgatggaagtggaccccatcggccacgtgtacatctttgccacctgcctgggcctctcctacgatggcctgctgggtgacaatcagatcatgcccaagacaggcttcc

SEQ ID NO: 152536 - DNA, 1762 bp, Homo sapiens
  Payload ID: 10002
  Gene Symbol: MAGEA6
  Gene Name: melanoma antigen family A6
  Uniprot ID: P43360
  ENST ID: ENST00000616035
  CDS Start-End: 259-1203
agcaacgagcgacggcctgacgtcggcggagggaagccggcccaggctcggtgaggaggcaagtcctgcagcctcagcatgtgctggccggatgtaccctgaggtgccctctcacttcctccttcaggttctgaggggacaggctgacgtggaggaacagaggcccccggaggagcactgaaggagaagatctgccagtgggtctccattgcccagctcctgcccacactcccgcctgttgccctgaccagagtcatcatgcctcttgagcagaggagtcagcactgcaagcctgaagaaggccttgaggcccgaggagaggccctgggcctggtgggtgcgcaggctcctgctactgaggagcaggaggctgcctcctcctcttctactctagttgaagtcaccctgggggaggtgcctgctgccgagtcaccagatcctccccagagtcctcagggagcctccagcctccccactaccatgaactaccctctctggagccaatcctatgaggactccagcaaccaagaagaggaggggccaagcaccttccctgacctggagtctgagttccaagcagcactcagtaggaaggtggccaagttggttcattttctgctcctcaagtatcgagccagggagccggtcacaaaggcagaaatgctggggagtgtcgtcggaaattggcagtacttctttcctgtgatcttcagcaaagcttccgattccttgcagctggtctttggcatcgagctgatggaagtggaccccatcggccacgtgtacatctttgccacctgcctgggcctctcctacgatggcctgctgggtgacaatcagatcatgcccaagacaggcttcctgataatcatcctggccataatcgcaaaagagggcgactgtgcccctgaggagaaaatctgggaggagctgagtgtgttagaggtgtttgaggggagggaagacagtatcttcggggatcccaagaagctgctcacccaatatttcgtgcaggaaaactacctggagtaccggcaggtccccggcagtgatcctgcatgctatgagttcctgtggggtccaagggccctcattgaaaccagctatgtgaaagtcctgcaccatatggtaaagatcagtggaggacctcgcatttcctacccactcctgcatgagtgggctttgagagagggggaagagtgagtctgagcacgagttgcagccagggccagtgggagggggtttgggccagtgcaccttccggggccccatcccttagtttccactgcctcctgtgacgtgaggcccattcttcactctttgaagcgagcagtcagcattcttagtagtgggtttctgttctgttggatgactttgagattattctttgtttcctgttggagttgttcaaatgttccttttaacggatggttgaatgagcgtcagcatccaggtttatgaatgacagtagtcacacatagtgctgtttatatagtttaggagtaagagtcttgttttttattcagattgggaaatccattccattttgtgaattgtgacataataatagcagtggtaaaagtatttgcttaaaattgtgagcgaattagcaataacatacatgagataactcaagaaatcaaaagatagttgattcttgccttgtacctcaatctattctgtaaaattaaacaaatatgcaaaccaggatttccttgacttctttgagaatgcaagcgaaattaaatctgaataaataatt

SEQ ID NO: 152537 - DNA, 1778 bp, Homo sapiens
  Payload ID: 10003
  Gene Symbol: MAGEA8
  Gene Name: melanoma antigen family A8
  Uniprot ID: P43361
  ENST ID: ENST00000286482
  CDS Start-End: 217-1173
gcggggatcagagagaagcgagggcctggttctgaggggtcggcttgagatcggctgagggaagcgggctcagggtctgtgaggaggcaaggttcgcagagaacaggccagccaggaggtcaggaggccccagagaagcactgaagaagacctgcctgtgggtctcaattgcccagctccggcccacactctcctgctgccctgacctgagtcatcatgcttcttgggcagaagagtcagcgctacaaggctgaggaaggccttcaggcccaaggagaggcaccagggcttatggatgtgcagattcccacagctgaggagcagaaggctgcatcctcctcctctactctgatcatgggaacccttgaggaggtgactgattctgggtcaccaagtcctccccagagtcctgagggtgcctcctcttccctgactgtcaccgacagcactctgtggagccaatccgatgagggttccagcagcaatgaagaggaggggccaagcacctccccggacccagctcacctggagtccctgttccgggaagcacttgatgagaaagtggctgagttagttcgtttcctgctccgcaaatatcaaattaaggagccggtcacaaaggcagaaatgcttgagagtgtcatcaaaaattacaagaaccactttcctgatatcttcagcaaagcctctgagtgcatgcaggtgatctttggcattgatgtgaaggaagtggaccctgccggccactcctacatccttgtcacctgcctgggcctctcctatgatggcctgctgggtgatgatcagagtacgcccaagaccggcctcctgataatcgtcctgggcatgatcttaatggagggcagccgcgccccggaggaggcaatctgggaagcgttgagtgtgatggggctgtatgatgggagggagcacagtgtctattggaagctcaggaagctgctcacccaagagtgggtgcaggagaactacctggagtaccgccaggcgcccggcagtgatcctgtgcgctacgagttcctgtggggtccaagggcccttgctgaaaccagctatgtgaaagtcctggagcatgtggtcagggtcaatgcaagagttcgcatttcctacccatccctgcatgaagaggctttgggagaggagaaaggagtttgagcaggagttgcagctagggccagtggggcaggttgtgggagggcctgggccagtgcacgttccagggccacatccaccactttccctgctctgttacatgaggcccattcttcactctgtgtttgaagagagcagtcacagttctcagtagtggggagcatgttgggtgtgagggaacacagtgtggaccatctctcagttcctgttctattgggcgatttggaggtttatctttgtttccttttggaattgttccaatgttccttctaatggatggtgtaatgaacttcaacattcattttatgtatgacagtagacagacttactgctttttatatagtttaggagtaagagtcttgcttttcatttatactgggaaacccatgttatttcttgaattcagacactacaagagcagaggattaaggtttttttagaaatgtgaaacaacatagcagtaaaatacatgagataaagacataaagaaattaaacaatagttaattcttgccttacctgtacctcttagtgtaccctatgtacctgaatttgcttggcttctttgagaatgaaattgaattaaatatgaataaataagtccccctg

SEQ ID NO: 152538 - DNA, 2112 bp, Homo sapiens
  Payload ID: 10003
  Gene Symbol: MAGEA8
  Gene Name: melanoma antigen family A8
  Uniprot ID: P43361
  ENST ID: ENST00000535454
  CDS Start-End: 550-1506
gttgtccacccaggtgagccctgggtggacggatgtgacgccactgacgtggccgcggggatcagagagaagcgagggcctggttctgaggggtcggcttgagatcggctgagggaagcgggctcagggtctgtgaggaggcaagcaggcaaaaaacagatgggggcccaacagaaatctgcccggcctcttttgtcacccctgagagcatgagcaggactatcagctgaggcccctgtgttataccagactcattggtctcagggagaagaaggccttggtctgagggcactgcattcaggtcagcagagcgggggtccaaggccctgccaggagtcagggactcagaggacaccactcaccaaacacacaggaccgaaccccaccctgcaccttctgtcagccatgggaagtgcagggaaaggttcgcagagaacaggccagccaggaggtcaggaggccccagagaagcactgaagaagacctgcctgtgggtctcaattgcccagctccggcccacactctcctgctgccctgacctgagtcatcatgcttcttgggcagaagagtcagcgctacaaggctgaggaaggccttcaggcccaaggagaggcaccagggcttatggatgtgcagattcccacagctgaggagcagaaggctgcatcctcctcctctactctgatcatgggaacccttgaggaggtgactgattctgggtcaccaagtcctccccagagtcctgagggtgcctcctcttccctgactgtcaccgacagcactctgtggagccaatccgatgagggttccagcagcaatgaagaggaggggccaagcacctccccggacccagctcacctggagtccctgttccgggaagcacttgatgagaaagtggctgagttagttcgtttcctgctccgcaaatatcaaattaaggagccggtcacaaaggcagaaatgcttgagagtgtcatcaaaaattacaagaaccactttcctgatatcttcagcaaagcctctgagtgcatgcaggtgatctttggcattgatgtgaaggaagtggaccctgccggccactcctacatccttgtcacctgcctgggcctctcctatgatggcctgctgggtgatgatcagagtacgcccaagaccggcctcctgataatcgtcctgggcatgatcttaatggagggcagccgcgccccggaggaggcaatctgggaagcgttgagtgtgatggggctgtatgatgggagggagcacagtgtctattggaagctcaggaagctgctcacccaagagtgggtgcaggagaactacctggagtaccgccaggcgcccggcagtgatcctgtgcgctacgagttcctgtggggtccaagggcccttgctgaaaccagctatgtgaaagtcctggagcatgtggtcagggtcaatgcaagagttcgcatttcctacccatccctgcatgaagaggctttgggagaggagaaaggagtttgagcaggagttgcagctagggccagtggggcaggttgtgggagggcctgggccagtgcacgttccagggccacatccaccactttccctgctctgttacatgaggcccattcttcactctgtgtttgaagagagcagtcacagttctcagtagtggggagcatgttgggtgtgagggaacacagtgtggaccatctctcagttcctgttctattgggcgatttggaggtttatctttgtttccttttggaattgttccaatgttccttctaatggatggtgtaatgaacttcaacattcattttatgtatgacagtagacagacttactgctttttatatagtttaggagtaagagtcttgcttttcatttatactgggaaacccatgttatttcttgaattcagacactacaagagcagaggattaaggtttttttagaaatgtgaaacaacatagcagtaaaatacatgagataaagacataaagaaattaaacaatagttaattcttgccttacctgtacctcttagtgtaccctatgtacctgaatttgcttggcttctttgagaatgaaattgaattaaatatgaataaataagtccccctgc

SEQ ID NO: 152539 - DNA, 2084 bp, Homo sapiens
  Payload ID: 10003
  Gene Symbol: MAGEA8
  Gene Name: melanoma antigen family A8
  Uniprot ID: P43361
  ENST ID: ENST00000542674
  CDS Start-End: 522-1478
gttgtccacccaggtgagccctgggtggacggatgtgacgccactgacgtggccgcggggatcagagagaagcgagggcctggttctgaggggtcggcttgagatcggctgagggaagcgggctcagggtctgtgaggaggcaaggagctccaggaaccaggctgtgaggtcttggtctgaggcagtatcttcaatcacagagcataagaggcccaggcagtagtagcagtcaagctgaggtggtgtttcccctgtatgtataccagaggcccctctggcatcagaacagcaggaaccccacagttcctggccctaccagcccttttgtcagtcctggagccttggcctttgccaggaggctgcaccctgagatgccctctcaatttctccttcaggttcgcagagaacaggccagccaggaggtcaggaggccccagagaagcactgaagaagacctgcctgtgggtctcaattgcccagctccggcccacactctcctgctgccctgacctgagtcatcatgcttcttgggcagaagagtcagcgctacaaggctgaggaaggccttcaggcccaaggagaggcaccagggcttatggatgtgcagattcccacagctgaggagcagaaggctgcatcctcctcctctactctgatcatgggaacccttgaggaggtgactgattctgggtcaccaagtcctccccagagtcctgagggtgcctcctcttccctgactgtcaccgacagcactctgtggagccaatccgatgagggttccagcagcaatgaagaggaggggccaagcacctccccggacccagctcacctggagtccctgttccgggaagcacttgatgagaaagtggctgagttagttcgtttcctgctccgcaaatatcaaattaaggagccggtcacaaaggcagaaatgcttgagagtgtcatcaaaaattacaagaaccactttcctgatatcttcagcaaagcctctgagtgcatgcaggtgatctttggcattgatgtgaaggaagtggaccctgccggccactcctacatccttgtcacctgcctgggcctctcctatgatggcctgctgggtgatgatcagagtacgcccaagaccggcctcctgataatcgtcctgggcatgatcttaatggagggcagccgcgccccggaggaggcaatctgggaagcgttgagtgtgatggggctgtatgatgggagggagcacagtgtctattggaagctcaggaagctgctcacccaagagtgggtgcaggagaactacctggagtaccgccaggcgcccggcagtgatcctgtgcgctacgagttcctgtggggtccaagggcccttgctgaaaccagctatgtgaaagtcctggagcatgtggtcagggtcaatgcaagagttcgcatttcctacccatccctgcatgaagaggctttgggagaggagaaaggagtttgagcaggagttgcagctagggccagtggggcaggttgtgggagggcctgggccagtgcacgttccagggccacatccaccactttccctgctctgttacatgaggcccattcttcactctgtgtttgaagagagcagtcacagttctcagtagtggggagcatgttgggtgtgagggaacacagtgtggaccatctctcagttcctgttctattgggcgatttggaggtttatctttgtttccttttggaattgttccaatgttccttctaatggatggtgtaatgaacttcaacattcattttatgtatgacagtagacagacttactgctttttatatagtttaggagtaagagtcttgcttttcatttatactgggaaacccatgttatttcttgaattcagacactacaagagcagaggattaaggtttttttagaaatgtgaaacaacatagcagtaaaatacatgagataaagacataaagaaattaaacaatagttaattcttgccttacctgtacctcttagtgtaccctatgtacctgaatttgcttggcttctttgagaatgaaattgaattaaatatgaataaataagtccccctgc

SEQ ID NO: 152540 - DNA, 1814 bp, Homo sapiens
  Payload ID: 10004
  Gene Symbol: MAGEA9
  Gene Name: melanoma antigen family A9
  Uniprot ID: P43362
  ENST ID: ENST00000243314
  CDS Start-End: 288-1235
gtgcgcactgggggtcagagagaagggagaggcctccttctgaggggcggcttgataccggtggaggagctccaggaagcaggcaggccttggtctgagacagtgtcctcaggtcgcagagcagaggagacccaggcagtgtcagcagtgaaggttctcgggacaggctaaccaggaggacaggagccccaagaggccccagagcagcactgacgaagacctgcctgtgggtctccatcgcccagctcctgcccacgctcctgactgctgccctgaccagagtcatcatgtctctcgagcagaggagtccgcactgcaagcctgatgaagaccttgaagcccaaggagaggacttgggcctgatgggtgcacaggaacccacaggcgaggaggaggagactacctcctcctctgacagcaaggaggaggaggtgtctgctgctgggtcatcaagtcctccccagagtcctcagggaggcgcttcctcctccatttccgtctactacactttatggagccaattcgatgagggctccagcagtcaagaagaggaagagccaagctcctcggtcgacccagctcagctggagttcatgttccaagaagcactgaaattgaaggtggctgagttggttcatttcctgctccacaaatatcgagtcaaggagccggtcacaaaggcagaaatgctggagagcgtcatcaaaaattacaagcgctactttcctgtgatcttcggcaaagcctccgagttcatgcaggtgatctttggcactgatgtgaaggaggtggaccccgccggccactcctacatccttgtcactgctcttggcctctcgtgcgatagcatgctgggtgatggtcatagcatgcccaaggccgccctcctgatcattgtcctgggtgtgatcctaaccaaagacaactgcgcccctgaagaggttatctgggaagcgttgagtgtgatgggggtgtatgttgggaaggagcacatgttctacggggagcccaggaagctgctcacccaagattgggtgcaggaaaactacctggagtaccggcaggtgcccggcagtgatcctgcgcactacgagttcctgtggggttccaaggcccacgctgaaaccagctatgagaaggtcataaattatttggtcatgctcaatgcaagagagcccatctgctacccatccctttatgaagaggttttgggagaggagcaagagggagtctgagcaccagccgcagccggggccaaagtttgtggggtcagggccccatccagcagctgccctgccccatgtgacatgaggcccattcttcgctctgtgtttgaagagagcaatcagtgttctcagtggcagtgggtggaagtgagcacactgtatgtcatctctgggttccttgtctattgggtgatttggagatttatccttgctcccttttggaattgttcaaatgttcttttaatggtcagtttaatgaacttcaccatcgaagttaatgaatgacagtagtcacacatattgctgtttatgttatttaggagtaagattcttgcttttgagtcacatggggaaatccctgttattttgtgaattgggacaagataacatagcagaggaattaataatttttttgaaacttgaacttagcagcaaaatagagctcataaagaaatagtgaaatgaaaatgtagttaattcttgccttatacctctttctctctcctgtaaaattaaaacatatacatgtatacctggatttgcttggcttctttgagcatgtaagagaaataaaaattgaaagaataa

SEQ ID NO: 152541 - DNA, 536 bp, Homo sapiens
  Payload ID: 10005
  Gene Symbol: MAGEA9B
  Gene Name: melanoma antigen family A9B
  ENST ID: ENST00000602102
  CDS Start-End: 195-536
actgggggtcagagagaagggagaggcctccttctgaggggcggcttgataccggtggaggttctcgggacaggctaaccaggaggacaggagccccaagaggccccagagcagcactgacgaagacctgcctgtgggtctccatcgcccagctcctgcccacgctcctgactgctgccctgaccagagtcatcatgtctctcgagcagaggagtccgcactgcaagcctgatgaagaccttgaagcccaaggagaggacttgggcctgatgggtgcacaggaacccacaggcgaggaggaggagactacctcctcctctgacagcaaggaggaggaggtgtctgctgctgggtcatcaagtcctccccagagtcctcagggaggcgcttcctcctccatttccgtctactacactttatggagccaattcgatgagggctccagcagtcaagaagaggaagagccaagctcctcggtcgacccagctcagctggagttcatgttccaagaagcactgaaattgaaggtggctgag

SEQ ID NO: 152542 - DNA, 594 bp, Homo sapiens
  Payload ID: 10005
  Gene Symbol: MAGEA9B
  Gene Name: melanoma antigen family A9B
  ENST ID: ENST00000594744
  CDS Start-End: 303-594
agagagtagcgggggcctcgctgtgaggggcgggtcgatatcggtggagggaagcgggcccaggctctgtgaggaggcaaggagctccaggaagcaggcaggccttggtctgagacagtgtcctcaggtcgcagagcagaggagacccaggcagtgtcagcagtgaaggttctcgggacaggctaaccaggaggacaggagccccaagaggccccagagcagcactgacgaagacctgcctgtgggtctccatcgcccagctcctgcccacgctcctgactgctgccctgaccagagtcatcatgtctctcgagcagaggagtccgcactgcaagcctgatgaagaccttgaagcccaaggagaggacttgggcctgatgggtgcacaggaacccacaggcgaggaggaggagactacctcctcctctgacagcaaggaggaggaggtgtctgctgctgggtcatcaagtcctccccagagtcctcagggaggcgcttcctcctccatttccgtctactacactttatggagccaattcgatgagggctccagcagtcaagaagaggaagagccaagctcctcggtcgacccag

SEQ ID NO: 152543 - DNA, 1807 bp, Homo sapiens
  Payload ID: 10005
  Gene Symbol: MAGEA9B
  Gene Name: melanoma antigen family A9B
  Uniprot ID: P43362
  ENST ID: ENST00000595065
  CDS Start-End: 281-1228
ctgggggtcagagagaagggagaggcctccttctgaggggcggcttgataccggtggaggagctccaggaagcaggcaggccttggtctgagacagtgtcctcaggtcgcagagcagaggagacccaggcagtgtcagcagtgaaggttctcgggacaggctaaccaggaggacaggagccccaagaggccccagagcagcactgacgaagacctgcctgtgggtctccatcgcccagctcctgcccacgctcctgactgctgccctgaccagagtcatcatgtctctcgagcagaggagtccgcactgcaagcctgatgaagaccttgaagcccaaggagaggacttgggcctgatgggtgcacaggaacccacaggcgaggaggaggagactacctcctcctctgacagcaaggaggaggaggtgtctgctgctgggtcatcaagtcctccccagagtcctcagggaggcgcttcctcctccatttccgtctactacactttatggagccaattcgatgagggctccagcagtcaagaagaggaagagccaagctcctcggtcgacccagctcagctggagttcatgttccaagaagcactgaaattgaaggtggctgagttggttcatttcctgctccacaaatatcgagtcaaggagccggtcacaaaggcagaaatgctggagagcgtcatcaaaaattacaagcgctactttcctgtgatcttcggcaaagcctccgagttcatgcaggtgatctttggcactgatgtgaaggaggtggaccccgccggccactcctacatccttgtcactgctcttggcctctcgtgcgatagcatgctgggtgatggtcatagcatgcccaaggccgccctcctgatcattgtcctgggtgtgatcctaaccaaagacaactgcgcccctgaagaggttatctgggaagcgttgagtgtgatgggggtgtatgttgggaaggagcacatgttctacggggagcccaggaagctgctcacccaagattgggtgcaggaaaactacctggagtaccggcaggtgcccggcagtgatcctgcgcactacgagttcctgtggggttccaaggcccacgctgaaaccagctatgagaaggtcataaattatttggtcatgctcaatgcaagagagcccatctgctacccatccctttatgaagaggttttgggagaggagcaagagggagtctgagcaccagccgcagccggggccaaagtttgtggggtcagggccccatccagcagctgccctgccccatgtgacatgaggcccattcttggctctgtgtttgaagagagcaatcagtgttctcagtggcagtgggtggaagtgagcacactgtatgtcatctctgggttccttgtctattgggtgatttggagatttatccttgctcccttttggaattgttcaaatgttcttttaatggtcagtttaatgaacttcaccatcgaagttaatgaatgacagtagtcacacatattgctgtttatgttatttaggagtaagattcttgcttttgagtcacatggggaaatccctgttattttgtgaattgggacaagataacatagcagaggaattaataatttttttgaaacttgaacttagcagcaaaatagagctcataaagaaatagtgaaatgaaaatgtagttaattcttgccttatacctctttctctctcctgtaaaattaaaatatatacatgtatacctggatttgcttggcttctttgagcatgtaagagaaataaaaattgaaagaataa

SEQ ID NO: 152544 - DNA, 891 bp, Homo sapiens
  Payload ID: 10005
  Gene Symbol: MAGEA9B
  Gene Name: melanoma antigen family A9B
  ENST ID: ENST00000593349
  CDS Start-End: 305-891
cagagagaagggagaggcctccttctgaggggcggcttgataccggtggaggtaagctggccgaggctctgtgaggagtcaaggagctccaggaagcaggcaggccttggtctgagacagtgtcctcaggtcgcagagcagaggagacccaggcagtgtcagcagtgaaggttctcgggacaggctaaccaggaggacaggagccccaagaggccccagagcagcactgacgaagacctgcctgtgggtctccatcgcccagctcctgcccacgctcctgactgctgccctgaccagagtcatcatgtctctcgagcagaggagtccgcactgcaagcctgatgaagaccttgaagcccaaggagaggacttgggcctgatgggtgcacaggaacccacaggcgaggaggaggagactacctcctcctctgacagcaaggaggaggaggtgtctgctgctgggtcatcaagtcctccccagagtcctcagggaggcgcttcctcctccatttccgtctactacactttatggagccaattcgatgagggctccagcagtcaagaagaggaagagccaagctcctcggtcgacccagctcagctggagttcatgttccaagaagcactgaaattgaaggtggctgagttggttcatttcctgctccacaaatatcgagtcaaggagccggtcacaaaggcagaaatgctggagagcgtcatcaaaaattacaagcgctactttcctgtgatcttcggcaaagcctccgagttcatgcaggtgatctttggcactgatgtgaaggaggtggaccccgccggccactcctacatccttgtcactgctcttggcctctcgtgcgatagcatgctgggtgatggtcatagcatgcc

SEQ ID NO: 152545 - DNA, 1866 bp, Homo sapiens
  Payload ID: 10006
  Gene Symbol: MAGEB1
  Gene Name: melanoma antigen family B1
  Uniprot ID: P43366
  ENST ID: ENST00000378981
  CDS Start-End: 322-1365
cagtgttgcaactgggcctggcatgtttcagtgtggtgtccagcagtgtctcccactccttgtgaagtctgaggttgcaaaaggactgtgatcatatgaagatcatccaggagtacaactcgaaattctcagaaaacaggaccttgatgtgagaggagcaggttcaggtaaacaaagggcgaggacccgagcgagcttaaggagtggggtgcagcgtctggtcagcggagggtgaattctcaggactggtcgggagtcaaggtgccacatctcctgcctttctgctcactttcctgcctgttttgcctgaccacagccatcatgcctcggggtcagaagagtaagctccgtgctcgtgagaaacgccgcaaggcgcgagaggagacccagggtctcaaggttgctcacgccactgcagcagagaaagaggagtgcccctcctcctctcctgttttaggggatactcccacaagctcccctgctgctggcattccccagaagcctcagggagctccacccaccaccactgctgctgcagctgtgtcatgtaccgaatctgacgaaggtgccaaatgccaaggtgaggaaaatgcaagtttctcccaggccacaacatccactgagagctcagtcaaagatcctgtagcctgggaggcaggaatgctgatgcacttcattctacgtaagtataaaatgagagagcccattatgaaggcagatatgctgaaggttgttgatgaaaagtacaaggatcacttcactgagatcctcaatggagcctctcgccgcttggagctcgtctttggccttgatttgaaggaagacaaccctagtggccacacctacaccctcgtcagtaagctaaacctcaccaatgatggaaacctgagcaatgattgggactttcccaggaatgggcttctgatgcctctcctgggtgtgatcttcttaaagggcaactctgccaccgaggaagagatctggaaattcatgaatgtgttgggagcctatgatggagaggagcacttaatctatggggaaccccgtaagttcatcacccaagatctggtgcaggaaaaatatctgaagtacgagcaggtgcccaacagtgatcccccacgctatcaattcctatggggtccgagagcctatgctgaaaccaccaagatgaaagtcctcgagtttttggccaagatgaatggtgccactccccgtgacttcccatcccattatgaagaggctttgagagatgaggaagagagagcccaagtccgatccagtgttagagccaggcgtcgcactactgccacgacttttagagcgcgttctagagccccattcagcaggtcctcccaccccatgtgagaactcaggcagattgttcactttgtttttgtggcaagatgccaaccttttgaagtagtgagcagccaagatatggctagagagatcatcatatatatctcctttgtgttcctgttaaacattagtatctttcaagtgtttttcttttaatagaatgtttatttagagttgggatctatgtctatgagcgacatggatcacacatttattggtgctgccagctttaagcatatgagttttgatattctatatttttcaaatccttgaatcttttttgggttgaagaagaagaaagcatagctttagaatagagattttctcagaaatgtgtgaaagaacctcacacaacataattggagtcttaaaatagaggaagagtaagcaaagcatgtcaagtttttgttttctgcattcagttttgtttttgtaaaatccaaagatacatacctggttgtttttagccttttcaagaatgcagataaaataaatagtaataaatta

SEQ ID NO: 152546 - DNA, 1708 bp, Homo sapiens
  Payload ID: 10006
  Gene Symbol: MAGEB1
  Gene Name: melanoma antigen family B1
  Uniprot ID: P43366
  ENST ID: ENST00000397548
  CDS Start-End: 164-1207
ttccgctttgaaggcgaggaccccagcgagcgtaagggcgcagtgtccgcctggcggatttgggtcagcaggcggaagtcgtcccaggctgctagatactaaggtgccacatctcctgcctttctgctcactttcctgcctgttttgcctgaccacagccatcatgcctcggggtcagaagagtaagctccgtgctcgtgagaaacgccgcaaggcgcgagaggagacccagggtctcaaggttgctcacgccactgcagcagagaaagaggagtgcccctcctcctctcctgttttaggggatactcccacaagctcccctgctgctggcattccccagaagcctcagggagctccacccaccaccactgctgctgcagctgtgtcatgtaccgaatctgacgaaggtgccaaatgccaaggtgaggaaaatgcaagtttctcccaggccacaacatccactgagagctcagtcaaagatcctgtagcctgggaggcaggaatgctgatgcacttcattctacgtaagtataaaatgagagagcccattatgaaggcagatatgctgaaggttgttgatgaaaagtacaaggatcacttcactgagatcctcaatggagcctctcgccgcttggagctcgtctttggccttgatttgaaggaagacaaccctagtggccacacctacaccctcgtcagtaagctaaacctcaccaatgatggaaacctgagcaatgattgggactttcccaggaatgggcttctgatgcctctcctgggtgtgatcttcttaaagggcaactctgccaccgaggaagagatctggaaattcatgaatgtgttgggagcctatgatggagaggagcacttaatctatggggaaccccgtaagttcatcacccaagatctggtgcaggaaaaatatctgaagtacgagcaggtgcccaacagtgatcccccacgctatcaattcctatggggtccgagagcctatgctgaaaccaccaagatgaaagtcctcgagtttttggccaagatgaatggtgccactccccgtgacttcccatcccattatgaagaggctttgagagatgaggaagagagagcccaagtccgatccagtgttagagccaggcgtcgcactactgccacgacttttagagcgcgttctagagccccattcagcaggtcctcccaccccatgtgagaactcaggcagattgttcactttgtttttgtggcaagatgccaaccttttgaagtagtgagcagccaagatatggctagagagatcatcatatatatctcctttgtgttcctgttaaacattagtatctttcaagtgtttttcttttaatagaatgtttatttagagttgggatctatgtctatgagcgacatggatcacacatttattggtgctgccagctttaagcatatgagttttgatattctatatttttcaaatccttgaatcttttttgggttgaagaagaagaaagcatagctttagaatagagattttctcagaaatgtgtgaaagaacctcacacaacataattggagtcttaaaatagaggaagagtaagcaaagcatgtcaagtttttgttttctgcattcagttttgtttttgtaaaatccaaagatacatacctggttgtttttagccttttcaagaatgcagataaaataaatagtaataaatta

SEQ ID NO: 152547 - DNA, 1782 bp, Homo sapiens
  Payload ID: 10006
  Gene Symbol: MAGEB1
  Gene Name: melanoma antigen family B1
  Uniprot ID: P43366
  ENST ID: ENST00000397550
  CDS Start-End: 238-1281
agtgttgcaactgggcctggcatgtttcagtgtggtgtccagcagtgtctcccactccttgtgaagtctgaggttgcaaaaggactgtgatcatatgaagatcatccaggagtacaactcgaaattctcagaaaacaggaccttgatgtgagaggagcaggttcaggtaaacaaagggtgccacatctcctgcctttctgctcactttcctgcctgttttgcctgaccacagccatcatgcctcggggtcagaagagtaagctccgtgctcgtgagaaacgccgcaaggcgcgagaggagacccagggtctcaaggttgctcacgccactgcagcagagaaagaggagtgcccctcctcctctcctgttttaggggatactcccacaagctcccctgctgctggcattccccagaagcctcagggagctccacccaccaccactgctgctgcagctgtgtcatgtaccgaatctgacgaaggtgccaaatgccaaggtgaggaaaatgcaagtttctcccaggccacaacatccactgagagctcagtcaaagatcctgtagcctgggaggcaggaatgctgatgcacttcattctacgtaagtataaaatgagagagcccattatgaaggcagatatgctgaaggttgttgatgaaaagtacaaggatcacttcactgagatcctcaatggagcctctcgccgcttggagctcgtctttggccttgatttgaaggaagacaaccctagtggccacacctacaccctcgtcagtaagctaaacctcaccaatgatggaaacctgagcaatgattgggactttcccaggaatgggcttctgatgcctctcctgggtgtgatcttcttaaagggcaactctgccaccgaggaagagatctggaaattcatgaatgtgttgggagcctatgatggagaggagcacttaatctatggggaaccccgtaagttcatcacccaagatctggtgcaggaaaaatatctgaagtacgagcaggtgcccaacagtgatcccccacgctatcaattcctatggggtccgagagcctatgctgaaaccaccaagatgaaagtcctcgagtttttggccaagatgaatggtgccactccccgtgacttcccatcccattatgaagaggctttgagagatgaggaagagagagcccaagtccgatccagtgttagagccaggcgtcgcactactgccacgacttttagagcgcgttctagagccccattcagcaggtcctcccaccccatgtgagaactcaggcagattgttcactttgtttttgtggcaagatgccaaccttttgaagtagtgagcagccaagatatggctagagagatcatcatatatatctcctttgtgttcctgttaaacattagtatctttcaagtgtttttcttttaatagaatgtttatttagagttgggatctatgtctatgagcgacatggatcacacatttattggtgctgccagctttaagcatatgagttttgatattctatatttttcaaatccttgaatcttttttgggttgaagaagaagaaagcatagctttagaatagagattttctcagaaatgtgtgaaagaacctcacacaacataattggagtcttaaaatagaggaagagtaagcaaagcatgtcaagtttttgttttctgcattcagttttgtttttgtaaaatccaaagatacatacctggttgtttttagccttttcaagaatgcagataaaataaatagtaataaatta

SEQ ID NO: 152548 - DNA, 1953 bp, Homo sapiens
  Payload ID: 10007
  Gene Symbol: MAGEB10
  Gene Name: melanoma antigen family B10
  Uniprot ID: Q96LZ2
  ENST ID: ENST00000356790
  CDS Start-End: 246-1289
gattggtatctggtcagcagagaaaggcatccaggccccgccaggagagacggtgcctcgctctgttgcccagactggagtgcagtggtgtgatcataactcagtatagcctagaactcctgagctcaagcaatcctcccacctcagcctttcaagcagctaggagtacagttgggagccactgtacctggttactgtcacgggatcacctgcctttttggctgctgcacctgaacagagtcatcatgcctcgaggtcagaagagtaaactccgtgccagggaaaaacgccgtcaggcccgaggagggctggaagatttgatagatgctctggacattttagaagaggaggaagaatctcccccctctgcctctgcttgtttgaaggatgttttccagagttcacttgatggggcatccaacaatccccatggacttcgggaagcccaatccaccagcacatctgctacagctgcttcacacacaagacatcccgaaggagtcaacgaccaaatggaagaaaggccaatatgcacacaagatctagaagccactgatagctttcccagaggccctgtagatgagaaagtaattatattggtgcattacttgctgtacaagtaccaaatgaaagagcccattacaaaggcagatatgctgagaaatgtaacccaaatgtccaagagccagttccctgtaatcctgagcagagcttctgagcacctggagctgatctttggtcttgacctgaaggaagtggagcctaataagcacatctatgtccttgtcaacaaactagatctaggctgtgatgcaaagctgagtgatgaaacaggcgtgcccaagactggcctgctgatgactgtcctgggtattatcttcacaaatggcaattgtgtcgctgaggaggaagtctggaaagtgtttaacacgatggggttatatgacggaattgagcacttcatgtttggggagcccaggaagctccttaccaaagatttggtgaaagaaaattacctggagtaccagcaagtgcccaacagtgatcctccacgctatcaattcctatggggcccaagagcccatgctgaaaccagcaagatgaaagttcttgagtttttggccaaggtaaatgatacagctcccagtgaattctcaaactggtatacagaggctttacaagatgaggaagagagagccagagccagagttgcagccaaggctcgcgttagtgccacagccggtgcacgttccaaggttaagtccagcaagtcctcccaactgcagtaaagtctgagggagattcttcatttgtgtttgaaaagaaatgcacattctgagctgtgggaggtcagggtgggactggagacaacacagtgaataatatgtttgtgttaatgttctatgtgatggcttggaatttttgaagatgttgttcctttaatagatggttaaagtagcttcactatctaagtttatgaatgacattgctcaaatttttctgtatgtgagattaagagtaagcgatttattgctttataagtctaattgggaaactctccatttatttagtgatcgaaacacgatagcatggtagtaaattaggcatttcctaattcaatgtgaaataatttaggagtgtaataaatgggatcaagaaatagagcaaagagggtcgggtgcggtggctcacacctgtaatcctagcactttgggaggccgaggcaggcggatcatgaggtcaggagatcaagaccatcttggctaacacagtgaaaccccgtctctactaaaaatacaaaaaattagccaggcgtggtggcgggttcctgtagtcctagctgctcaggaggctgaggcaggagaatggcgtaaacccgggaggcggagcttgcagtgagccaagatcacacgactgcattctagcctgggtgacagagcgagactctgtctc

SEQ ID NO: 152549 - DNA, 1389 bp, Homo sapiens
  Payload ID: 10007
  Gene Symbol: MAGEB10
  Gene Name: melanoma antigen family B10
  Uniprot ID: Q96LZ2
  ENST ID: ENST00000614159
  CDS Start-End: 50-1093
gtcacgggatcacctgcctttttggctgctgcacctgaacagagtcatcatgcctcgaggtcagaagagtaaactccgtgccagggaaaaacgccgtcaggcccgaggagggctggaagatttgatagatgctctggacattttagaagaggaggaagaatctcccccctctgcctctgcttgtttgaaggatgttttccagagttcacttgatggggcatccaacaatccccatggacttcgggaagcccaatccaccagcacatctgctacagctgcttcacacacaagacatcccgaaggagtcaacgaccaaatggaagaaaggccaatatgcacacaagatctagaagccactgatagctttcccagaggccctgtagatgagaaagtaattatattggtgcattacttgctgtacaagtaccaaatgaaagagcccattacaaaggcagatatgctgagaaatgtaacccaaatgtccaagagccagttccctgtaatcctgagcagagcttctgagcacctggagctgatctttggtcttgacctgaaggaagtggagcctaataagcacatctatgtccttgtcaacaaactagatctaggctgtgatgcaaagctgagtgatgaaacaggcgtgcccaagactggcctgctgatgactgtcctgggtattatcttcacaaatggcaattgtgtcgctgaggaggaagtctggaaagtgtttaacacgatggggttatatgacggaattgagcacttcatgtttggggagcccaggaagctccttaccaaagatttggtgaaagaaaattacctggagtaccagcaagtgcccaacagtgatcctccacgctatcaattcctatggggcccaagagcccatgctgaaaccagcaagatgaaagttcttgagtttttggccaaggtaaatgatacagctcccagtgaattctcaaactggtatacagaggctttacaagatgaggaagagagagccagagccagagttgcagccaaggctcgcgttagtgccacagccggtgcacgttccaaggttaagtccagcaagtcctcccaactgcagtaaagtctgagggagattcttcatttgtgtttgaaaagaaatgcacattctgagctgtgggaggtcagggtgggactggagacaacacagtgaataatatgtttgtgttaatgttctatgtgatggcttggaatttttgaagatgttgttcctttaatagatggttaaagtagcttcactatctaagtttatgaatgacattgctcaaatttttctgtatgtgagattaagagtaagcgatttattgctttataagtctaattgggaaactctccatttatttagtgatcgaaacacga

SEQ ID NO: 152550 - DNA, 1667 bp, Homo sapiens
  Payload ID: 10008
  Gene Symbol: MAGEB16
  Gene Name: melanoma antigen family B16
  Uniprot ID: A2A368
  ENST ID: ENST00000399985
  CDS Start-End: 129-1103
agtctgatataggcagtgtcgtgtcggcagaggaaggcatctcaggccctgcaggagtccaggcagtgattcttcattgcctgccctcctgtccacactcctgcctactgccacccacaagggtcatcatgtctcaggatcaggagagtccacgatgcacacatgatcagcaccttcagaccttcagtgagacccagagcctggaggttgcacaggtctccaaggctctggagaagaccctcctctcctcctcccatcctctagtgcctggcaaactgaaggaagctcctgctgctaaggcagagagtcctcttgaggttcctcagagtttctgctcctcttccattgccgtcacaaccacctcatcaagtgaatctgatgaggcttccagcaatcaagaagaggaagatagtccaagctcctcagaggatacatcagaccccaggaatgtgcccgcagatgctctcgaccagaaagtggcttttttggtgaatttcatgctgcacaagtgtcagatgaaaaagccaataacaaaggcagatatgttgaagattatcatcaaagatgatgagagccacttctctgagatcctcctgagagcttctgagcacctagagatgatatttggccttgatgtggtggaggtggaccccaccacccattgctatggcctcttcatcaaactgggcctcacctatgatgggatgctgagtggtgaaaagggtgtgcccaagactggcctcctgataattgtcctgggtgtgatcttcatgaagggcaaccgtgccactgaagaggaagtctgggaagtgctgaatttgacgggagtatattctgggaagaagcacttcatctttggagagcccagaatgctcatcaccaaagattttgtgaaggagaagtacctggagtaccagcaggtggccaacagtgatcctgcacgatatgaattcctgtggggcccaagagccaaagctgaaaccagcaagatgaaagtcctggagtttgtggccaaagttcatgggtcttacccacattctttcccatctcagtatgcggaagctctgaaagaggaagaagagagagctagagccagaatttgagtcagggctgactccatttccacagccactgtgagttccagtgctatgtctggtagcttctcccatacctagtgaagacaaggatagatgttttatgtaacatttgcagaaggcagttagtgttcaaggatgcaggtccagggtggggctggaggaaaaatagtatatatcatctatatccctattttgtatgtgtaacttgacagtttattcttttattttttaatggctatattattcagatgatgtttcttttaatagaagtttaggtagtttccagatctcttaagttttgaataatattggtcatccatttaatgtttttcatgaggtttagtggcatatgttttgctgattttgtaaaacagattgggaaaccatctatattgtgttctgatataggatgacatgacattactaagaactctgcttttaaatatccgtttaatgttttgcatgcagtttagtagcaaaggttttgttaattttgtaaaacagattagaaaaccatccatctatattgtgttctagtatagcatgacatgacattgctaagaactttgc

SEQ ID NO: 152551 - DNA, 1736 bp, Homo sapiens
  Payload ID: 10008
  Gene Symbol: MAGEB16
  Gene Name: melanoma antigen family B16
  Uniprot ID: A2A368
  ENST ID: ENST00000399987
  CDS Start-End: 198-1172
tgtgacgaccttatctgaggaaggtgcaccctagtcatcagaggaacgagtcgctgcaggcactgtcaggtgtcgaggtgactcaggaggatgaggtattcttgaaggtggagagtggcattagtatactggcagtgattcttcattgcctgccctcctgtccacactcctgcctactgccacccacaagggtcatcatgtctcaggatcaggagagtccacgatgcacacatgatcagcaccttcagaccttcagtgagacccagagcctggaggttgcacaggtctccaaggctctggagaagaccctcctctcctcctcccatcctctagtgcctggcaaactgaaggaagctcctgctgctaaggcagagagtcctcttgaggttcctcagagtttctgctcctcttccattgccgtcacaaccacctcatcaagtgaatctgatgaggcttccagcaatcaagaagaggaagatagtccaagctcctcagaggatacatcagaccccaggaatgtgcccgcagatgctctcgaccagaaagtggcttttttggtgaatttcatgctgcacaagtgtcagatgaaaaagccaataacaaaggcagatatgttgaagattatcatcaaagatgatgagagccacttctctgagatcctcctgagagcttctgagcacctagagatgatatttggccttgatgtggtggaggtggaccccaccacccattgctatggcctcttcatcaaactgggcctcacctatgatgggatgctgagtggtgaaaagggtgtgcccaagactggcctcctgataattgtcctgggtgtgatcttcatgaagggcaaccgtgccactgaagaggaagtctgggaagtgctgaatttgacgggagtatattctgggaagaagcacttcatctttggagagcccagaatgctcatcaccaaagattttgtgaaggagaagtacctggagtaccagcaggtggccaacagtgatcctgcacgatatgaattcctgtggggcccaagagccaaagctgaaaccagcaagatgaaagtcctggagtttgtggccaaagttcatgggtcttacccacattctttcccatctcagtatgcggaagctctgaaagaggaagaagagagagctagagccagaatttgagtcagggctgactccatttccacagccactgtgagttccagtgctatgtctggtagcttctcccatacctagtgaagacaaggatagatgttttatgtaacatttgcagaaggcagttagtgttcaaggatgcaggtccagggtggggctggaggaaaaatagtatatatcatctatatccctattttgtatgtgtaacttgacagtttattcttttattttttaatggctatattattcagatgatgtttcttttaatagaagtttaggtagtttccagatctcttaagttttgaataatattggtcatccatttaatgtttttcatgaggtttagtggcatatgttttgctgattttgtaaaacagattgggaaaccatctatattgtgttctgatataggatgacatgacattactaagaactctgcttttaaatatccgtttaatgttttgcatgcagtttagtagcaaaggttttgttaattttgtaaaacagattagaaaaccatccatctatattgtgttctagtatagcatgacatgacattgctaagaactttgc

SEQ ID NO: 152552 - DNA, 1682 bp, Homo sapiens
  Payload ID: 10008
  Gene Symbol: MAGEB16
  Gene Name: melanoma antigen family B16
  Uniprot ID: A2A368
  ENST ID: ENST00000399988
  CDS Start-End: 144-1118
tgtgacgaccttatctgaggaaggtgcaccctagtcatcagaggaacgagtcgctgcaggcactgtcaggtgtcgaggcagtgattcttcattgcctgccctcctgtccacactcctgcctactgccacccacaagggtcatcatgtctcaggatcaggagagtccacgatgcacacatgatcagcaccttcagaccttcagtgagacccagagcctggaggttgcacaggtctccaaggctctggagaagaccctcctctcctcctcccatcctctagtgcctggcaaactgaaggaagctcctgctgctaaggcagagagtcctcttgaggttcctcagagtttctgctcctcttccattgccgtcacaaccacctcatcaagtgaatctgatgaggcttccagcaatcaagaagaggaagatagtccaagctcctcagaggatacatcagaccccaggaatgtgcccgcagatgctctcgaccagaaagtggcttttttggtgaatttcatgctgcacaagtgtcagatgaaaaagccaataacaaaggcagatatgttgaagattatcatcaaagatgatgagagccacttctctgagatcctcctgagagcttctgagcacctagagatgatatttggccttgatgtggtggaggtggaccccaccacccattgctatggcctcttcatcaaactgggcctcacctatgatgggatgctgagtggtgaaaagggtgtgcccaagactggcctcctgataattgtcctgggtgtgatcttcatgaagggcaaccgtgccactgaagaggaagtctgggaagtgctgaatttgacgggagtatattctgggaagaagcacttcatctttggagagcccagaatgctcatcaccaaagattttgtgaaggagaagtacctggagtaccagcaggtggccaacagtgatcctgcacgatatgaattcctgtggggcccaagagccaaagctgaaaccagcaagatgaaagtcctggagtttgtggccaaagttcatgggtcttacccacattctttcccatctcagtatgcggaagctctgaaagaggaagaagagagagctagagccagaatttgagtcagggctgactccatttccacagccactgtgagttccagtgctatgtctggtagcttctcccatacctagtgaagacaaggatagatgttttatgtaacatttgcagaaggcagttagtgttcaaggatgcaggtccagggtggggctggaggaaaaatagtatatatcatctatatccctattttgtatgtgtaacttgacagtttattcttttattttttaatggctatattattcagatgatgtttcttttaatagaagtttaggtagtttccagatctcttaagttttgaataatattggtcatccatttaatgtttttcatgaggtttagtggcatatgttttgctgattttgtaaaacagattgggaaaccatctatattgtgttctgatataggatgacatgacattactaagaactctgcttttaaatatccgtttaatgttttgcatgcagtttagtagcaaaggttttgttaattttgtaaaacagattagaaaaccatccatctatattgtgttctagtatagcatgacatgacattgctaagaactttgc

SEQ ID NO: 152553 - DNA, 1818 bp, Homo sapiens
  Payload ID: 10008
  Gene Symbol: MAGEB16
  Gene Name: melanoma antigen family B16
  Uniprot ID: A2A368
  ENST ID: ENST00000399989
  CDS Start-End: 280-1254
tgtgacgaccttatctgaggaaggtgcaccctagtcatcagaggaacgagtcgctgcaggcactgtcaggtgtcgaggtaaaactctgagactgagggaaatagagcgccctgcagataagagccccaggccctgcagtcaactctgggaggccgtgggctggactttcaggctgaacccaccccacatttctccctcgggaatctgattaaggcagtgattcttcattgcctgccctcctgtccacactcctgcctactgccacccacaagggtcatcatgtctcaggatcaggagagtccacgatgcacacatgatcagcaccttcagaccttcagtgagacccagagcctggaggttgcacaggtctccaaggctctggagaagaccctcctctcctcctcccatcctctagtgcctggcaaactgaaggaagctcctgctgctaaggcagagagtcctcttgaggttcctcagagtttctgctcctcttccattgccgtcacaaccacctcatcaagtgaatctgatgaggcttccagcaatcaagaagaggaagatagtccaagctcctcagaggatacatcagaccccaggaatgtgcccgcagatgctctcgaccagaaagtggcttttttggtgaatttcatgctgcacaagtgtcagatgaaaaagccaataacaaaggcagatatgttgaagattatcatcaaagatgatgagagccacttctctgagatcctcctgagagcttctgagcacctagagatgatatttggccttgatgtggtggaggtggaccccaccacccattgctatggcctcttcatcaaactgggcctcacctatgatgggatgctgagtggtgaaaagggtgtgcccaagactggcctcctgataattgtcctgggtgtgatcttcatgaagggcaaccgtgccactgaagaggaagtctgggaagtgctgaatttgacgggagtatattctgggaagaagcacttcatctttggagagcccagaatgctcatcaccaaagattttgtgaaggagaagtacctggagtaccagcaggtggccaacagtgatcctgcacgatatgaattcctgtggggcccaagagccaaagctgaaaccagcaagatgaaagtcctggagtttgtggccaaagttcatgggtcttacccacattctttcccatctcagtatgcggaagctctgaaagaggaagaagagagagctagagccagaatttgagtcagggctgactccatttccacagccactgtgagttccagtgctatgtctggtagcttctcccatacctagtgaagacaaggatagatgttttatgtaacatttgcagaaggcagttagtgttcaaggatgcaggtccagggtggggctggaggaaaaatagtatatatcatctatatccctattttgtatgtgtaacttgacagtttattcttttattttttaatggctatattattcagatgatgtttcttttaatagaagtttaggtagtttccagatctcttaagttttgaataatattggtcatccatttaatgtttttcatgaggtttagtggcatatgttttgctgattttgtaaaacagattgggaaaccatctatattgtgttctgatataggatgacatgacattactaagaactctgcttttaaatatccgtttaatgttttgcatgcagtttagtagcaaaggttttgttaattttgtaaaacagattagaaaaccatccatctatattgtgttctagtatagcatgacatgacattgctaagaactttgc

SEQ ID NO: 152554 - DNA, 1734 bp, Homo sapiens
  Payload ID: 10008
  Gene Symbol: MAGEB16
  Gene Name: melanoma antigen family B16
  ENST ID: ENST00000399992
  CDS Start-End: 100-1170
tgtgacgaccttatctgaggaaggtgcaccctagtcatcagaggaacgagtcgctgcaggcactgtcaggtgtcgaggagtggcattagctatcagaagatggggactgaagcccaaccagtagtcaaagcagtgattcttcattgcctgccctcctgtccacactcctgcctactgccacccacaagggtcatcatgtctcaggatcaggagagtccacgatgcacacatgatcagcaccttcagaccttcagtgagacccagagcctggaggttgcacaggtctccaaggctctggagaagaccctcctctcctcctcccatcctctagtgcctggcaaactgaaggaagctcctgctgctaaggcagagagtcctcttgaggttcctcagagtttctgctcctcttccattgccgtcacaaccacctcatcaagtgaatctgatgaggcttccagcaatcaagaagaggaagatagtccaagctcctcagaggatacatcagaccccaggaatgtgcccgcagatgctctcgaccagaaagtggcttttttggtgaatttcatgctgcacaagtgtcagatgaaaaagccaataacaaaggcagatatgttgaagattatcatcaaagatgatgagagccacttctctgagatcctcctgagagcttctgagcacctagagatgatatttggccttgatgtggtggaggtggaccccaccacccattgctatggcctcttcatcaaactgggcctcacctatgatgggatgctgagtggtgaaaagggtgtgcccaagactggcctcctgataattgtcctgggtgtgatcttcatgaagggcaaccgtgccactgaagaggaagtctgggaagtgctgaatttgacgggagtatattctgggaagaagcacttcatctttggagagcccagaatgctcatcaccaaagattttgtgaaggagaagtacctggagtaccagcaggtggccaacagtgatcctgcacgatatgaattcctgtggggcccaagagccaaagctgaaaccagcaagatgaaagtcctggagtttgtggccaaagttcatgggtcttacccacattctttcccatctcagtatgcggaagctctgaaagaggaagaagagagagctagagccagaatttgagtcagggctgactccatttccacagccactgtgagttccagtgctatgtctggtagcttctcccatacctagtgaagacaaggatagatgttttatgtaacatttgcagaaggcagttagtgttcaaggatgcaggtccagggtggggctggaggaaaaatagtatatatcatctatatccctattttgtatgtgtaacttgacagtttattcttttattttttaatggctatattattcagatgatgtttcttttaatagaagtttaggtagtttccagatctcttaagttttgaataatattggtcatccatttaatgtttttcatgaggtttagtggcatatgttttgctgattttgtaaaacagattgggaaaccatctatattgtgttctgatataggatgacatgacattactaagaactctgcttttaaatatccgtttaatgttttgcatgcagtttagtagcaaaggttttgttaattttgtaaaacagattagaaaaccatccatctatattgtgttctagtatagcatgacatgacattgctaagaactttgc

SEQ ID NO: 152555 - DNA, 1379 bp, Homo sapiens
  Payload ID: 10009
  Gene Symbol: MAGEB17
  Gene Name: melanoma antigen family B17
  Uniprot ID: A8MXT2
  ENST ID: ENST00000400003
  CDS Start-End: 298-1308
ggaagtgaggatcttcgtctgagggacgccacctcaggctaccagaaccccaagactggttgggtatcaagggtgttgcctgtagtgagctgaggatggagtcccaggactggtcaagtagcaaggtgaagatcctgagccctcagtagacagggctgcacggagcgtttcagcagagggctttggttgcaagactggctgccccaggtcagcggagaaaggagtcccaggctctgtggggagtgaaggtgcccacctcctgcaccctcttgcctgctgcccctaagcacagtcatcatgcctcgcggtcaggcgagtaagcgccgtgcccgtgagaaacgccgccaggctcgaggtgaagaccaatgtctcgggggtgctcaagccaccgcagcagagaaggaaaagctgccatcctcctcctctcctgcatgccagagtcctccccagagcttccccaatgcaggcattcctcaggagtcccagagagccagctaccccagctctcctgcttcagctgtttcactcacaagttctgatgaaggtgccaagggccaaaagggggaaagtcccaactccttccatggcccgtcctcctctgagagcacaggaagagatcttctgaacacgaagacgggcgaattggtgcagttcctcctcaacaagtatataaggaaagagcccattacgagggaagccatgctgaaggttatcaacagaaagtacaagcagcacttccctgagatcctccggagaagcactgagaacgtagaggtggtctttggcctctacctgaaggaaatggaccccagccgtcagtcctatgtgcttgttggcaagctggactttcccaatcaaggaagcttgagcgatggcgggggctttcccctgagcgggctcctgatggttctcctgagcaccatcttcatgcatggcaaccgtgccactgaggaagagatgtgggaatgcctgaatgcattggggatgtataagggtaggaagcacttcatctatggggagccccaggagcttgtcaccaaagatttggtgcgagaggggtacctggagtaccagcaggtgcccagcagcgatcctccacgctacgagttcctgtggggtcccagggcccgtgctgaaaccagcaaaatgaaagtcctggagtttgtggccaagctcaatgataccgttgccagtacctacaagtcccggtatgaggaggctctgagagaggaggaagagcaagccagagccagagcggtagccagggatagcgccagggccagggctagcaggtcctttcagccctagtgaagtctcaggcaatcctcactaagagattgaaaagcctgtccaccatctcagtatttgggggtgaggtg

SEQ ID NO: 152556 - DNA, 1434 bp, Homo sapiens
  Payload ID: 10009
  Gene Symbol: MAGEB17
  Gene Name: melanoma antigen family B17
  Uniprot ID: A8MXT2
  ENST ID: ENST00000400004
  CDS Start-End: 353-1363
gatgctctaacgagggtagtgactctgtctaaaggcaaaagcacagttcagctgagggaggagaactggacactcattggagtcccggagaggacactgagtacactggagaggacttctatgcaaaaagggggcccgagcagagccccgccccgctttcagccctgggagacccagcagggacttgattggatgtggctcactccgacatccgcccgcctgggaagctgccggaagtgaggatcttcgtctgagggacgccacctcaggctaccagaaccccaagactggttgggtatcaaggtgcccacctcctgcaccctcttgcctgctgcccctaagcacagtcatcatgcctcgcggtcaggcgagtaagcgccgtgcccgtgagaaacgccgccaggctcgaggtgaagaccaatgtctcgggggtgctcaagccaccgcagcagagaaggaaaagctgccatcctcctcctctcctgcatgccagagtcctccccagagcttccccaatgcaggcattcctcaggagtcccagagagccagctaccccagctctcctgcttcagctgtttcactcacaagttctgatgaaggtgccaagggccaaaagggggaaagtcccaactccttccatggcccgtcctcctctgagagcacaggaagagatcttctgaacacgaagacgggcgaattggtgcagttcctcctcaacaagtatataaggaaagagcccattacgagggaagccatgctgaaggttatcaacagaaagtacaagcagcacttccctgagatcctccggagaagcactgagaacgtagaggtggtctttggcctctacctgaaggaaatggaccccagccgtcagtcctatgtgcttgttggcaagctggactttcccaatcaaggaagcttgagcgatggcgggggctttcccctgagcgggctcctgatggttctcctgagcaccatcttcatgcatggcaaccgtgccactgaggaagagatgtgggaatgcctgaatgcattggggatgtataagggtaggaagcacttcatctatggggagccccaggagcttgtcaccaaagatttggtgcgagaggggtacctggagtaccagcaggtgcccagcagcgatcctccacgctacgagttcctgtggggtcccagggcccgtgctgaaaccagcaaaatgaaagtcctggagtttgtggccaagctcaatgataccgttgccagtacctacaagtcccggtatgaggaggctctgagagaggaggaagagcaagccagagccagagcggtagccagggatagcgccagggccagggctagcaggtcctttcagccctagtgaagtctcaggcaatcctcactaagagattgaaaagcctgtccaccatctcagtatttgggggtgaggtg

SEQ ID NO: 152557 - DNA, 1811 bp, Homo sapiens
  Payload ID: 10010
  Gene Symbol: MAGEB18
  Gene Name: melanoma antigen family B18
  Uniprot ID: Q96M61
  ENST ID: ENST00000325250
  CDS Start-End: 188-1219
aaagtgggcgtggccggacatgtttctcttgacctatcttccacatcatcaagctgttacgggcgaaaccttggtctgaaacatgcggccagagaaataaatctcaggatccggcaggtgtcaaaggtgccctcttcatcaattcaactgcctgcactattgtctgtagtccctgacaagagtaattatgcctcgaggtcagaagagtaagctccgtgcccgtgagaaacgccaccaggctcgttgtgagaatcaggatctgggagctacgcaggccactgtggcagaaggagagtcaccctcccctgcctatcttctctttggtgacagaccccagaatttgcctgctgctgagacacctagcatccctgaagcgcttcagggagccccatccaccaccaatgctattgcacctgtttcatgcagttcaaatgaaggtgccagcagccaagatgagaaaagtctaggttcctcaagggaagctgagggctggaaagaagatcctttaaacaagaaagtagtgtcgctggtgcatttcttgcttcagaagtatgaaacgaaagagccaattacaaagggagatatgataaagtttgttatcaggaaggataagtgtcacttcaatgagatcctcaagagagcctctgagcacatggagctggcacttggtgttgatttgaaggaagtggatcccatcaggcactactatgcctttttcagcaaattagacctcacctatgatgaaacaaccagtgatgaagaaaaaattcccaagactggcctcctgatgattgcactgggtgtgatctttctgaatggcaaccgtgccccagaagaggcagtctgggaaattatgaatatgatgggtgtatatgccgataggaagcacttcctctatggggatcccaggaaggtcatgaccaaagatttggtgcagctaaagtacctggagtaccagcaagtgcccaacagtgatcctccacgctatgaattcctgtggggtccaagagctcacgctgaaactagcaagatgaaagtcctggagtttgtagccaagatacatgataccgtccctagtgccttcccatcctgctatgaagaggctttgagggatgaggaacagagaacccaagccagagctgcagccagggctcatactgctgccatggcaaatgcacgttccagaaccacgtctagcagcttctcccatgctaagtgaaatctgaggcttgttcttcactttttggtcgaaaaggttacatttcaaatgttcaagtctgaagattgttttctttgtggaagagaagagcagtcaacattctaagtagtgaatggccagagtgcgtctggagggaacacagcatatatcattttgtgttaatagtctatagtaactcggagttgtatctttttctttcttttttttttggtgttatatttcaaatgttgttgcttataatagaagttttagataacttcagaatctatatttattaatgactttggttacacacgtattgctatttaagagtaggagttttattgttctgtaaaacaaattgggaaaccttctttcatatttaatgagccagaacaaggaaacacagtattggaataggtatttccttaaaaaatgtgagatgatttagcagtaaaattttggagatcaaaacataggtgagaaaaagtaaacttttcagttcttggttttctttttccattttagtctgttatataaaaataaaagtcatacctggattggcttagcttactgaagaaggtaggaagaaataaaatgtttatgaaccagc

SEQ ID NO: 152558 - DNA, 1610 bp, Homo sapiens
  Payload ID: 10011
  Gene Symbol: MAGEB2
  Gene Name: melanoma antigen family B2
  Uniprot ID: O15479
  ENST ID: ENST00000378988
  CDS Start-End: 102-1061
ctgacttccgctttggaggcgaggacccgagcgagtgtagggggtgcggcgtctggtcagccaggggtgaattctcaggactggtcggcagtcaagccatcatgcctcgtggtcagaagagtaagctccgtgcccgtgagaaacgccgcaaggcccgagatgagacccggggtctcaatgttcctcaggtcactgaagcagaggaagaagaggccccctgctgttcctcttctgtttctgggggtgctgcttcaagctctcctgctgctggcattccccaggagcctcagagagccccaaccactgccgctgctgcggctgcgggtgtttcatccacaaaatctaaaaaaggtgccaagagccaccaaggtgagaaaaatgcaagttcctcccaggcctcaacatccactaagagcccaagcgaagatcctctaaccaggaagtcagggtcgttggtgcagttcctgttgtacaagtataaaataaaaaagtccgttacaaagggagaaatgctgaaaattgttggcaaaaggttcagggagcacttccctgagatcctcaagaaagcctctgagggcctcagtgttgtctttggccttgagctgaataaagtcaaccccaacggccacacttacaccttcatcgacaaggtagacctcactgatgaggaatccctgctcagttcctgggactttcccaggagaaagcttctgatgcctctcctgggtgtgatcttcttaaatggcaactcagctactgaggaagagatctgggaattcctgaatatgttgggagtctatgatggagaggagcactcagtctttggggaaccctggaagctcatcaccaaagatctggtgcaggaaaaatatctggagtacaagcaggtgcccagcagtgatcccccacgctttcaattcctgtggggtccgagagcctatgctgaaaccagcaagatgaaagtcctggagtttttggccaaggtaaatggtaccaccccctgtgccttcccaacccattacgaagaagctttgaaagatgaagagaaagccggagtctgagccagagttgtagccaggccttgcactactgccatagccaatcaatctcccaaagccaagtttacctgctgttctcacccccaatgaggtcttaggcagattctttactttgtaattcaaaaggcctgttaacctttgttcttgttatgcatgaataacttgttgactttttttttttctctttttcaactagtgtttcaacaggtttatttagattcagaatgtaaatttacaaatgatatagatcaccctgttattgctgtttttcagggacagtagaaagtgttttgttttttgagtgaaacaacttattaataaaaatccttaaatcacttttgtaatccaggacaagaaaatgtggcattagagtagaaatatctttggaaatgtgaaagaccccatagtgaaatatttgggatcagaagccagaggtgtaaaagtggtcaattcttggtttacttcatttaatctttcttttcataaagatacatacctggatttgtttatgttattcaagaatgtgtgagaaattaaaccatagttagttaa

SEQ ID NO: 152559 - DNA, 2305 bp, Homo sapiens
  Payload ID: 10012
  Gene Symbol: MAGEB3
  Gene Name: melanoma antigen family B3
  Uniprot ID: O15480
  ENST ID: ENST00000361644
  CDS Start-End: 738-1778
ataacggggcaatctacccaaacctcttctcagcctagaatgccccaggcagtgcagtcagactgagcatcctctcttttacccttcagagttctcagtgaagtgagagttttgacctaaggtgacctcagttaactagagggaggatccagggtctggcagatatcagggaggaccttgaatgaagaacaggaggagccagaacagtgatgtcccatagaaacccgactccgctgtctgccctcacaggacccaaacatccctggcctaatgtggctcatcaaaacttcagcctagatctcggaggaccttgatctgagcaggattcatggcatggaatgtggagtcccaggactggccagcagcgaagtgaggttcttgagcagggctctggctcacgcttgtaatcccaacattttgggaggacgaagccagcctcatcgcttaagcacaggagttcgaggactgggaggtggaggttgtggcagggctgtggctcacgcttgtaatcccaacattttgggcggaggaagccagcctcatcgcttaagcacaggagttcgcggactgggaggcagggctctggctcacgcttgtaatcccaacattttgggaggacgaagccagcctcatcgcttaagcacaggagttcgaggactgggaggtggaggttgtggtgcctgtatcacctgcccttctgctgacactcctgcctgctgttcctgactacagccatcatgcctcggggtcagaagagtacgctccatgcacgtgagaaacgccagcagacccggggtcagacccaggatcaccagggtgctcagatcactgcaactaacaagaaaaaagtatccttttcatcccctcttattttgggggctactatccagaaaaagtctgctggtaggtcacgtagtgctctcaagaagcctcagagagcactatccaccactacatctgtagatgtttcttacaaaaagtcatacaagggagccaacagcaaaattgagaaaaagcaaagcttctctcagggtctatcctccactgtgcagtctcgcacagaccctctaatcatgaagacaaatatgttggtgcagttcctgatggaaatgtacaagatgaaaaagcccattatgaaagcagatatgctaaaaattgtccaaaaaagccataagaattgcttccctgagatccttaaaaaagcttctttcaacatggaggtggtatttggtgttgatttaaagaaagttgattctaccaaggactcctatgtccttgtcagcaaaatggatctccccaacaatgggacagtgactcgtgggaggggatttcccaagacaggtctcctgctgaatctcctgggcgtgatcttcatgaagggcaactgtgccactgaggagaagatctgggaattcctgaataagatgagaatatatgatgggaagaaacacttcatatttggggagcccagaaagctcatcacccaagatttggtgaagcttaaatacctggagtaccgacaagtgcccaacagtaatcctgcacgctatgaattcctgtggggtccaagagcccatgctgaaaccagcaagatgaaggtcctggagttttgggccaaggtcaataaaactgtccccagtgcgttccagttctggtatgaagaggctttgagagatgaggaagaaagagtccaagctgcagctatgctcaatgatggcagtagtgccatgggcagaaagtgttccaaggccaaggctagcagctcttcccacgcctagtgaagttgaagcaaattttgcattttgtggttaaagagggcagtcactgttccaaggagtgaaggactgggtgttactggagggaacacactgtataataccttttgtttctgttctaaatggataatttgaagttttatctgtattttggggcatatttttcaaatgttccttttatttaacattgtaatctaagtttaggattgatactggtcacatttgttgtttaagagtaaaaattttgctgttttgtaaaacagattgagaaaaattcgatcttatttagtgatctgttgcaagataacttggaattagaataagcatttccttgaaaatgtttaaaaaaaaaaagtcagcagtaaaatgtatggcattaagaaatagagaaagagtgtaagatggtcaatatttggtttcctaaatgcttttactctgtgctttaagaaaatgaaagataaataaccatatatgtctggcttacttaagaatgtagaattaaatcataataaattagacctcatgctgac

SEQ ID NO: 152560 - DNA, 1129 bp, Homo sapiens
  Payload ID: 10012
  Gene Symbol: MAGEB3
  Gene Name: melanoma antigen family B3
  Uniprot ID: O15480
  ENST ID: ENST00000620842
  CDS Start-End: 32-1072
ctcctgcctgctgttcctgactacagccatcatgcctcggggtcagaagagtacgctccatgcacgtgagaaacgccagcagacccggggtcagacccaggatcaccagggtgctcagatcactgcaactaacaagaaaaaagtatccttttcatcccctcttattttgggggctactatccagaaaaagtctgctggtaggtcacgtagtgctctcaagaagcctcagagagcactatccaccactacatctgtagatgtttcttacaaaaagtcatacaagggagccaacagcaaaattgagaaaaagcaaagcttctctcagggtctatcctccactgtgcagtctcgcacagaccctctaatcatgaagacaaatatgttggtgcagttcctgatggaaatgtacaagatgaaaaagcccattatgaaagcagatatgctaaaaattgtccaaaaaagccataagaattgcttccctgagatccttaaaaaagcttctttcaacatggaggtggtatttggtgttgatttaaagaaagttgattctaccaaggactcctatgtccttgtcagcaaaatggatctccccaacaatgggacagtgactcgtgggaggggatttcccaagacaggtctcctgctgaatctcctgggcgtgatcttcatgaagggcaactgtgccactgaggagaagatctgggaattcctgaataagatgagaatatatgatgggaagaaacacttcatatttggggagcccagaaagctcatcacccaagatttggtgaagcttaaatacctggagtaccgacaagtgcccaacagtaatcctgcacgctatgaattcctgtggggtccaagagcccatgctgaaaccagcaagatgaaggtcctggagttttgggccaaggtcaataaaactgtccccagtgcgttccagttctggtatgaagaggctttgagagatgaggaagaaagagtccaagctgcagctatgctcaatgatggcagtagtgccatgggcagaaagtgttccaaggccaaggctagcagctcttcccacgcctagtgaagttgaagcaaattttgcattttgtggttaaagagggcagtcactgttccaagg

SEQ ID NO: 152561 - DNA, 2142 bp, Homo sapiens
  Payload ID: 10013
  Gene Symbol: MAGEB4
  Gene Name: melanoma antigen family B4
  Uniprot ID: O15481
  ENST ID: ENST00000378982
  CDS Start-End: 85-1125
aggatttcatttgctcttctccaggaaccacatcacctgcccttctgcctacactcctgcctgctgtgcctaaccacagccatcatgcctcggggtcagaagagtaagctccgtgcccgtgagaaacgccagcggacccgtggtcagacccaggatctcaaggttggtcagcctactgcagcagagaaagaagagtctccttcctcttcctcatctgttttgagggatactgcctccagctcccttgcttttggcattccccaggagcctcagagagagccacccaccacctctgctgctgcagctatgtcatgcactggatctgataaaggcgacgagagccaagatgaggaaaatgcaagttcctcccaggcctcaacatccactgagagatcactcaaagattctctaaccaggaagacgaagatgttagtgcagttcctgctgtacaagtataaaatgaaagagcccactacaaaggcagaaatgctgaagatcatcagcaaaaagtacaaggagcacttccctgagatcttcaggaaagtctctcagcgcacggagctggtctttggccttgccttgaaggaggtcaaccccaccactcactcctacatcctcgtcagcatgctaggccccaacgatggaaaccagagcagtgcctggacccttccaaggaatgggcttctgatgcctctactgagtgtgatcttcttaaatggcaactgtgcccgtgaagaggaaatctgggaattcctgaatatgctggggatctatgatggaaagaggcaccttatctttggggaaccccgaaagctcatcacccaagatctggtacaggaaaaatatctggaataccagcaggtgcccaacagtgatcccccacgctatcaattcctgtggggtccaagagctcatgcagaaaccagcaagatgaaagtcctggagtttttggccaaggtgaatgacaccacccccaataacttcccactgctttatgaagaggctttgagagatgaagaagagagagctggagcccggcccagagttgcagccaggcgtggcactacagccatgactagtgcgtattccagggccacatccagtagctcttcccaacccatgtgagatctaaggcaaattgttcactttgtggttgaaagacctgctgctttctctgttcctgtgatgcatgaataactcattgatttatctctttgttgtattttccatgatgtttcttaaaatagaaagtttatttagattcagaatataaatttagaaatggcatgcatcacacatttattgctgtttatcaggttggtttagtgataataattttgtttttgaaatacaaatagaaaatcctgaaataatttttgtgatacagagcaaaataacacggcatgggagtaaggttatccttagaaatttaaaataactccacagtaaaataggtagaatctgaagatagaaagggaagaaaagtaaaagttgctttattcgtggtttgtcttactcagttcagtctttttttgctcataaatttaaaagttacatacctggtttgcttagattattcaagaatgtggaggcctgggccaaggtcaatgacagtgtctccattgtcttccctccattaagagaagactttaagagatgagggagagagagccagagacagtgttgcaactgggcctggcatgtttcagtgtggtgtccagcagtgtctcccactccttgtgaagtctgaggtatattctttacttttgattaagaaaacacttaaccttctaattaatggagagccaaaggggagttggtgggaacaccatgtataacatatttgtatgtaaaatgatttatcttttctttttcctgtttttcagtgttctttttttaaattgtagatttatttagtttcagaatctaagtttatgaatggcatgaatcactcatttattaaaatatatcaggttggagagtgagaatttttgcattatgtaaaacaatttaaaaatcttttaagtctttttctgtgatctagaacaagataatatggcattggaatatggaatttgtgaaaaggaaattaccttgcaataaagttggtgggaccaggaagtagagaaaaaaaaagtaaaa

SEQ ID NO: 152562 - DNA, 1216 bp, Homo sapiens
  Payload ID: 10014
  Gene Symbol: MAGEB5
  Gene Name: melanoma antigen family B5
  Uniprot ID: Q9BZ81
  ENST ID: ENST00000602297
  CDS Start-End: 248-1075
ttactctcagccttgggacaacgaggacagagtcaacatgtctcaggatcagaacagtaagctccacacttgtgagaaacactaccagatccaagatgactctctgcttcagagtggagctcaggccagtgaataagtggaagatgatcccctccccacttcctctcctattcttggggatattccccagagctcatctgctgctgagtcaagtggcacttcccaggagccttgcgaatccagcaccatgacttctgcaggtgtttttaatgcaggatctgacgaaagggctaacagtagagatgaggagtacccatgttcctcagaggtctcaccctccactgagagttcatgcagcaatttcataaatattaaggtgggtttgttggagcagttcctgctctacaagttcaaaatgaaacagcgtattttgaaggaagatatgctgaagattgtcaacccaagataccaaaaccagtttgctgagattcacagaagagcttctgagcacattgaggttgtctttgcagttgacttgaaggaagtcaacccaacttgtcacttatatgaccttgtcagcaagctgaaactccccaacaatgggaggattcatgttggcaaagtgttacccaagactggtctcctcatgactttcctggttgtgatcttcctgaaaggcaactgtgccaacaaggaagatacctggaaatttctggatatgatgcaaatatatgatgggaagaagtactacatctatggagagcccaggaagctcatcactcaggatttcgtgaggctaacgtacctggagtaccaccaggtgccctgcagttatcctgcacactatcaattcctttggggtccaagagcctatactgaaaccagcaagatgaaagtcctggaatatttggccaaggtcaatgatattgctccaggtgccttctcatcacaatatgaagaggctttgcaagatgaggaagagagcccaagccagagatgcagccgaaactggcactactgcagtggccaagactgtctcagggcgaagttcagcagcttctctcaaccctattgaagtctgaagcttttttcatccagtcaagcaaatataacatcaccaaaagggattttttttggaaatacaaaagaacccccagtaaaataattgagataatgaaatagaaaaaaataataaaacatgatcttggttttcttc

SEQ ID NO: 152563 - DNA, 1949 bp, Homo sapiens
  Payload ID: 10015
  Gene Symbol: MAGEB6
  Gene Name: melanoma antigen family B6
  Uniprot ID: Q8N7X4
  ENST ID: ENST00000379034
  CDS Start-End: 150-1373
aataaaggggtctgagccggtcgcctgagcctgaaaagtgctgtcacgtcagcggaaggaggcgtcccagatcttctcagctgtcttggtgccagccttcctagtcttcctacccacactcctacctgctgtcacaggccacagccatcatgcctcggggtcacaagagtaagctccgtacctgtgagaaacgccaagagaccaatggtcagccacagggtctcacgggtccccaggccactgcagagaagcaggaagagtcccactcttcctcatcctcttctcgcgcttgtctgggtgattgtcgtaggtcttctgatgcctccattcctcaggagtctcagggagtgtcacccactgggtctcctgatgcagttgtttcatattcaaaatccgatgtggctgccaacggccaagatgagaaaagtccaagcacctcccgtgatgcctccgttcctcaggagtctcagggagcttcacccactggctctcctgatgcaggtgtttcaggctcaaaatatgatgtggctgccaacggccaagatgagaaaagtccaagcacttcccatgatgtctccgttcctcaggagtctcagggagcttcacccactggctcgcctgatgcaggtgtttcaggctcaaaatatgatgtggctgccgagggtgaagatgaggaaagtgtaagcgcctcacagaaagccatcatttttaagcgcttaagcaaagatgctgtaaagaagaaggcgtgcacgttggcgcaattcctgcagaagaagtttgagaagaaagagtccattttgaaggcagacatgctgaagtgtgtccgcagagagtacaagccctacttccctcagatcctcaacagaacctcccaacatttggtggtggcctttggcgttgaattgaaagaaatggattccagcggcgagtcctacacccttgtcagcaagctaggcctccccagtgaaggaattctgagtggtgataatgcgctgccgaagtcgggtctcctgatgtcgctcctggttgtgatcttcatgaacggcaactgtgccactgaagaggaggtctgggagttcctgggtctgttggggatatatgatgggatcctgcattcaatctatggggatgctcggaagatcattactgaagatttggtgcaagataagtacgtggtttaccggcaggtgtgcaacagtgatcctccatgctatgagttcctgtggggtccacgagcctatgctgaaaccaccaagatgagagtcctgcgtgttttggccgacagcagtaacaccagtcccggtttatacccacatctgtatgaagacgctttgatagatgaggtagagagagcattgagactgagagcttaaggcagggctggcactatttccttggccagggtaccttatggggccatatcctacagatcctcccatttctagggaggtctgaagtagaattttcactttatgttagaagagagtagtgagctttctaagtagtgcagtatagtagaggctggagggaacaagatatgtatctttcttttgttacacatgagtaacttgcagatttatgttttatctctgtcagttatcaacattgttcctgttaagtgaaggtttattttgcttcagattatacaattatcaataacatagctctcacattcatggctgtttaaccaatctgaaagttacggtttgggaattaataaaacaaagtcatacaacacattttctttgtaattgagaactagataacatggtaacagagaattgattttcatatgaatcttaactccacagtaaaatagttgacatcataatatgaagagaaagaaaaggaaaaacagaaatgtaaaagttgtttaattcttggtttgcctaattcgttttcctatttcttttcatacaaataaaggatacctggatttatttaggtta

SEQ ID NO: 152564 - DNA, 1224 bp, Homo sapiens
  Payload ID: 10016
  Gene Symbol: MAGEB6P1
  Gene Name: melanoma antigen family B6 pseudogene 1
  ENST ID: ENST00000416929
  CDS Start-End: 1-1224
atgcctcggggtcagaagagtaagctccgtgcccgtgggaaacgccgagagacccatgatcagccgcaaggtctcacaggtccccaggccactgcagagaaacaagaagagtctcgctcttcgtcatcctcttctgctgtttgtcagggtgctcgtcgtaggtcttctggttcctccgttcctcaggagtctcagggagcttcacccactggctatcctgatgcaggtgcttcatgctcaaaatatgatgtggctgccatgggtcaagatgagaaaagtcctagtacctcccgtgatgcctccgtttctcaagagtctcagggagcttcacccattggccctcctgatgcaggtatttcatgctcaaaatctgatgaggctgccaagggtcaaaatgagaaaagtccaagcacctcccgtgatgcctctgttcctcaggagtctcagggagcttcacccactggctcgcctgatgcagatgtttcaggctcaaaatctgatgtggctgccaagggtcaagatgaggaaagtttaagctcctccaagagagctgcgttctttacaaccacagacggagatcctataaaaaggaaggcaaacaagatggtgcaattcctgcagaagaagtttgagaagaaagagcccattttgaaggcagacatgctgaagcgtctccgcagacagtacaagccatgcttccctgagatcctcaagagaacctccgaacatttgacggtgttctttggcgttgaattgaaagaaacggattccagcggcgagtcctacacccttgtcagcaagctgggtctctccaatgaaggaagtctgagtggtgataatgcgctgccgaagtcgggtctcctgatgtcgatcctgggtttgatcttcatgagaggcaaccgtgccactgaagaggaggtctggaagttcctgggtctgttggggatatatgatgggatcctgcattcaatctatggggatgctcggaagatcattactgaagatttggtgcaagataagtacgtggtttaccggcaggtgtgcaacagtgatcctccatgctatgagttcctgtggggtccacgagcctatgctgaaaccaccaagatgagagtcctgcgtgttttggccgagatcaataacaccagtcccggtttatacccacatctgtatgaagacgctttgacagatgaggtagagagagcattgagactgagagcttaa

SEQ ID NO: 152565 - DNA, 4270 bp, Homo sapiens
  Payload ID: 10017
  Gene Symbol: MAGEC1
  Gene Name: melanoma antigen family C1
  Uniprot ID: O60732
  ENST ID: ENST00000285879
  CDS Start-End: 287-3715
gtctgaaggacctgaggcattttgtgacgaggatcgtctcaggtcagcggagggaggagacttatagacctatccagtcttcaaggtgctccagaaagcaggagttgaagacctgggtgtgagggacacatacatcctaaaagcaccacagcagaggaggcccaggcagtgccaggagtcaaggttcccagaagacaaaccccctaggaagacaggcgacctgtgaggccctagagcaccaccttaagagaagaagagctgtaagccggcctttgtcagagccatcatgggggacaaggatatgcctactgctgggatgccgagtcttctccagagttcctctgagagtcctcagagttgtcctgagggggaggactcccagtctcctctccagattccccagagttctcctgagagcgacgacaccctgtatcctctccagagtcctcagagtcgttctgagggggaggactcctcggatcctctccagagacctcctgaggggaaggactcccagtctcctctccagattccccagagttctcctgagggcgacgacacccagtctcctctccagaattctcagagttctcctgaggggaaggactccctgtctcctctagagatttctcagagccctcctgagggtgaggatgtccagtctcctctgcagaatcctgcgagttccttcttctcctctgctttattgagtattttccagagttcccctgagagtactcaaagtccttttgagggttttccccagtctgttctccagattcctgtgagcgccgcctcctcctccactttagtgagtattttccagagttcccctgagagtactcaaagtccttttgagggttttccccagtctccactccagattcctgtgagccgctccttctcctccactttattgagtattttccagagttcccctgagagaactcagagtacttttgagggttttgcccagtctcctctccagattcctgtgagcccctcctcctcctccactttactgagtcttttccagagtttctctgagagaactcagagtacttttgagggttttgcccagtcttctctccagattcctgtgagcccctccttctcctccactttagtgagtcttttccagagttcccctgagagaactcagagtacttttgagggttttccccagtctcctctccagattcctgtgagctcctcctcctcctccactttattgagtcttttccagagttcccctgagagaactcacagtacttttgagggttttccccagtctcttctccagattcctatgacctcctccttctcctctactttattgagtattttccagagttctcctgagagtgctcaaagtacttttgagggttttccccagtctcctctccagattcctgggagcccctccttctcctccactttactgagtcttttccagagttcccctgagagaactcacagtacttttgagggttttccccagtctcctctccagattcctatgacctcctccttctcctctactttattgagtattttacagagttctcctgagagtgctcaaagtgcttttgagggttttccccagtctcctctccagattcctgtgagctcctctttctcctacactttattgagtcttttccagagttcccctgagagaactcacagtacttttgagggttttccccagtctcctctccagattcctgtgagctcctcctcctcctcctccactttattgagtcttttccagagttcccctgagtgtactcaaagtacttttgagggttttccccagtctcctctccagattcctcagagtcctcctgaaggggagaatacccattctcctctccagattgttccaagtcttcctgagtgggaggactccctgtctcctcactactttcctcagagccctcctcagggggaggactccctatctcctcactactttcctcagagccctcctcagggggaggactccctgtctcctcactactttcctcagagccctcagggggaggactccctgtctcctcactactttcctcagagccctcctcagggggaggactccatgtctcctctctactttcctcagagtcctcttcagggggaggaattccagtcttctctccagagccctgtgagcatctgctcctcctccactccatccagtcttccccagagtttccctgagagttctcagagtcctcctgaggggcctgtccagtctcctctccatagtcctcagagccctcctgaggggatgcactcccaatctcctctccagagtcctgagagtgctcctgagggggaggattccctgtctcctctccaaattcctcagagtcctcttgagggagaggactccctgtcttctctccattttcctcagagtcctcctgagtgggaggactccctctctcctctccactttcctcagtttcctcctcagggggaggacttccagtcttctctccagagtcctgtgagtatctgctcctcctccacttctttgagtcttccccagagtttccctgagagtcctcagagtcctcctgaggggcctgctcagtctcctctccagagacctgtcagctccttcttctcctacactttagcgagtcttctccaaagttcccatgagagtcctcagagtcctcctgaggggcctgcccagtctcctctccagagtcctgtgagctccttcccctcctccacttcatcgagtctttcccagagttctcctgtgagctccttcccctcctccacttcatcgagtctttccaagagttcccctgagagtcctctccagagtcctgtgatctccttctcctcctccacttcattgagcccattcagtgaagagtccagcagcccagtagatgaatatacaagttcctcagacaccttgctagagagtgattccttgacagacagcgagtccttgatagagagcgagcccttgttcacttatacactggatgaaaaggtggacgagttggcgcggtttcttctcctcaaatatcaagtgaagcagcctatcacaaaggcagagatgctgacgaatgtcatcagcaggtacacgggctactttcctgtgatcttcaggaaagcccgtgagttcatagagatactttttggcatttccctgagagaagtggaccctgatgactcctatgtctttgtaaacacattagacctcacctctgaggggtgtctgagtgatgagcagggcatgtcccagaaccgcctcctgattcttattctgagtatcatcttcataaagggcacctatgcctctgaggaggtcatctgggatgtgctgagtggaataggggtgcgtgctgggagggagcactttgcctttggggagcccagggagctcctcactaaagtttgggtgcaggaacattacctagagtaccgggaggtgcccaactcttctcctcctcgttacgaattcctgtggggtccaagagctcattcagaagtcattaagaggaaagtagtagagtttttggccatgctaaagaataccgtccctattacctttccatcctcttacaaggatgctttgaaagatgtggaagagagagcccaggccataattgacaccacagatgattcgactgccacagaaagtgcaagctccagtgtcatgtcccccagcttctcttctgagtgaagtctagggcagattcttccctctgagtttgaagggggcagtcgagtttctacgtggtggagggcctggttgaggctggagagaacacagtgctatttgcatttctgttccatatgggtagttatggggtttacctgttttacttttgggtatttttcaaatgcttttcctattaataacaggtttaaatagcttcagaatcctagtttatgcacatgagtcgcacatgtattgctgtttttctggtttaagagtaacagtttgatattttgtaaaaacaaaaacacacccaaacacaccacattgggaaaaccttctgcctcattttgtgatgtgtcacaggttaatgtggtgttactgtaggaattttcttgaaactgtgaaggaactctgcagttaaatagtggaataaagtaaaggattgttaatgtttgcatttcctcaggtcctttagtctgttgttcttgaaaactaaagatacatacctggtttgcttggcttacgtaagaaagtagaagaaagtaaactgtaataaataaaagtgtcagtgactca

SEQ ID NO: 152566 - DNA, 1084 bp, Homo sapiens
  Payload ID: 10017
  Gene Symbol: MAGEC1
  Gene Name: melanoma antigen family C1
  Uniprot ID: O60732
  ENST ID: ENST00000406005
  CDS Start-End: 374-1003
gccaggagtcaaggttcccagaagacaaaccccctaggaagacaggcgacctgtgaggccctagagcaccaccttaagagaagaagagctgtaagccggcctttgtcagagccatcatgggggacaaggatatgcctactgctgggatgccgagtcttctccagagttcctctgagagtcctcagagttgtcctgagggggaggactcccagtctcctctccagattccccagagttctcctgagagcgacgacacccttccttgatagagagcgagcccttgttcacttatacactggatgaaaaggtggacgagttggcgcggtttcttctcctcaaatatcaagtgaagcagcctatcacaaaggcagagatgctgacgaatgtcatcagcaggtacacgggctactttcctgtgatcttcaggaaagcccgtgagttcatagagatactttttggcatttccctgagagaagtggaccctgatgactcctatgtctttgtaaacacattagacctcacctctgaggggtgtctgagtgatgagcagggcatgtcccagaaccgcctcctgattcttattctgagtatcatcttcataaagggcacctatgcctctgaggaggtcatctgggatgtgctgagtggaataggggtgcgtgctgggagggagcactttgcctttggggagcccagggagctcctcactaaagtttgggtgcaggaacattacctagagtaccgggaggtgcccaactcttctcctcctcgttacgaattcctgtggggtccaagagctcattcagaagtcattaagaggaaagtagtagagtttttggccatgctaaagaataccgtccctattacctttccatcctcttacaaggatgctttgaaagatgtggaagagagagcccaggccataattgacaccacagatgattcgactgccacagaaagtgcaagctccagtgtcatgtcccccagcttctcttctgagtgaagtctagggcagattcttccctctgagtttgaagggggcagtcgagtttctacgtggtggagggcctggttgaggctggag

SEQ ID NO: 152567 - DNA, 1991 bp, Homo sapiens
  Payload ID: 10018
  Gene Symbol: MAGEC2
  Gene Name: melanoma antigen family C2
  Uniprot ID: Q9UBF1
  ENST ID: ENST00000247452
  CDS Start-End: 349-1470
gctttcccgacggccatcttgggaatctgacggatcgaaggcatttgtgaggaggcgcgaatcaagttagcggggggaagagtcttagacctggccagtcctcagggtgagggccctgaggaagaactgagggacctcccaccatagagagaagaaaccccggcctgtactgcgctgccgtgagactggtgctccaggaaccaggtggtgacgaactgggtgtgaggcacacagcctaaagtcagcacagcagaggaggcccaggcagtgccaggagtcaaggcctgttggatctcatcatccatatccctgttgatacgtttacctgctgctcctgaagaagtcgtcatgcctcccgttccaggcgttccattccgcaacgttgacaacgactccccgacctcagttgagttagaagactgggtagatgcacagcatcccacagatgaggaagaggaggaagcctcctccgcctcttccactttgtacttagtattttccccctcttctttctccacatcctcttctctgattcttggtggtcctgaggaggaggaggtgccctctggtgtgataccaaatcttaccgagagcattcccagtagtcctccacagggtcctccacagggtccttcccagagtcctctgagctcctgctgctcctctttttcatggagctcattcagtgaggagtccagcagccagaaaggggaggatacaggcacctgtcagggcctgccagacagtgagtcctctttcacatatacactagatgaaaaggtggccgagttagtggagttcctgctcctcaaatacgaagcagaggagcctgtaacagaggcagagatgctgatgattgtcatcaagtacaaagattactttcctgtgatactcaagagagcccgtgagttcatggagcttctttttggccttgccctgatagaagtgggccctgaccacttctgtgtgtttgcaaacacagtaggcctcaccgatgagggtagtgatgatgagggcatgcccgagaacagcctcctgattattattctgagtgtgatcttcataaagggcaactgtgcctctgaggaggtcatctgggaagtgctgaatgcagtaggggtatatgctgggagggagcacttcgtctatggggagcctagggagctcctcactaaagtttgggtgcagggacattacctggagtatcgggaggtgccccacagttctcctccatattatgaattcctgtggggtccgagagcccattcagaaagcatcaagaagaaagtactagagtttttagccaagctgaacaacactgttcctagttcctttccatcctggtacaaggatgctttgaaagatgtggaagagagagtccaggccacaattgataccgcagatgatgccactgtcatggccagtgaaagcctcagtgtcatgtccagcaacgtctccttttctgagtgaagtctaggatagtttcttccccttgtgtttgaacagggcagtttaggttctaggtagtggagggccaggtggggctcgaggaacgtagtgttctttgcatttctgtcccatatgggtgatgtagagatttacctgtttttcagtattttctaaatgcttttcctttgaatagcaggtagttagcttcagagtgttaatttatgaatattagtcgcacatgtattgctctttatctggtttaagagtaacagtttgatattttgttaaaaaaatggaaataccttctcccttattttgtgatctgtaacagggtagtgtggtattgtaataggcatttttttttttttttacaatgtgcaataactcagcagttaaatagtggaacaaaattgaagggtggtcagtagtttcatttccttgtcctgcttattcttttgttcttgaaaattatatatacctggctttgcttagcttgttgaagaaagtagcagaaattaaatcttaataaaagaaagccccac

SEQ ID NO: 152568 - DNA, 1932 bp, Homo sapiens
  Payload ID: 10019
  Gene Symbol: MAGEC3
  Gene Name: melanoma antigen family C3
  Uniprot ID: Q8TD91
  ENST ID: ENST00000298296
  CDS Start-End: 1-1932
atgctgctgccctgccactgggtgttggatgccaccttcagtgatggcagtctaggccagtgggtgaaaaacacatgtgccacatatgccttatccccagtggtgctcccacctcagccccagccccggaaaaaggccacagataaggactattctgcctttcatcttgggcatctgagggaggtgaggctttttctgaggggtggaacttcagatcagcgaatggatagtcttgtcctctgccccacatacttcaagctctggaggaccctatcagggtccccaggtttacaactttctgacttgcattttgggagtcagccggaggggaagttttctctgaggagggcagtttcagttaagcagagggaggaaccccaggactggccactcaacgagaagagaactctgtggaaggacagtgaccttccaacatggaggagaggcacaggctacaccctttcccttcctgccgtcagccctggaaaaaggttgtggggggagaaagcggggagcttgccagagagcgagcccttgttcacttatacactggatgaaaaggtggacaagttggtgcagtttcttctcctcaaatatcaagcaaaagagcctctcacaagagcagagatgcagatgaatgtcatcaacacatacacgggctactttcctatgatcttcaggaaagcccgtgagttcatagagattctttttggcatttccctgacagaagtggaccccgaccatttctatgtctttgtaaacacattagacctcacctgtgaggggagtctgagtgatgagcagggcatgccccagaaccgcctcctgattcttattctgagtgtgatcttcataaagggcaactgtgcatctgaggaggtcatctgggaagtgctgaatgcaatagggccctggtcagccttggcagggttcgcggatgtgctttcccgacttgcactgtgggagtctgaaggacctgaagcattttgcgaggagtctggactcaggtcagcagagggaagcgtcttagacctggccaatcctcaaggacttgcaggccacagacaggaagatggccgccgagggctgaccgaggcgtccccacaacagaagaagggaggagaagatgaggatatgcctgctgctgggatgccacctcttccccagagtcctcctgagattcctccccagggtcctcccaagatctctccccagggtcctccgcagagtcctccccagagtcctctagactcctgctcatcccctcttttgtggacccgattggatgaggagtccagcagtgaagaggaggatacagctacttggcatgccttgccagaaagtgaatccttgcccaggtatgccctggatgaaaaggtggctgagttggtgcagtttcttctcctcaaatatcaaacaaaagagcctgtcacaaaggcagagatgctgacgactgtcatcaagaagtataaggactattttcccatgatcttcgggaaagcccatgagttcatagagctaatttttggcattgccctgactgatatggaccccgacaaccactcctatttctttgaagacacattagacctcacctatgagggaagcctgattgatgaccagggcatgcccaagaactgtctcctgattcttattctcagtatgatcttcataaagggcagctgtgtccccgaggaggtcatctgggaagtgttgagtgcaatagggcccattcagaggccagcaagagaagtcttagagtttttatccaagctatccagtatcatccctagtgcctttccatcctggtacatggatgctttgaaagatatggaagacagagcccaggccataattgacaccacagatgatgctactgccatggccagtgcaagccccagtgtcatgtccaccaacttctgtcctgagtga

SEQ ID NO: 152569 - DNA, 1290 bp, Homo sapiens
  Payload ID: 10019
  Gene Symbol: MAGEC3
  Gene Name: melanoma antigen family C3
  Uniprot ID: Q8TD91
  ENST ID: ENST00000409007
  CDS Start-End: 111-1151
gtcagcacagcagaggaggcccaggcaatatcaggagtcaaggcctgtgggatcccatcatccccatccctgctcacacgtttacctgctgctcctgaacaacaggcctcatgcctctctttccaaaccttccacgcctcagctttgaggaagacttccagaacccgagtgtgacagaggacttggtagatgcacaggattccatagatgaggaggaggaggatgcctcctccacttcctcttcctctttccactttttattcccctcctcctcttccttgtcctcatcctcacccttgtcctcacccttaccctctactctcattctgggtgttccagaagatgaggatatgcctgctgctgggatgccacctcttccccagagtcctcctgagattcctccccagggtcctcccaagatctctccccagggtcctccgcagagtcctccccagagtcctctagactcctgctcatcccctcttttgtggacccgattggatgaggagtccagcagtgaagaggaggatacagctacttggcatgccttgccagaaagtgaatccttgcccaggtatgccctggatgaaaaggtggctgagttggtgcagtttcttctcctcaaatatcaaacaaaagagcctgtcacaaaggcagagatgctgacgactgtcatcaagaagtataaggactattttcccatgatcttcgggaaagcccatgagttcatagagctaatttttggcattgccctgactgatatggaccccgacaaccactcctatttctttgaagacacattagacctcacctatgagggaagcctgattgatgaccagggcatgcccaagaactgtctcctgattcttattctcagtatgatcttcataaagggcagctgtgtccccgaggaggtcatctgggaagtgttgagtgcaataggggtgtgtgctgggagggagcactttatatatggggatcccagaaagctgctcactatacattgggtgcagagaaagtacctggagtaccgggaggtgcccaacagtgctcctccacgttatgaatttttgtggggtccaagagcccattcagaggccagcaagagaagtcttagagtttttatccaagctatccagtatcatccctagtgcctttccatcctggtacatggatgctttgaaagatatggaagacagagcccaggccataattgacaccacagatgatgctactgccatggccagtgcaagccccagtgtcatgtccaccaacttctgtcctgagtga

SEQ ID NO: 152570 - DNA, 1100 bp, Homo sapiens
  Payload ID: 10019
  Gene Symbol: MAGEC3
  Gene Name: melanoma antigen family C3
  ENST ID: ENST00000443323
  CDS Start-End: 161-961
gtcagcacagcagaggaggcccaggcaatatcaggagtcaaggttctgagggagcaaacctcttaggaagacaggcgacctgtgaggccctagagcaccaccttaagagaagaagagctgtaagccagcctttgtcagaaccatcatagaagatgaggatatgcctgctgctgggatgccacctcttccccagagtcctcctgagattcctccccagggtcctcccaagatctctccccagggtcctccgcagagtcctccccagagtcctctagactcctgctcatcccctcttttgtggacccgattggatgaggagtccagcagtgaagaggaggatacagctacttggcatgccttgccagaaagtgaatccttgcccaggtatgccctggatgaaaaggtggctgagttggtgcagtttcttctcctcaaatatcaaacaaaagagcctgtcacaaaggcagagatgctgacgactgtcatcaagaagtataaggactattttcccatgatcttcgggaaagcccatgagttcatagagctaatttttggcattgccctgactgatatggaccccgacaaccactcctatttctttgaagacacattagacctcacctatgagggaagcctgattgatgaccagggcatgcccaagaactgtctcctgattcttattctcagtatgatcttcataaagggcagctgtgtccccgaggaggtcatctgggaagtgttgagtgcaataggggtgtgtgctgggagggagcactttatatatggggatcccagaaagctgctcactatacattgggtgcagagaaagtacctggagtaccgggaggtgcccaacagtgctcctccacgttatgaatttttgtggggtccaagagcccattcagaggccagcaagagaagtcttagagtttttatccaagctatccagtatcatccctagtgcctttccatcctggtacatggatgctttgaaagatatggaagacagagcccaggccataattgacaccacagatgatgctactgccatggccagtgcaagccccagtgtcatgtccaccaacttctgtcctgagtga

SEQ ID NO: 152571 - DNA, 1707 bp, Homo sapiens
  Payload ID: 10019
  Gene Symbol: MAGEC3
  Gene Name: melanoma antigen family C3
  Uniprot ID: Q8TD91
  ENST ID: ENST00000544766
  CDS Start-End: 528-1568
gaaaggagccccggggctggccaacaagcaagaagggaactctgtggaaggatagctatctcccaacacggagggaaggcccaggcgtcgcccagccactccttgctgtcacccctggacaaaacagatggagaggtgaaaacggagagccctggtcagccttggcagggttcgcggatgtgctttcccgacttgcactgtgggagtctgaaggacctgaagcattttgcgaggagtctggactcaggtcagcagagggaagcgtcttagacctggccaatcctcaaggtgctccaggaaccaggagttgaagacctgggtctgaggcacacttcctaaagtcagcacagcagaggaggcccaggcaatatcaggagtcaaggttctgagggagcaaacctcttaggaagacaggcgacctgtgaggccctagagcaccaccttaagagaagaagagctgcctgtgggatcccatcatccccatccctgctcacacgtttacctgctgctcctgaacaacaggcctcatgcctctctttccaaaccttccacgcctcagctttgaggaagacttccagaacccgagtgtgacagaggacttggtagatgcacaggattccatagatgaggaggaggaggatgcctcctccacttcctcttcctctttccactttttattcccctcctcctcttccttgtcctcatcctcacccttgtcctcacccttaccctctactctcattctgggtgttccagaagatgaggatatgcctgctgctgggatgccacctcttccccagagtcctcctgagattcctccccagggtcctcccaagatctctccccagggtcctccgcagagtcctccccagagtcctctagactcctgctcatcccctcttttgtggacccgattggatgaggagtccagcagtgaagaggaggatacagctacttggcatgccttgccagaaagtgaatccttgcccaggtatgccctggatgaaaaggtggctgagttggtgcagtttcttctcctcaaatatcaaacaaaagagcctgtcacaaaggcagagatgctgacgactgtcatcaagaagtataaggactattttcccatgatcttcgggaaagcccatgagttcatagagctaatttttggcattgccctgactgatatggaccccgacaaccactcctatttctttgaagacacattagacctcacctatgagggaagcctgattgatgaccagggcatgcccaagaactgtctcctgattcttattctcagtatgatcttcataaagggcagctgtgtccccgaggaggtcatctgggaagtgttgagtgcaataggggtgtgtgctgggagggagcactttatatatggggatcccagaaagctgctcactatacattgggtgcagagaaagtacctggagtaccgggaggtgcccaacagtgctcctccacgttatgaatttttgtggggtccaagagcccattcagaggccagcaagagaagtcttagagtttttatccaagctatccagtatcatccctagtgcctttccatcctggtacatggatgctttgaaagatatggaagacagagcccaggccataattgacaccacagatgatgctactgccatggccagtgcaagccccagtgtcatgtccaccaacttctgtcctgagtga

SEQ ID NO: 152572 - DNA, 2747 bp, Homo sapiens
  Payload ID: 10020
  Gene Symbol: MAGED1
  Gene Name: melanoma antigen family D1
  Uniprot ID: Q9Y5V3
  ENST ID: ENST00000326587
  CDS Start-End: 191-2527
ggcgaagaggcggggtcgcccaagctgccgcgctggcattttctcctggacaaggagagagtgcggctgctgagagccgagcccagcaatcccgatcctctgagtcgtgaagaagggaggcagcgagggggttggggttggggcctgaggcaagcccccaggctccgctcttgccagagggacaggagccatggctcagaaaatggactgtggtgcgggcctcctcggcttccaggctgaggcctccgtagaagacagcgccttgcttatgcagaccttgatggaggccatccagatctcagaggctccacctactaaccaggccaccgcagctgctagtccccagagttcacagcccccaactgccaatgagatggctgacattcaggtttcagcagctgccgctaggcctaagtcagcctttaaagtccagaatgccaccacaaaaggcccaaatggtgtctatgatttctctcaggctcataatgccaaggatgtgcccaacacgcagcccaaggcagcctttaagtcccaaaatgctaccccaaagggtccaaatgctgcctatgatttttcccaggcagcaaccactggtgagttagctgctaacaagtctgagatggccttcaaggcccagaatgccactactaaagtgggcccaaatgccacctacaatttctctcagtctctcaatgccaatgacctggccaacagcaggcctaagacccctttcaaggcttggaatgataccactaaggccccaacagctgatacccagacccagaatgtaaatcaggccaaaatggccacttcccaggctgacatagagaccgacccaggtatctctgaacctgacggtgcaactgcacagacatcagcagatggttcccaggctcagaatctggagtcccggacaataattcggggcaagaggacccgcaagattaataacttgaatgttgaagagaacagcagtggggatcagaggcgggccccactggctgcagggacctggaggtctgcaccagttccagtgaccactcagaacccacctggcgcaccccccaatgtgctctggcagacgccattggcttggcagaacccctcaggctggcaaaaccagacagccaggcagaccccaccagcacgtcagagccctccagctaggcagaccccaccagcctggcagaacccagtcgcttggcagaacccagtgatttggccaaacccagtaatctggcagaacccagtgatctggccaaaccccattgtctggcccggccctgttgtctggccgaatccactggcctggcagaatccacctggatggcagactccacctggatggcagaccccaccgggctggcagggtcctccagactggcaaggtcctcctgactggccgctaccacccgactggccactgccacctgattggccacttcccactgactggccactaccacctgactggatccccgctgattggccaattccacctgactggcagaacctgcgcccctcgcctaacctgcgcccttctcccaactcgcgtgcctcacagaacccaggtgctgcacagccccgagatgtggcccttcttcaggaaagagcaaataagttggtcaagtacttgatgcttaaggactacacaaaggtgcccatcaagcgctcagaaatgctgagagatatcatccgtgaatacactgatgtttatccagaaatcattgaacgtgcatgctttgtcctagagaagaaatttgggattcaactgaaagaaattgacaaagaagaacacctgtatattctcatcagtacccccgagtccctggctggcatactgggaacgaccaaagacacacccaagctcggtctcctcttggtgattctgggtgtcatcttcatgaatggcaaccgtgccagtgaggctgtcctctgggaggcactacgcaagatgggactgcgtcctggggtgagacatcccctccttggagatctaaggaaacttctcacctatgagtttgtaaagcagaaatacctggactacagacgagtgcccaacagcaaccccccggagtatgagttcctctggggcctccgttcctaccatgagactagcaagatgaaagtgctgagattcattgcagaggttcagaaaagagaccctcgtgactggactgcacagttcatggaggctgcagatgaggccttggatgctctggatgctgctgcagctgaggccgaagcccgggctgaagcaagaacccgcatgggaattggagatgaggctgtgtctgggccctggagctgggatgacattgagtttgagctgctgacctgggatgaggaaggagattttggagatccctggtccagaattccatttaccttctgggccagataccaccagaatgcccgctccagattccctcagacctttgccggtcccattattggtcctggtggtacagccagtgccaacttcgctgccaactttggtgccattggtttcttctgggttgagtgagatgttggatattgctatcaatcgcagtagtctttcccctgtgtgaggctgaagcctcagattccttctaaacacagctatctagagagccacatcctgttgactgaaagtggcatgcaagataaatttatttgctgttccttgtctactgctttttttccccttgtgtgctgtcaagttttggtatcagaaataaacattgaaattgcaaagtgaatta

SEQ ID NO: 152573 - DNA, 2875 bp, Homo sapiens
  Payload ID: 10020
  Gene Symbol: MAGED1
  Gene Name: melanoma antigen family D1
  Uniprot ID: Q9Y5V3
  ENST ID: ENST00000375695
  CDS Start-End: 154-2658
attttctcctggacaaggagagagtgcggctgctgagagccgagcccagcaatcccgatcctctgagtcgtgaagaagggaggcagcgagggggttggggttggggcctgaggcaagcccccaggctccgctcttgccagagggacaggagccatggctcagaaaatggactgtggtgcgggcctcctcggcttccagaatcctgacgcttgtagagcagtctgtcaccccctcccccagcctcctgcctccaccctccctctttctgcattccccactctgtgcgaccccccttattctcaactccgcgatccgcctgccgtcctgagctgctactgcacgcctcttggagcgtccccggctcctgctgaggcctccgtagaagacagcgccttgcttatgcagaccttgatggaggccatccagatctcagaggctccacctactaaccaggccaccgcagctgctagtccccagagttcacagcccccaactgccaatgagatggctgacattcaggtttcagcagctgccgctaggcctaagtcagcctttaaagtccagaatgccaccacaaaaggcccaaatggtgtctatgatttctctcaggctcataatgccaaggatgtgcccaacacgcagcccaaggcagcctttaagtcccaaaatgctaccccaaagggtccaaatgctgcctatgatttttcccaggcagcaaccactggtgagttagctgctaacaagtctgagatggccttcaaggcccagaatgccactactaaagtgggcccaaatgccacctacaatttctctcagtctctcaatgccaatgacctggccaacagcaggcctaagacccctttcaaggcttggaatgataccactaaggccccaacagctgatacccagacccagaatgtaaatcaggccaaaatggccacttcccaggctgacatagagaccgacccaggtatctctgaacctgacggtgcaactgcacagacatcagcagatggttcccaggctcagaatctggagtcccggacaataattcggggcaagaggacccgcaagattaataacttgaatgttgaagagaacagcagtggggatcagaggcgggccccactggctgcagggacctggaggtctgcaccagttccagtgaccactcagaacccacctggcgcaccccccaatgtgctctggcagacgccattggcttggcagaacccctcaggctggcaaaaccagacagccaggcagaccccaccagcacgtcagagccctccagctaggcagaccccaccagcctggcagaacccagtcgcttggcagaacccagtgatttggccaaacccagtaatctggcagaacccagtgatctggccaaaccccattgtctggcccggccctgttgtctggccgaatccactggcctggcagaatccacctggatggcagactccacctggatggcagaccccaccgggctggcagggtcctccagactggcaaggtcctcctgactggccgctaccacccgactggccactgccacctgattggccacttcccactgactggccactaccacctgactggatccccgctgattggccaattccacctgactggcagaacctgcgcccctcgcctaacctgcgcccttctcccaactcgcgtgcctcacagaacccaggtgctgcacagccccgagatgtggcccttcttcaggaaagagcaaataagttggtcaagtacttgatgcttaaggactacacaaaggtgcccatcaagcgctcagaaatgctgagagatatcatccgtgaatacactgatgtttatccagaaatcattgaacgtgcatgctttgtcctagagaagaaatttgggattcaactgaaagaaattgacaaagaagaacacctgtatattctcatcagtacccccgagtccctggctggcatactgggaacgaccaaagacacacccaagctcggtctcctcttggtgattctgggtgtcatcttcatgaatggcaaccgtgccagtgaggctgtcctctgggaggcactacgcaagatgggactgcgtcctggggtgagacatcccctccttggagatctaaggaaacttctcacctatgagtttgtaaagcagaaatacctggactacagacgagtgcccaacagcaaccccccggagtatgagttcctctggggcctccgttcctaccatgagactagcaagatgaaagtgctgagattcattgcagaggttcagaaaagagaccctcgtgactggactgcacagttcatggaggctgcagatgaggccttggatgctctggatgctgctgcagctgaggccgaagcccgggctgaagcaagaacccgcatgggaattggagatgaggctgtgtctgggccctggagctgggatgacattgagtttgagctgctgacctgggatgaggaaggagattttggagatccctggtccagaattccatttaccttctgggccagataccaccagaatgcccgctccagattccctcagacctttgccggtcccattattggtcctggtggtacagccagtgccaacttcgctgccaactttggtgccattggtttcttctgggttgagtgagatgttggatattgctatcaatcgcagtagtctttcccctgtgtgaggctgaagcctcagattccttctaaacacagctatctagagagccacatcctgttgactgaaagtggcatgcaagataaatttatttgctgttccttgtctactgctttttttccccttgtgtgctgtcaagttttggtatcagaaataaacattgaaattgcaaagtgaa

SEQ ID NO: 152574 - DNA, 2806 bp, Homo sapiens
  Payload ID: 10020
  Gene Symbol: MAGED1
  Gene Name: melanoma antigen family D1
  Uniprot ID: Q9Y5V3
  ENST ID: ENST00000375722
  CDS Start-End: 253-2589
cgggactgactttggctcttcagtgtttgcgcatgcgcgtaacgtcctgaggcggtgggtggtatattaggcgaagaggcggggtcgcccaagctgccgcgctggcattttctcctggacaaggagagagtgcggctgctgagagccgagcccagcaatcccgatcctctgagtcgtgaagaagggaggcagcgagggggttggggttggggcctgaggcaaggctccgctcttgccagagggacaggagccatggctcagaaaatggactgtggtgcgggcctcctcggcttccaggctgaggcctccgtagaagacagcgccttgcttatgcagaccttgatggaggccatccagatctcagaggctccacctactaaccaggccaccgcagctgctagtccccagagttcacagcccccaactgccaatgagatggctgacattcaggtttcagcagctgccgctaggcctaagtcagcctttaaagtccagaatgccaccacaaaaggcccaaatggtgtctatgatttctctcaggctcataatgccaaggatgtgcccaacacgcagcccaaggcagcctttaagtcccaaaatgctaccccaaagggtccaaatgctgcctatgatttttcccaggcagcaaccactggtgagttagctgctaacaagtctgagatggccttcaaggcccagaatgccactactaaagtgggcccaaatgccacctacaatttctctcagtctctcaatgccaatgacctggccaacagcaggcctaagacccctttcaaggcttggaatgataccactaaggccccaacagctgatacccagacccagaatgtaaatcaggccaaaatggccacttcccaggctgacatagagaccgacccaggtatctctgaacctgacggtgcaactgcacagacatcagcagatggttcccaggctcagaatctggagtcccggacaataattcggggcaagaggacccgcaagattaataacttgaatgttgaagagaacagcagtggggatcagaggcgggccccactggctgcagggacctggaggtctgcaccagttccagtgaccactcagaacccacctggcgcaccccccaatgtgctctggcagacgccattggcttggcagaacccctcaggctggcaaaaccagacagccaggcagaccccaccagcacgtcagagccctccagctaggcagaccccaccagcctggcagaacccagtcgcttggcagaacccagtgatttggccaaacccagtaatctggcagaacccagtgatctggccaaaccccattgtctggcccggccctgttgtctggccgaatccactggcctggcagaatccacctggatggcagactccacctggatggcagaccccaccgggctggcagggtcctccagactggcaaggtcctcctgactggccgctaccacccgactggccactgccacctgattggccacttcccactgactggccactaccacctgactggatccccgctgattggccaattccacctgactggcagaacctgcgcccctcgcctaacctgcgcccttctcccaactcgcgtgcctcacagaacccaggtgctgcacagccccgagatgtggcccttcttcaggaaagagcaaataagttggtcaagtacttgatgcttaaggactacacaaaggtgcccatcaagcgctcagaaatgctgagagatatcatccgtgaatacactgatgtttatccagaaatcattgaacgtgcatgctttgtcctagagaagaaatttgggattcaactgaaagaaattgacaaagaagaacacctgtatattctcatcagtacccccgagtccctggctggcatactgggaacgaccaaagacacacccaagctcggtctcctcttggtgattctgggtgtcatcttcatgaatggcaaccgtgccagtgaggctgtcctctgggaggcactacgcaagatgggactgcgtcctggggtgagacatcccctccttggagatctaaggaaacttctcacctatgagtttgtaaagcagaaatacctggactacagacgagtgcccaacagcaaccccccggagtatgagttcctctggggcctccgttcctaccatgagactagcaagatgaaagtgctgagattcattgcagaggttcagaaaagagaccctcgtgactggactgcacagttcatggaggctgcagatgaggccttggatgctctggatgctgctgcagctgaggccgaagcccgggctgaagcaagaacccgcatgggaattggagatgaggctgtgtctgggccctggagctgggatgacattgagtttgagctgctgacctgggatgaggaaggagattttggagatccctggtccagaattccatttaccttctgggccagataccaccagaatgcccgctccagattccctcagacctttgccggtcccattattggtcctggtggtacagccagtgccaacttcgctgccaactttggtgccattggtttcttctgggttgagtgagatgttggatattgctatcaatcgcagtagtctttcccctgtgtgaggctgaagcctcagattccttctaaacacagctatctagagagccacatcctgttgactgaaagtggcatgcaagataaatttatttgctgttccttgtctactgctttttttccccttgtgtgctgtcaagttttggtatcagaaataaacattgaaattgcaaagtgaa

SEQ ID NO: 152575 - DNA, 2701 bp, Homo sapiens
  Payload ID: 10020
  Gene Symbol: MAGED1
  Gene Name: melanoma antigen family D1
  Uniprot ID: Q9Y5V3
  ENST ID: ENST00000375772
  CDS Start-End: 148-2484
gaagttgcctgaagtgaaggagggggtagcggctgcagaagctaaagcttccgccaaacaaaagaggacagcacttccggtcacgccatcgttgctgccttcttcgtcaagcccccaggctccgctcttgccagagggacaggagccatggctcagaaaatggactgtggtgcgggcctcctcggcttccaggctgaggcctccgtagaagacagcgccttgcttatgcagaccttgatggaggccatccagatctcagaggctccacctactaaccaggccaccgcagctgctagtccccagagttcacagcccccaactgccaatgagatggctgacattcaggtttcagcagctgccgctaggcctaagtcagcctttaaagtccagaatgccaccacaaaaggcccaaatggtgtctatgatttctctcaggctcataatgccaaggatgtgcccaacacgcagcccaaggcagcctttaagtcccaaaatgctaccccaaagggtccaaatgctgcctatgatttttcccaggcagcaaccactggtgagttagctgctaacaagtctgagatggccttcaaggcccagaatgccactactaaagtgggcccaaatgccacctacaatttctctcagtctctcaatgccaatgacctggccaacagcaggcctaagacccctttcaaggcttggaatgataccactaaggccccaacagctgatacccagacccagaatgtaaatcaggccaaaatggccacttcccaggctgacatagagaccgacccaggtatctctgaacctgacggtgcaactgcacagacatcagcagatggttcccaggctcagaatctggagtcccggacaataattcggggcaagaggacccgcaagattaataacttgaatgttgaagagaacagcagtggggatcagaggcgggccccactggctgcagggacctggaggtctgcaccagttccagtgaccactcagaacccacctggcgcaccccccaatgtgctctggcagacgccattggcttggcagaacccctcaggctggcaaaaccagacagccaggcagaccccaccagcacgtcagagccctccagctaggcagaccccaccagcctggcagaacccagtcgcttggcagaacccagtgatttggccaaacccagtaatctggcagaacccagtgatctggccaaaccccattgtctggcccggccctgttgtctggccgaatccactggcctggcagaatccacctggatggcagactccacctggatggcagaccccaccgggctggcagggtcctccagactggcaaggtcctcctgactggccgctaccacccgactggccactgccacctgattggccacttcccactgactggccactaccacctgactggatccccgctgattggccaattccacctgactggcagaacctgcgcccctcgcctaacctgcgcccttctcccaactcgcgtgcctcacagaacccaggtgctgcacagccccgagatgtggcccttcttcaggaaagagcaaataagttggtcaagtacttgatgcttaaggactacacaaaggtgcccatcaagcgctcagaaatgctgagagatatcatccgtgaatacactgatgtttatccagaaatcattgaacgtgcatgctttgtcctagagaagaaatttgggattcaactgaaagaaattgacaaagaagaacacctgtatattctcatcagtacccccgagtccctggctggcatactgggaacgaccaaagacacacccaagctcggtctcctcttggtgattctgggtgtcatcttcatgaatggcaaccgtgccagtgaggctgtcctctgggaggcactacgcaagatgggactgcgtcctggggtgagacatcccctccttggagatctaaggaaacttctcacctatgagtttgtaaagcagaaatacctggactacagacgagtgcccaacagcaaccccccggagtatgagttcctctggggcctccgttcctaccatgagactagcaagatgaaagtgctgagattcattgcagaggttcagaaaagagaccctcgtgactggactgcacagttcatggaggctgcagatgaggccttggatgctctggatgctgctgcagctgaggccgaagcccgggctgaagcaagaacccgcatgggaattggagatgaggctgtgtctgggccctggagctgggatgacattgagtttgagctgctgacctgggatgaggaaggagattttggagatccctggtccagaattccatttaccttctgggccagataccaccagaatgcccgctccagattccctcagacctttgccggtcccattattggtcctggtggtacagccagtgccaacttcgctgccaactttggtgccattggtttcttctgggttgagtgagatgttggatattgctatcaatcgcagtagtctttcccctgtgtgaggctgaagcctcagattccttctaaacacagctatctagagagccacatcctgttgactgaaagtggcatgcaagataaatttatttgctgttccttgtctactgctttttttccccttgtgtgctgtcaagttttggtatcagaaataaacattgaaattgcaaagtgaa

SEQ ID NO: 152576 - DNA, 1958 bp, Homo sapiens
  Payload ID: 10021
  Gene Symbol: MAGED2
  Gene Name: melanoma antigen family D2
  Uniprot ID: Q9UNF1
  ENST ID: ENST00000218439
  CDS Start-End: 126-1946
gcgggaccacttccggcctagagaggggagggcagtctccgagtttcggaggggcttggagtgagtggacgcactcgggaattgtaggaggacgaggctcagctcttgccaggccaaattgagacatgtctgacacaagcgagagtggtgcaggtctaactcgcttccaggctgaagcttcagaaaaggacagtagctcgatgatgcagactctgttgacagtgacccagaatgtggaggtcccagagacaccgaaggcctcaaaggcactggaggtctcagaggatgtgaaggtctcaaaagcctctggggtctcaaaggccacagaggtctcaaagaccccagaggctcgggaggcacctgccacccaggcctcatctactactcagctgactgatacccaggttctggcagctgaaaacaagagtctagcagctgacaccaagaaacagaatgctgacccgcaggctgtgacaatgcctgccactgagaccaaaaaggtcagccatgtggctgatacaaaggtcaatacaaaggctcaggagactgaggctgcaccctctcaggccccagcagatgaacctgagcctgagagtgcagctgcccagtctcaggagaatcaggatactcggcccaaggtcaaagccaagaaagcccgaaaggtgaagcatctggatggggaagaggatggcagcagtgatcagagtcaggcttctggaaccacaggtggccgaagggtctcaaaggccctaatggcctcaatggcccgcagggcttcaaggggtcccatagccttttgggcccgcagggcatcaaggactcggttggctgcttgggcccggagagccttgctctccctgagatcacctaaagcccgtaggggcaaggctcgccgtagagctgccaagctccagtcatcccaagagcctgaagcaccaccacctcgggatgtggcccttttgcaagggagggcaaatgatttggtgaagtaccttttggctaaagaccagacgaagattcccatcaagcgctcggacatgctgaaggacatcatcaaagaatacactgatgtgtaccccgaaatcattgaacgagcaggctattccttggagaaggtatttgggattcaattgaaggaaattgataagaatgaccacttgtacattcttctcagcaccttagagcccactgatgcaggcatactgggaacgactaaggactcacccaagctgggtctgctcatggtgcttcttagcatcatcttcatgaatggaaatcggtccagtgaggctgtcatctgggaggtgctgcgcaagttggggctgcgccctgggatacatcattcactctttggggacgtgaagaagctcatcactgatgagtttgtgaagcagaagtacctggactatgccagagtccccaatagcaatccccctgaatatgagttcttctggggcctgcgctcttactatgagaccagcaagatgaaagtcctcaagtttgcctgcaaggtacaaaagaaggatcccaaggaatgggcagctcagtaccgagaggcgatggaagcggatttgaaggctgcagctgaggctgcagctgaagccaaggctagggccgagattagagctcgaatgggcattgggctcggctcggagaatgctgccgggccctgcaactgggacgaagctgatatcggaccctgggccaaagcccggatccaggcgggagcagaagctaaagccaaagcccaagagagtggcagtgccagcactggtgccagtaccagtaccaataacagtgccagtgccagtgccagcaccagtggtggcttcagtgctggtgccagcctgaccgccactctcacatttgggctcttcgctggccttggtggagctggtgccagcaccagtggcagctctggtgcctgtggtttctcctacaagtgagattttaggtat

SEQ ID NO: 152577 - DNA, 2177 bp, Homo sapiens
  Payload ID: 10021
  Gene Symbol: MAGED2
  Gene Name: melanoma antigen family D2
  ENST ID: ENST00000347546
  CDS Start-End: 86-1852
gacttcgagagggacttagagaaggcagacgcatcccgaactcgctggaggacaaggctcagctcttgccaggccaaattgagacatgtctgacacaagcgagagtggtgcaggtctaactcgcttccaggctgaagcttcagaaaaggacagtagctcgatgatgcagactctgttgacagtgacccagaatgtggaggtcccagagacaccgaaggcctcaaaggccacagaggtctcaaagaccccagaggctcgggaggcacctgccacccaggcctcatctactactcagctgactgatacccaggttctggcagctgaaaacaagagtctagcagctgacaccaagaaacagaatgctgacccgcaggctgtgacaatgcctgccactgagaccaaaaaggtcagccatgtggctgatacaaaggtcaatacaaaggctcaggagactgaggctgcaccctctcaggccccagcagatgaacctgagcctgagagtgcagctgcccagtctcaggagaatcaggatactcggcccaaggtcaaagccaagaaagcccgaaaggtgaagcatctggatggggaagaggatggcagcagtgatcagagtcaggcttctggaaccacaggtggccgaagggtctcaaaggccctaatggcctcaatggcccgcagggcttcaaggggtcccatagccttttgggcccgcagggcatcaaggactcggttggctgcttgggcccggagagccttgctctccctgagatcacctaaagcccgtaggggcaaggctcgccgtagagctgccaagctccagtcatcccaagagcctgaagcaccaccacctcgggatgtggcccttttgcaagggagggcaaatgatttggtgaagtaccttttggctaaagaccagacgaagattcccatcaagcgctcggacatgctgaaggacatcatcaaagaatacactgatgtgtaccccgaaatcattgaacgagcaggctattccttggagaaggtatttgggattcaattgaaggaaattgataagaatgaccacttgtacattcttctcagcaccttagagcccactgatgcaggcatactgggaacgactaaggactcacccaagctgggtctgctcatggtgcttcttagcatcatcttcatgaatggaaatcggtccagtgaggctgtcatctgggaggtgctgcgcaagttggggctgcgccctgggatacatcattcactctttggggacgtgaagaagctcatcactgatgagtttgtgaagcagaagtacctggactatgccagagtccccaatagcaatccccctgaatatgagttcttctggggcctgcgctcttactatgagaccagcaagatgaaagtcctcaagtttgcctgcaaggtacaaaagaaggatcccaaggaatgggcagctcagtaccgagaggcgatggaagcggatttgaaggctgcagctgaggctgcagctgaagccaaggctagggccgagattagagctcgaatgggcattgggctcggctcggagaatgctgccgggccctgcaactgggacgaagctgatatcggaccctgggccaaagcccggatccaggcgggagcagaagctaaagccaaagcccaagagagtggcagtgccagcactggtgccagtaccagtaccaataacagtgccagtgccagtgccagcaccagtggtggcttcagtgctggtgccagcctgaccgccactctcacatttgggctcttcgctggccttggtggagctggtgccagcaccagtggcagctctggtgcctgtggtttctcctacaagtgagattttaggtatctgccttggtttcagtggggacatctggggcttatggggctgggatgaggagctggatgattctaggaaggcccaagttggagaatgatgtggagagtgtgccaagacactgcttttggcattttattcctttctgtttgctggatgtcaattgacccttttattttctcttacttgtgttttcagatattgttaatcctgccagtctttctcttcaagccagggtgcatcctcagaaacctactcaacacagcactctaggcagccactatcaatcaattgaagttgacactctgcattaaatctatttgcc

SEQ ID NO: 152578 - DNA, 2066 bp, Homo sapiens
  Payload ID: 10021
  Gene Symbol: MAGED2
  Gene Name: melanoma antigen family D2
  Uniprot ID: Q9UNF1
  ENST ID: ENST00000375053
  CDS Start-End: 234-2054
agtggcataaacatgggctttggcgtcagacagccctgagcggggccccattgccccacccccgaggaaggcgagggggggtggcagggggctgcggaaaggggctgggctgggttgggctgtctgcagctctagtccaggaggctgagacttcgagagggacttagagaaggcagacgcatcccgaactcgctggaggacaaggctcagctcttgccaggccaaattgagacatgtctgacacaagcgagagtggtgcaggtctaactcgcttccaggctgaagcttcagaaaaggacagtagctcgatgatgcagactctgttgacagtgacccagaatgtggaggtcccagagacaccgaaggcctcaaaggcactggaggtctcagaggatgtgaaggtctcaaaagcctctggggtctcaaaggccacagaggtctcaaagaccccagaggctcgggaggcacctgccacccaggcctcatctactactcagctgactgatacccaggttctggcagctgaaaacaagagtctagcagctgacaccaagaaacagaatgctgacccgcaggctgtgacaatgcctgccactgagaccaaaaaggtcagccatgtggctgatacaaaggtcaatacaaaggctcaggagactgaggctgcaccctctcaggccccagcagatgaacctgagcctgagagtgcagctgcccagtctcaggagaatcaggatactcggcccaaggtcaaagccaagaaagcccgaaaggtgaagcatctggatggggaagaggatggcagcagtgatcagagtcaggcttctggaaccacaggtggccgaagggtctcaaaggccctaatggcctcaatggcccgcagggcttcaaggggtcccatagccttttgggcccgcagggcatcaaggactcggttggctgcttgggcccggagagccttgctctccctgagatcacctaaagcccgtaggggcaaggctcgccgtagagctgccaagctccagtcatcccaagagcctgaagcaccaccacctcgggatgtggcccttttgcaagggagggcaaatgatttggtgaagtaccttttggctaaagaccagacgaagattcccatcaagcgctcggacatgctgaaggacatcatcaaagaatacactgatgtgtaccccgaaatcattgaacgagcaggctattccttggagaaggtatttgggattcaattgaaggaaattgataagaatgaccacttgtacattcttctcagcaccttagagcccactgatgcaggcatactgggaacgactaaggactcacccaagctgggtctgctcatggtgcttcttagcatcatcttcatgaatggaaatcggtccagtgaggctgtcatctgggaggtgctgcgcaagttggggctgcgccctgggatacatcattcactctttggggacgtgaagaagctcatcactgatgagtttgtgaagcagaagtacctggactatgccagagtccccaatagcaatccccctgaatatgagttcttctggggcctgcgctcttactatgagaccagcaagatgaaagtcctcaagtttgcctgcaaggtacaaaagaaggatcccaaggaatgggcagctcagtaccgagaggcgatggaagcggatttgaaggctgcagctgaggctgcagctgaagccaaggctagggccgagattagagctcgaatgggcattgggctcggctcggagaatgctgccgggccctgcaactgggacgaagctgatatcggaccctgggccaaagcccggatccaggcgggagcagaagctaaagccaaagcccaagagagtggcagtgccagcactggtgccagtaccagtaccaataacagtgccagtgccagtgccagcaccagtggtggcttcagtgctggtgccagcctgaccgccactctcacatttgggctcttcgctggccttggtggagctggtgccagcaccagtggcagctctggtgcctgtggtttctcctacaagtgagattttaggtat

SEQ ID NO: 152579 - DNA, 2048 bp, Homo sapiens
  Payload ID: 10021
  Gene Symbol: MAGED2
  Gene Name: melanoma antigen family D2
  Uniprot ID: Q9UNF1
  ENST ID: ENST00000375058
  CDS Start-End: 93-1913
agtctccgagtttcggaggggcttggagtgagtggacgcactcgggaattgtaggaggacgaggctcagctcttgccaggccaaattgagacatgtctgacacaagcgagagtggtgcaggtctaactcgcttccaggctgaagcttcagaaaaggacagtagctcgatgatgcagactctgttgacagtgacccagaatgtggaggtcccagagacaccgaaggcctcaaaggcactggaggtctcagaggatgtgaaggtctcaaaagcctctggggtctcaaaggccacagaggtctcaaagaccccagaggctcgggaggcacctgccacccaggcctcatctactactcagctgactgatacccaggttctggcagctgaaaacaagagtctagcagctgacaccaagaaacagaatgctgacccgcaggctgtgacaatgcctgccactgagaccaaaaaggtcagccatgtggctgatacaaaggtcaatacaaaggctcaggagactgaggctgcaccctctcaggccccagcagatgaacctgagcctgagagtgcagctgcccagtctcaggagaatcaggatactcggcccaaggtcaaagccaagaaagcccgaaaggtgaagcatctggatggggaagaggatggcagcagtgatcagagtcaggcttctggaaccacaggtggccgaagggtctcaaaggccctaatggcctcaatggcccgcagggcttcaaggggtcccatagccttttgggcccgcagggcatcaaggactcggttggctgcttgggcccggagagccttgctctccctgagatcacctaaagcccgtaggggcaaggctcgccgtagagctgccaagctccagtcatcccaagagcctgaagcaccaccacctcgggatgtggcccttttgcaagggagggcaaatgatttggtgaagtaccttttggctaaagaccagacgaagattcccatcaagcgctcggacatgctgaaggacatcatcaaagaatacactgatgtgtaccccgaaatcattgaacgagcaggctattccttggagaaggtatttgggattcaattgaaggaaattgataagaatgaccacttgtacattcttctcagcaccttagagcccactgatgcaggcatactgggaacgactaaggactcacccaagctgggtctgctcatggtgcttcttagcatcatcttcatgaatggaaatcggtccagtgaggctgtcatctgggaggtgctgcgcaagttggggctgcgccctgggatacatcattcactctttggggacgtgaagaagctcatcactgatgagtttgtgaagcagaagtacctggactatgccagagtccccaatagcaatccccctgaatatgagttcttctggggcctgcgctcttactatgagaccagcaagatgaaagtcctcaagtttgcctgcaaggtacaaaagaaggatcccaaggaatgggcagctcagtaccgagaggcgatggaagcggatttgaaggctgcagctgaggctgcagctgaagccaaggctagggccgagattagagctcgaatgggcattgggctcggctcggagaatgctgccgggccctgcaactgggacgaagctgatatcggaccctgggccaaagcccggatccaggcgggagcagaagctaaagccaaagcccaagagagtggcagtgccagcactggtgccagtaccagtaccaataacagtgccagtgccagtgccagcaccagtggtggcttcagtgctggtgccagcctgaccgccactctcacatttgggctcttcgctggccttggtggagctggtgccagcaccagtggcagctctggtgcctgtggtttctcctacaagtgagattttagatattgttaatcctgccagtctttctcttcaagccagggtgcatcctcagaaacctactcaacacagcactctaggcagccactatcaatcaattgaagttgacactctgcattaaatctatttgcc

SEQ ID NO: 152580 - DNA, 1798 bp, Homo sapiens
  Payload ID: 10021
  Gene Symbol: MAGED2
  Gene Name: melanoma antigen family D2
  ENST ID: ENST00000375060
  CDS Start-End: 93-1658
agtctccgagtttcggaggggcttggagtgagtggacgcactcgggaattgtaggaggacgaggctcagctcttgccaggccaaattgagacatgtctgacacaagcgagagtggtgcaggtctaactcgcttccaggctgaagcttcagaaaaggacagtagctcgatgatgcagactctgttgacagtgacccagaatgtggaggtcccagagacaccgaaggcctcatctactactcagctgactgatacccaggttctggcagctgaaaacaagagtctagcagctgacaccaagaaacagaatgctgacccgcaggctgtgacaatgcctgccactgagaccaaaaaggtcagccatgtggctgatacaaaggtcaatacaaaggctcaggagactgaggctgcaccctctcaggccccagcagatgaacctgagcctgagagtgcagctgcccagtctcaggagaatcaggatactcggcccaaggtcaaagccaagaaagcccgaaaggtgaagcatctggatggggaagaggatggcagcagtgatcagagtcaggcttctggaaccacaggtggccgaagggtctcaaaggctcgccgtagagctgccaagctccagtcatcccaagagcctgaagcaccaccacctcgggatgtggcccttttgcaagggagggcaaatgatttggtgaagtaccttttggctaaagaccagacgaagattcccatcaagcgctcggacatgctgaaggacatcatcaaagaatacactgatgtgtaccccgaaatcattgaacgagcaggctattccttggagaaggtatttgggattcaattgaaggaaattgataagaatgaccacttgtacattcttctcagcaccttagagcccactgatgcaggcatactgggaacgactaaggactcacccaagctgggtctgctcatggtgcttcttagcatcatcttcatgaatggaaatcggtccagtgaggctgtcatctgggaggtgctgcgcaagttggggctgcgccctgggatacatcattcactctttggggacgtgaagaagctcatcactgatgagtttgtgaagcagaagtacctggactatgccagagtccccaatagcaatccccctgaatatgagttcttctggggcctgcgctcttactatgagaccagcaagatgaaagtcctcaagtttgcctgcaaggtacaaaagaaggatcccaaggaatgggcagctcagtaccgagaggcgatggaagcggatttgaaggctgcagctgaggctgcagctgaagccaaggctagggccgagattagagctcgaatgggcattgggctcggctcggagaatgctgccgggccctgcaactgggacgaagctgatatcggaccctgggccaaagcccggatccaggcgggagcagaagctaaagccaaagcccaagagagtggcagtgccagcactggtgccagtaccagtaccaataacagtgccagtgccagtgccagcaccagtggtggcttcagtgctggtgccagcctgaccgccactctcacatttgggctcttcgctggccttggtggagctggtgccagcaccagtggcagctctggtgcctgtggtttctcctacaagtgagattttagatattgttaatcctgccagtctttctcttcaagccagggtgcatcctcagaaacctactcaacacagcactctaggcagccactatcaatcaattgaagttgacactctgcattaaatctatttgccatttc

SEQ ID NO: 152581 - DNA, 2189 bp, Homo sapiens
  Payload ID: 10021
  Gene Symbol: MAGED2
  Gene Name: melanoma antigen family D2
  Uniprot ID: Q9UNF1
  ENST ID: ENST00000375068
  CDS Start-End: 234-2054
agtggcataaacatgggctttggcgtcagacagccctgagcggggccccattgccccacccccgaggaaggcgagggggggtggcagggggctgcggaaaggggctgggctgggttgggctgtctgcagctctagtccaggaggctgagacttcgagagggacttagagaaggcagacgcatcccgaactcgctggaggacaaggctcagctcttgccaggccaaattgagacatgtctgacacaagcgagagtggtgcaggtctaactcgcttccaggctgaagcttcagaaaaggacagtagctcgatgatgcagactctgttgacagtgacccagaatgtggaggtcccagagacaccgaaggcctcaaaggcactggaggtctcagaggatgtgaaggtctcaaaagcctctggggtctcaaaggccacagaggtctcaaagaccccagaggctcgggaggcacctgccacccaggcctcatctactactcagctgactgatacccaggttctggcagctgaaaacaagagtctagcagctgacaccaagaaacagaatgctgacccgcaggctgtgacaatgcctgccactgagaccaaaaaggtcagccatgtggctgatacaaaggtcaatacaaaggctcaggagactgaggctgcaccctctcaggccccagcagatgaacctgagcctgagagtgcagctgcccagtctcaggagaatcaggatactcggcccaaggtcaaagccaagaaagcccgaaaggtgaagcatctggatggggaagaggatggcagcagtgatcagagtcaggcttctggaaccacaggtggccgaagggtctcaaaggccctaatggcctcaatggcccgcagggcttcaaggggtcccatagccttttgggcccgcagggcatcaaggactcggttggctgcttgggcccggagagccttgctctccctgagatcacctaaagcccgtaggggcaaggctcgccgtagagctgccaagctccagtcatcccaagagcctgaagcaccaccacctcgggatgtggcccttttgcaagggagggcaaatgatttggtgaagtaccttttggctaaagaccagacgaagattcccatcaagcgctcggacatgctgaaggacatcatcaaagaatacactgatgtgtaccccgaaatcattgaacgagcaggctattccttggagaaggtatttgggattcaattgaaggaaattgataagaatgaccacttgtacattcttctcagcaccttagagcccactgatgcaggcatactgggaacgactaaggactcacccaagctgggtctgctcatggtgcttcttagcatcatcttcatgaatggaaatcggtccagtgaggctgtcatctgggaggtgctgcgcaagttggggctgcgccctgggatacatcattcactctttggggacgtgaagaagctcatcactgatgagtttgtgaagcagaagtacctggactatgccagagtccccaatagcaatccccctgaatatgagttcttctggggcctgcgctcttactatgagaccagcaagatgaaagtcctcaagtttgcctgcaaggtacaaaagaaggatcccaaggaatgggcagctcagtaccgagaggcgatggaagcggatttgaaggctgcagctgaggctgcagctgaagccaaggctagggccgagattagagctcgaatgggcattgggctcggctcggagaatgctgccgggccctgcaactgggacgaagctgatatcggaccctgggccaaagcccggatccaggcgggagcagaagctaaagccaaagcccaagagagtggcagtgccagcactggtgccagtaccagtaccaataacagtgccagtgccagtgccagcaccagtggtggcttcagtgctggtgccagcctgaccgccactctcacatttgggctcttcgctggccttggtggagctggtgccagcaccagtggcagctctggtgcctgtggtttctcctacaagtgagattttagatattgttaatcctgccagtctttctcttcaagccagggtgcatcctcagaaacctactcaacacagcactctaggcagccactatcaatcaattgaagttgacactctgcattaaatctatttgcc

SEQ ID NO: 152582 - DNA, 2026 bp, Homo sapiens
  Payload ID: 10021
  Gene Symbol: MAGED2
  Gene Name: melanoma antigen family D2
  Uniprot ID: Q9UNF1
  ENST ID: ENST00000396224
  CDS Start-End: 194-2014
gggaaaaggggcggggtcctcagagctgccgcgctggcacatcttcctggagaaggggagggtgcggctgcagagaattgagacttagaagctttgaattcctgtatctgagaacggagtcgttgggggtggtggagggggttggaattggggacctacggaaggctcagctcttgccaggccaaattgagacatgtctgacacaagcgagagtggtgcaggtctaactcgcttccaggctgaagcttcagaaaaggacagtagctcgatgatgcagactctgttgacagtgacccagaatgtggaggtcccagagacaccgaaggcctcaaaggcactggaggtctcagaggatgtgaaggtctcaaaagcctctggggtctcaaaggccacagaggtctcaaagaccccagaggctcgggaggcacctgccacccaggcctcatctactactcagctgactgatacccaggttctggcagctgaaaacaagagtctagcagctgacaccaagaaacagaatgctgacccgcaggctgtgacaatgcctgccactgagaccaaaaaggtcagccatgtggctgatacaaaggtcaatacaaaggctcaggagactgaggctgcaccctctcaggccccagcagatgaacctgagcctgagagtgcagctgcccagtctcaggagaatcaggatactcggcccaaggtcaaagccaagaaagcccgaaaggtgaagcatctggatggggaagaggatggcagcagtgatcagagtcaggcttctggaaccacaggtggccgaagggtctcaaaggccctaatggcctcaatggcccgcagggcttcaaggggtcccatagccttttgggcccgcagggcatcaaggactcggttggctgcttgggcccggagagccttgctctccctgagatcacctaaagcccgtaggggcaaggctcgccgtagagctgccaagctccagtcatcccaagagcctgaagcaccaccacctcgggatgtggcccttttgcaagggagggcaaatgatttggtgaagtaccttttggctaaagaccagacgaagattcccatcaagcgctcggacatgctgaaggacatcatcaaagaatacactgatgtgtaccccgaaatcattgaacgagcaggctattccttggagaaggtatttgggattcaattgaaggaaattgataagaatgaccacttgtacattcttctcagcaccttagagcccactgatgcaggcatactgggaacgactaaggactcacccaagctgggtctgctcatggtgcttcttagcatcatcttcatgaatggaaatcggtccagtgaggctgtcatctgggaggtgctgcgcaagttggggctgcgccctgggatacatcattcactctttggggacgtgaagaagctcatcactgatgagtttgtgaagcagaagtacctggactatgccagagtccccaatagcaatccccctgaatatgagttcttctggggcctgcgctcttactatgagaccagcaagatgaaagtcctcaagtttgcctgcaaggtacaaaagaaggatcccaaggaatgggcagctcagtaccgagaggcgatggaagcggatttgaaggctgcagctgaggctgcagctgaagccaaggctagggccgagattagagctcgaatgggcattgggctcggctcggagaatgctgccgggccctgcaactgggacgaagctgatatcggaccctgggccaaagcccggatccaggcgggagcagaagctaaagccaaagcccaagagagtggcagtgccagcactggtgccagtaccagtaccaataacagtgccagtgccagtgccagcaccagtggtggcttcagtgctggtgccagcctgaccgccactctcacatttgggctcttcgctggccttggtggagctggtgccagcaccagtggcagctctggtgcctgtggtttctcctacaagtgagattttaggtat

SEQ ID NO: 152583 - DNA, 1811 bp, Homo sapiens
  Payload ID: 10021
  Gene Symbol: MAGED2
  Gene Name: melanoma antigen family D2
  ENST ID: ENST00000627068
  CDS Start-End: 234-1799
agtggcataaacatgggctttggcgtcagacagccctgagcggggccccattgccccacccccgaggaaggcgagggggggtggcagggggctgcggaaaggggctgggctgggttgggctgtctgcagctctagtccaggaggctgagacttcgagagggacttagagaaggcagacgcatcccgaactcgctggaggacaaggctcagctcttgccaggccaaattgagacatgtctgacacaagcgagagtggtgcaggtctaactcgcttccaggctgaagcttcagaaaaggacagtagctcgatgatgcagactctgttgacagtgacccagaatgtggaggtcccagagacaccgaaggcctcatctactactcagctgactgatacccaggttctggcagctgaaaacaagagtctagcagctgacaccaagaaacagaatgctgacccgcaggctgtgacaatgcctgccactgagaccaaaaaggtcagccatgtggctgatacaaaggtcaatacaaaggctcaggagactgaggctgcaccctctcaggccccagcagatgaacctgagcctgagagtgcagctgcccagtctcaggagaatcaggatactcggcccaaggtcaaagccaagaaagcccgaaaggtgaagcatctggatggggaagaggatggcagcagtgatcagagtcaggcttctggaaccacaggtggccgaagggtctcaaaggctcgccgtagagctgccaagctccagtcatcccaagagcctgaagcaccaccacctcgggatgtggcccttttgcaagggagggcaaatgatttggtgaagtaccttttggctaaagaccagacgaagattcccatcaagcgctcggacatgctgaaggacatcatcaaagaatacactgatgtgtaccccgaaatcattgaacgagcaggctattccttggagaaggtatttgggattcaattgaaggaaattgataagaatgaccacttgtacattcttctcagcaccttagagcccactgatgcaggcatactgggaacgactaaggactcacccaagctgggtctgctcatggtgcttcttagcatcatcttcatgaatggaaatcggtccagtgaggctgtcatctgggaggtgctgcgcaagttggggctgcgccctgggatacatcattcactctttggggacgtgaagaagctcatcactgatgagtttgtgaagcagaagtacctggactatgccagagtccccaatagcaatccccctgaatatgagttcttctggggcctgcgctcttactatgagaccagcaagatgaaagtcctcaagtttgcctgcaaggtacaaaagaaggatcccaaggaatgggcagctcagtaccgagaggcgatggaagcggatttgaaggctgcagctgaggctgcagctgaagccaaggctagggccgagattagagctcgaatgggcattgggctcggctcggagaatgctgccgggccctgcaactgggacgaagctgatatcggaccctgggccaaagcccggatccaggcgggagcagaagctaaagccaaagcccaagagagtggcagtgccagcactggtgccagtaccagtaccaataacagtgccagtgccagtgccagcaccagtggtggcttcagtgctggtgccagcctgaccgccactctcacatttgggctcttcgctggccttggtggagctggtgccagcaccagtggcagctctggtgcctgtggtttctcctacaagtgagattttaggtat

SEQ ID NO: 152584 - DNA, 2495 bp, Homo sapiens
  Payload ID: 10022
  Gene Symbol: MAGED4
  Gene Name: melanoma antigen family D4
  Uniprot ID: Q96JG8
  ENST ID: ENST00000375626
  CDS Start-End: 56-2275
gcggctgcggggttcctggtgctgaggacggacgccattggagttcccgagaagcatggctgagggaagcttcagcgtgcaatcggaaagctacagtgttgaagacatggatgagggtagcgacgaagtcggggaggaagagatggttgaaggcaacgactatgaagaattcggtgcgtttggtggctatggcaccctcaccagctttgacatccatatcctcagagccttcggaagcttgggtccaggccttcgcatcttatcgaatgagccctgggaactggaaaaccctgtgctggcccagaccctggtggaggcattgcagctggatccggaaacacttgccaatgagacggccgcccgtgctgccaacgtagcccgcgccgccgcctccaaccgtgcggctcgggccgctgccgccgctgcccgtaccgccttcagtcaggtggtcgctagccaccgggtggccacgccgcaggtctcaggagaggatacccagcccacgacctacgccgccgaggctcaggggcccacccctgagccaccccttgcttctccgcagacctcccagatgttagtcaccagtaagatggctgcccccgaggctccggcaacctccgcacagtcccagacaggctccccggcccaggaggctgctactgagggccctagtagcgcctgtgctttctctcaggctccgtgtgccagggaggtggacgccaaccggcccagcacagccttcctgggccagaatgatgtcttcgatttcactcagccggcaggtgtcagtggcatggccttcccgcgccccaagagacctgccccagcccaagaggctgccacagagggccccagtgctgcctctggtgtgccccagacgggacctggcagggaggtggcagccacccggcccaagaccaccaagtcggggaaggcgctggccaagactcggtgggtggagcctcagaatgttgtggcagcagctgctgccaaggccaagatggccacgagcatccctgagccggagggtgcagctgctgccactgctcagcacagtgctgagccctgggccaggatgggaggcaagaggaccaagaagtccaagcacctggatgatgagtatgagagcagcgaggaggagagagagactcccgcggtcccacccacctggagagcatcacagccctcattgacggtgcgggctcagttggcccctcggcccccgatggccccgaggtcccagataccctcaaggcacgtactgtgcctgcccccccgcaacgtgacccttctgcaggagagggcaaataagttggtgaaatacctgatgattaaggactacaagaagatccccatcaagcgcgcagacatgctgaaggatgtcatcagagaatatgatgaacatttccctgagatcattgaacgagcaacgtacaccctggaaaagaagtttgggatccacctgaaggagatcgacaaggaagaacacctgtatattcttgtctgcacacgggactcctcagctcgcctccttggaaaaaccaaggacactcccaggctgagtctcctcttggtgattctgggcgtcatcttcatgaatggcaaccgtgccagcgaggctgtcctctgggaggcactacgcaagatgggactgcgccctggggtgaggcacccattcctcggcgatctgaggaagctcatcacagatgactttgtgaagcagaagtacctggaatacaagaagatccccaacagcaacccacctgagtatgaattcctctggggcctgcgagcccgccatgagaccagcaagatgagggtcctgagattcatcgcccagaatcagaaccgagacccccgggaatggaaggctcatttcttggaggctgtggatgatgctttcaagacaatggatgtggatatggccgaggaacatgccagggcccagatgagggcccagatgaatatcggggatgaagcgctgattggacggtggagctgggatgacatacaagtcgagctcctgacctgggatgaggacggagattttggcgatgcctgggccaggatcccctttgctttctgggccagataccatcagtacattctgaatagcaaccgtgccaacaggagggccacgtggagagctggcgtcagcagtggcaccaatggaggggccagcaccagcgtcctagatggccccagcaccagctccaccatccggaccagaaatgctgccagagctggcgccagcttcttctcctggatccagtaagagtttcggcaccgttgacgaactgcagcgatcttactggccaagccagagcgcctcctctcagattccttctcgacacagcaccctaggcggcttcttcctgtcagtcggaggtggcatgcaagatgaagctctctttgctcttcctgctttcattttgtgcttttccttgtgttttcatgttttgggtatcagtgttacattaaagttgcaaaattaa

SEQ ID NO: 152585 - DNA, 2669 bp, Homo sapiens
  Payload ID: 10022
  Gene Symbol: MAGED4
  Gene Name: melanoma antigen family D4
  Uniprot ID: Q96JG8
  ENST ID: ENST00000599522
  CDS Start-End: 196-2469
gcatgcgcaggctacccagccgcggggggtgcacggagaaaaggggcggggtggtccgggctgctgtgctggcagcagtaggcgagggcgcggctgcggggttcctggtgctgaggacggacgccattggagttcccgagaagctgcttcaccctccctctcaggctgagctctcatctccctgggacccgcagcatggctgagggaagcttcagcgtgcaatcggaaagctacagtgttgaagacatggatgagggtagcgacgaagtcggggaggaagagatggttgaaggcaacgactatgaagaattcggtgcgtttggtggctatggcaccctcaccagctttgacatccatatcctcagagccttcggaagcttgggtccaggccttcgcatcttatcgaatgagccctgggaactggaaaaccctgtgctggcccagaccctggtggaggcattgcagctggatccggaaacacttgccaatgagacggccgcccgtgctgccaacgtagcccgcgccgccgcctccaaccgtgcggctcgggccgctgccgccgctgcccgtaccgccttcagtcaggtggtcgctagccaccgggtggccacgccgcaggtctcaggagaggatacccagcccacgacctacgccgccgaggctcaggggcccacccctgagccaccccttgcttctccgcagacctcccagatgttagtcaccagtaagatggctgcccccgaggctccggcaacctccgcacagtcccagacaggctccccggcccaggaggctgctactgagggccctagtagcgcctgtgctttctctcaggctccgtgtgccagggaggtggacgccaaccggcccagcacagccttcctgggccagaatgatgtcttcgatttcactcagccggcaggtgtcagtggcatggccttcccgcgccccaagagacctgccccagcccaagaggctgccacagagggccccagtgctgcctctggtgtgccccagacgggacctggcagggaggtggcagccacccggcccaagaccaccaagtcggggaaggcgctggccaagactcggtgggtggagcctcagaatgttgtggcagcagctgctgccaaggccaagatggccacgagcatccctgagccggagggtgcagctgctgccactgctcagcacagtgctgagccctgggccaggatgggaggcaagaggaccaagaagtccaagcacctggatgatgagtatgagagcagcgaggaggagagagagactcccgcggtcccacccacctggagagcatcacagccctcattgacggtgcgggctcagttggcccctcggcccccgatggccccgaggtcccagataccctcaaggcacgtactgtgcctgcccccccgcaacgtgacccttctgcaggagagggcaaataagttggtgaaatacctgatgattaaggactacaagaagatccccatcaagcgcgcagacatgctgaaggatgtcatcagagaatatgatgaacatttccctgagatcattgaacgagcaacgtacaccctggaaaagaagtttgggatccacctgaaggagatcgacaaggaagaacacctgtatattcttgtctgcacacgggactcctcagctcgcctccttggaaaaaccaaggacactcccaggctgagtctcctcttggtgattctgggcgtcatcttcatgaatggcaaccgtgccagcgaggctgtcctctgggaggcactacgcaagatgggactgcgccctggggtgaggcacccattcctcggcgatctgaggaagctcatcacagatgactttgtgaagcagaagaacccggagctcagagaggagacgcctctgagcatggctcccagctggtacctggaatacaagaagatccccaacagcaacccacctgagtatgaattcctctggggcctgcgagcccgccatgagaccagcaagatgagggtcctgagattcatcgcccagaatcagaaccgagacccccgggaatggaaggctcatttcttggaggctgtggatgatgctttcaagacaatggatgtggatatggccgaggaacatgccagggcccagatgagggcccagatgaatatcggggatgaagcgctgattggacggtggagctgggatgacatacaagtcgagctcctgacctgggatgaggacggagattttggcgatgcctgggccaggatcccctttgctttctgggccagataccatcagtacattctgaatagcaaccgtgccaacaggagggccacgtggagagctggcgtcagcagtggcaccaatggaggggccagcaccagcgtcctagatggccccagcaccagctccaccatccggaccagaaatgctgccagagctggcgccagcttcttctcctggatccagcaccgttgacgaactgcagcgatcttactggccaagccagagcgcctcctctcagattccttctcgacacagcaccctaggcggcttcttcctgtcagtcggaggtggcatgcaagatgaagctctctttgctcttcctgctttcattttgtgcttttccttgtgttttcatgttttgggtatcagtgttacattaaagttgcaaaatt

SEQ ID NO: 152586 - DNA, 2578 bp, Homo sapiens
  Payload ID: 10023
  Gene Symbol: MAGED4B
  Gene Name: melanoma antigen family D4B
  Uniprot ID: Q96JG8
  ENST ID: ENST00000335504
  CDS Start-End: 151-2376
gggggtgcacggagaaaaggggcggggtggtccgggctgctgtgctggcagcagtaggcgagggcgcggctgcggggttcctggtgctgaggacggacgccattggagttcccgagaaggctgagctctcatctccctgggacccgcagcatggctgagggaagcttcagcgtgcaatcggaaagctacagtgttgaagacatggatgagggtagcgacgaagtcggggaggaagagatggttgaaggcaacgactatgaagaattcggtgcgtttggtggctatggcaccctcaccagctttgacatccatatcctcagagccttcggaagcttgggtccaggccttcgcatcttatcgaatgagccctgggaactggaaaaccctgtgctggcccagaccctggtggaggcattgcagctggatccggaaacacttgccaatgagacggccgcccgtgctgccaacgtagcccgcgccgccgcctccaaccgtgcggctcgggccgctgccgccgctgcccgtaccgccttcagtcaggtggtcgctagccaccgggtggccacgccgcaggtctcaggagaggatacccagcccacgacctacgccgccgaggctcaggggcccacccctgagccaccccttgcttctccgcagacctcccagatgttagtcaccagtaagatggctgcccccgaggctccggcaacctccgcacagtcccagacaggctccccggcccaggaggctgctactgagggccctagtagcgcctgtgctttctctcaggctccgtgtgccagggaggtggacgccaaccggcccagcacagccttcctgggccagaatgatgtcttcgatttcactcagccggcaggtgtcagtggcatggccttcccgcgccccaagagacctgccccagcccaagaggctgccacagagggccccagtgctgcctctggtgtgccccagacgggacctggcagggaggtggcagccacccggcccaagaccaccaagtcggggaaggcgctggccaagactcggtgggtggagcctcagaatgttgtggcagcagctgctgccaaggccaagatggccacgagcatccctgagccggagggtgcagctgctgccactgctcagcacagtgctgagccctgggccaggatgggaggcaagaggaccaagaagtccaagcacctggatgatgagtatgagagcagcgaggaggagagagagactcccgcggtcccacccacctggagagcatcacagccctcattgacggtgcgggctcagttggcccctcggcccccgatggccccgaggtcccagataccctcaaggcacgtactgtgcctgcccccccgcaacgtgacccttctgcaggagagggcaaataagttggtgaaatacctgatgattaaggactacaagaagatccccatcaagcgcgcagacatgctgaaggatgtcatcagagaatatgatgaacatttccctgagatcattgaacgagcaacgtacaccctggaaaagaagtttgggatccacctgaaggagatcgacaaggaagaacacctgtatattcttgtctgcacacgggactcctcagctcgcctccttggaaaaaccaaggacactcccaggctgagtctcctcttggtgattctgggcgtcatcttcatgaatggcaaccgtgccagcgaggctgtcctctgggaggcactacgcaagatgggactgcgccctggggtgaggcacccattcctcggcgatctgaggaagctcatcacagatgactttgtgaagcagaagtacctggaatacaagaagatccccaacagcaacccacctgagtatgaattcctctggggcctgcgagcccgccatgagaccagcaagatgagggtcctgagattcatcgcccagaatcagaaccgagacccccgggaatggaaggctcatttcttggaggctgtggatgatgctttcaagacaatggatgtggatatggccgaggaacatgccagggcccagatgagggcccagatgaatatcggggatgaagcgctgattggacggtggagctgggatgacatacaagtcgagctcctgacctgggatgaggacggagattttggcgatgcctgggccaggatcccctttgctttctgggccagataccatcagtacattctgaatagcaaccgtgccaacaggagggccacgtggagagctggcgtcagcagtggcaccaatggaggggccagcaccagcgtcctagatggccccagcaccagctccaccatccggaccagaaatgctgccagagctggcgccagcttcttctcctggatccagcaccgttgacgaactgcagcgatcttactggccaagccagagcgcctcctctcagattccttctcgacacagcaccctaggcggcttcttcctgtcagtcggaggtggcatgcaagatgaagctctctttgctcttcctgctttcattttgtgcttttccttgtgttttcatgttttgggtatcagtgttacattaaagttgcaaaattaa

SEQ ID NO: 152587 - DNA, 2510 bp, Homo sapiens
  Payload ID: 10023
  Gene Symbol: MAGED4B
  Gene Name: melanoma antigen family D4B
  Uniprot ID: Q96JG8
  ENST ID: ENST00000360134
  CDS Start-End: 71-2290
gcagtaggcgagggcgcggctgcggggttcctggtgctgaggacggacgccattggagttcccgagaagcatggctgagggaagcttcagcgtgcaatcggaaagctacagtgttgaagacatggatgagggtagcgacgaagtcggggaggaagagatggttgaaggcaacgactatgaagaattcggtgcgtttggtggctatggcaccctcaccagctttgacatccatatcctcagagccttcggaagcttgggtccaggccttcgcatcttatcgaatgagccctgggaactggaaaaccctgtgctggcccagaccctggtggaggcattgcagctggatccggaaacacttgccaatgagacggccgcccgtgctgccaacgtagcccgcgccgccgcctccaaccgtgcggctcgggccgctgccgccgctgcccgtaccgccttcagtcaggtggtcgctagccaccgggtggccacgccgcaggtctcaggagaggatacccagcccacgacctacgccgccgaggctcaggggcccacccctgagccaccccttgcttctccgcagacctcccagatgttagtcaccagtaagatggctgcccccgaggctccggcaacctccgcacagtcccagacaggctccccggcccaggaggctgctactgagggccctagtagcgcctgtgctttctctcaggctccgtgtgccagggaggtggacgccaaccggcccagcacagccttcctgggccagaatgatgtcttcgatttcactcagccggcaggtgtcagtggcatggccttcccgcgccccaagagacctgccccagcccaagaggctgccacagagggccccagtgctgcctctggtgtgccccagacgggacctggcagggaggtggcagccacccggcccaagaccaccaagtcggggaaggcgctggccaagactcggtgggtggagcctcagaatgttgtggcagcagctgctgccaaggccaagatggccacgagcatccctgagccggagggtgcagctgctgccactgctcagcacagtgctgagccctgggccaggatgggaggcaagaggaccaagaagtccaagcacctggatgatgagtatgagagcagcgaggaggagagagagactcccgcggtcccacccacctggagagcatcacagccctcattgacggtgcgggctcagttggcccctcggcccccgatggccccgaggtcccagataccctcaaggcacgtactgtgcctgcccccccgcaacgtgacccttctgcaggagagggcaaataagttggtgaaatacctgatgattaaggactacaagaagatccccatcaagcgcgcagacatgctgaaggatgtcatcagagaatatgatgaacatttccctgagatcattgaacgagcaacgtacaccctggaaaagaagtttgggatccacctgaaggagatcgacaaggaagaacacctgtatattcttgtctgcacacgggactcctcagctcgcctccttggaaaaaccaaggacactcccaggctgagtctcctcttggtgattctgggcgtcatcttcatgaatggcaaccgtgccagcgaggctgtcctctgggaggcactacgcaagatgggactgcgccctggggtgaggcacccattcctcggcgatctgaggaagctcatcacagatgactttgtgaagcagaagtacctggaatacaagaagatccccaacagcaacccacctgagtatgaattcctctggggcctgcgagcccgccatgagaccagcaagatgagggtcctgagattcatcgcccagaatcagaaccgagacccccgggaatggaaggctcatttcttggaggctgtggatgatgctttcaagacaatggatgtggatatggccgaggaacatgccagggcccagatgagggcccagatgaatatcggggatgaagcgctgattggacggtggagctgggatgacatacaagtcgagctcctgacctgggatgaggacggagattttggcgatgcctgggccaggatcccctttgctttctgggccagataccatcagtacattctgaatagcaaccgtgccaacaggagggccacgtggagagctggcgtcagcagtggcaccaatggaggggccagcaccagcgtcctagatggccccagcaccagctccaccatccggaccagaaatgctgccagagctggcgccagcttcttctcctggatccagtaagagtttcggcaccgttgacgaactgcagcgatcttactggccaagccagagcgcctcctctcagattccttctcgacacagcaccctaggcggcttcttcctgtcagtcggaggtggcatgcaagatgaagctctctttgctcttcctgctttcattttgtgcttttccttgtgttttcatgttttgggtatcagtgttacattaaagttgcaaaattaa

SEQ ID NO: 152588 - DNA, 2618 bp, Homo sapiens
  Payload ID: 10023
  Gene Symbol: MAGED4B
  Gene Name: melanoma antigen family D4B
  Uniprot ID: Q96JG8
  ENST ID: ENST00000485287
  CDS Start-End: 143-2416
gtccgggctgctgtgctggcagcagtaggcgagggcgcggctgcggggttcctggtgctgaggacggacgccattggagttcccgagaagctgcttcaccctccctctcaggctgagctctcatctccctgggacccgcagcatggctgagggaagcttcagcgtgcaatcggaaagctacagtgttgaagacatggatgagggtagcgacgaagtcggggaggaagagatggttgaaggcaacgactatgaagaattcggtgcgtttggtggctatggcaccctcaccagctttgacatccatatcctcagagccttcggaagcttgggtccaggccttcgcatcttatcgaatgagccctgggaactggaaaaccctgtgctggcccagaccctggtggaggcattgcagctggatccggaaacacttgccaatgagacggccgcccgtgctgccaacgtagcccgcgccgccgcctccaaccgtgcggctcgggccgctgccgccgctgcccgtaccgccttcagtcaggtggtcgctagccaccgggtggccacgccgcaggtctcaggagaggatacccagcccacgacctacgccgccgaggctcaggggcccacccctgagccaccccttgcttctccgcagacctcccagatgttagtcaccagtaagatggctgcccccgaggctccggcaacctccgcacagtcccagacaggctccccggcccaggaggctgctactgagggccctagtagcgcctgtgctttctctcaggctccgtgtgccagggaggtggacgccaaccggcccagcacagccttcctgggccagaatgatgtcttcgatttcactcagccggcaggtgtcagtggcatggccttcccgcgccccaagagacctgccccagcccaagaggctgccacagagggccccagtgctgcctctggtgtgccccagacgggacctggcagggaggtggcagccacccggcccaagaccaccaagtcggggaaggcgctggccaagactcggtgggtggagcctcagaatgttgtggcagcagctgctgccaaggccaagatggccacgagcatccctgagccggagggtgcagctgctgccactgctcagcacagtgctgagccctgggccaggatgggaggcaagaggaccaagaagtccaagcacctggatgatgagtatgagagcagcgaggaggagagagagactcccgcggtcccacccacctggagagcatcacagccctcattgacggtgcgggctcagttggcccctcggcccccgatggccccgaggtcccagataccctcaaggcacgtactgtgcctgcccccccgcaacgtgacccttctgcaggagagggcaaataagttggtgaaatacctgatgattaaggactacaagaagatccccatcaagcgcgcagacatgctgaaggatgtcatcagagaatatgatgaacatttccctgagatcattgaacgagcaacgtacaccctggaaaagaagtttgggatccacctgaaggagatcgacaaggaagaacacctgtatattcttgtctgcacacgggactcctcagctcgcctccttggaaaaaccaaggacactcccaggctgagtctcctcttggtgattctgggcgtcatcttcatgaatggcaaccgtgccagcgaggctgtcctctgggaggcactacgcaagatgggactgcgccctggggtgaggcacccattcctcggcgatctgaggaagctcatcacagatgactttgtgaagcagaagaacccggagctcagagaggagacgcctctgagcatggctcccagctggtacctggaatacaagaagatccccaacagcaacccacctgagtatgaattcctctggggcctgcgagcccgccatgagaccagcaagatgagggtcctgagattcatcgcccagaatcagaaccgagacccccgggaatggaaggctcatttcttggaggctgtggatgatgctttcaagacaatggatgtggatatggccgaggaacatgccagggcccagatgagggcccagatgaatatcggggatgaagcgctgattggacggtggagctgggatgacatacaagtcgagctcctgacctgggatgaggacggagattttggcgatgcctgggccaggatcccctttgctttctgggccagataccatcagtacattctgaatagcaaccgtgccaacaggagggccacgtggagagctggcgtcagcagtggcaccaatggaggggccagcaccagcgtcctagatggccccagcaccagctccaccatccggaccagaaatgctgccagagctggcgccagcttcttctcctggatccagcaccgttgacgaactgcagcgatcttactggccaagccagagcgcctcctctcagattccttctcgacacagcaccctaggcggcttcttcctgtcagtcggaggtggcatgcaagatgaagctctctttgctcttcctgctttcattttgtgcttttccttgtgttttcatgttttgggtatcagtgttacattaaagttgcaaaattaa

SEQ ID NO: 152589 - DNA, 534 bp, Homo sapiens
  Payload ID: 10023
  Gene Symbol: MAGED4B
  Gene Name: melanoma antigen family D4B
  ENST ID: ENST00000481193
  CDS Start-End: 1-147
gtgtcccttccctgcccacaccccttcagtgaagcaggaagacggggcttgagtgcggcgcaccgctcccacacacagcgagggctgcctggtgactgctggatgaaaggaatgatagcctgggaaccaaggacactcccaggctgagtctcctcttggtgattctgggcgtcatcttcatgaatggcaaccgtgccagcgaggctgtcctctgggaggcactacgcaagatgggactgcgccctggggtgaggcacccattcctcggcgatctgaggaagctcatcacagatgactttgtgaagcagaagtacctggaatacaagaagatccccaacagcaacccacctgagtatgaattcctctggggcctgcgagcccgccatgagaccagcaagatgagggtcctgagattcatcgcccagaatcagaaccgagacccccgggaatggaaggctcatttcttggaggctgtggatgatgctttcaagacaatggatgtggatatggccgaggaacatgccagggcccaga

SEQ ID NO: 152590 - DNA, 917 bp, Homo sapiens
  Payload ID: 10023
  Gene Symbol: MAGED4B
  Gene Name: melanoma antigen family D4B
  ENST ID: ENST00000490581
  CDS Start-End: 1-101
ctgtcctctgggaggcactacgcaagatgggactgcgccctgggtatgattggcctctccagctcctcccctcggtgctatcctctggccaaagagggtgaggcacccattcctcggcgatctgaggaagctcatcacagatgactttgtgaagcagaagtacctggaatacaagaagatccccaacagcaacccacctgagtatgaattcctctggggcctgcgagcccgccatgagaccagcaagatgagggtcctgagattcatcgcccagaatcagaaccgagacccccgggaatggaaggctcatttcttggaggctgtggatgatgctttcaagacaatggatgtggatatggccgaggaacatgccagggcccagatgagggcccagatgaatatcggggatgaagcgctgattggacggtggagctgggatgacatacaagtcgagctcctgacctgggatgaggacggagattttggcgatgcctgggccaggatcccctttgctttctgggccagataccatcagtacattctgaatagcaaccgtgccaacaggagggccacgtggagagctggcgtcagcagtggcaccaatggaggggccagcaccagcgtcctagatggccccagcaccagctccaccatccggaccagaaatgctgccagagctggcgccagcttcttctcctggatccagcaccgttgacgaactgcagcgatcttactggccaagccagagcgcctcctctcagattccttctcgacacagcaccctaggcggcttcttcctgtcagtcggaggtggcatgcaagatgaagctctctttgctcttcctgctttcattttgtgcttttccttgtgttttcatgttttgggtatcagtgttacattaaagttgcaaaattaa

SEQ ID NO: 152591 - DNA, 2482 bp, Homo sapiens
  Payload ID: 10023
  Gene Symbol: MAGED4B
  Gene Name: melanoma antigen family D4B
  Uniprot ID: Q96JG8
  ENST ID: ENST00000497164
  CDS Start-End: 55-2280
cggctgcggggttcctggtgctgaggacggacgccattggagttcccgagaagcatggctgagggaagcttcagcgtgcaatcggaaagctacagtgttgaagacatggatgagggtagcgacgaagtcggggaggaagagatggttgaaggcaacgactatgaagaattcggtgcgtttggtggctatggcaccctcaccagctttgacatccatatcctcagagccttcggaagcttgggtccaggccttcgcatcttatcgaatgagccctgggaactggaaaaccctgtgctggcccagaccctggtggaggcattgcagctggatccggaaacacttgccaatgagacggccgcccgtgctgccaacgtagcccgcgccgccgcctccaaccgtgcggctcgggccgctgccgccgctgcccgtaccgccttcagtcaggtggtcgctagccaccgggtggccacgccgcaggtctcaggagaggatacccagcccacgacctacgccgccgaggctcaggggcccacccctgagccaccccttgcttctccgcagacctcccagatgttagtcaccagtaagatggctgcccccgaggctccggcaacctccgcacagtcccagacaggctccccggcccaggaggctgctactgagggccctagtagcgcctgtgctttctctcaggctccgtgtgccagggaggtggacgccaaccggcccagcacagccttcctgggccagaatgatgtcttcgatttcactcagccggcaggtgtcagtggcatggccttcccgcgccccaagagacctgccccagcccaagaggctgccacagagggccccagtgctgcctctggtgtgccccagacgggacctggcagggaggtggcagccacccggcccaagaccaccaagtcggggaaggcgctggccaagactcggtgggtggagcctcagaatgttgtggcagcagctgctgccaaggccaagatggccacgagcatccctgagccggagggtgcagctgctgccactgctcagcacagtgctgagccctgggccaggatgggaggcaagaggaccaagaagtccaagcacctggatgatgagtatgagagcagcgaggaggagagagagactcccgcggtcccacccacctggagagcatcacagccctcattgacggtgcgggctcagttggcccctcggcccccgatggccccgaggtcccagataccctcaaggcacgtactgtgcctgcccccccgcaacgtgacccttctgcaggagagggcaaataagttggtgaaatacctgatgattaaggactacaagaagatccccatcaagcgcgcagacatgctgaaggatgtcatcagagaatatgatgaacatttccctgagatcattgaacgagcaacgtacaccctggaaaagaagtttgggatccacctgaaggagatcgacaaggaagaacacctgtatattcttgtctgcacacgggactcctcagctcgcctccttggaaaaaccaaggacactcccaggctgagtctcctcttggtgattctgggcgtcatcttcatgaatggcaaccgtgccagcgaggctgtcctctgggaggcactacgcaagatgggactgcgccctggggtgaggcacccattcctcggcgatctgaggaagctcatcacagatgactttgtgaagcagaagtacctggaatacaagaagatccccaacagcaacccacctgagtatgaattcctctggggcctgcgagcccgccatgagaccagcaagatgagggtcctgagattcatcgcccagaatcagaaccgagacccccgggaatggaaggctcatttcttggaggctgtggatgatgctttcaagacaatggatgtggatatggccgaggaacatgccagggcccagatgagggcccagatgaatatcggggatgaagcgctgattggacggtggagctgggatgacatacaagtcgagctcctgacctgggatgaggacggagattttggcgatgcctgggccaggatcccctttgctttctgggccagataccatcagtacattctgaatagcaaccgtgccaacaggagggccacgtggagagctggcgtcagcagtggcaccaatggaggggccagcaccagcgtcctagatggccccagcaccagctccaccatccggaccagaaatgctgccagagctggcgccagcttcttctcctggatccagcaccgttgacgaactgcagcgatcttactggccaagccagagcgcctcctctcagattccttctcgacacagcaccctaggcggcttcttcctgtcagtcggaggtggcatgcaagatgaagctctctttgctcttcctgctttcattttgtgcttttccttgtgttttcatgttttgggtatcagtgttacattaaagttgcaaaattaa

SEQ ID NO: 152592 - DNA, 889 bp, Homo sapiens
  Payload ID: 10023
  Gene Symbol: MAGED4B
  Gene Name: melanoma antigen family D4B
  ENST ID: ENST00000486010
  CDS Start-End: 75-889
gttcctggtgctgaggacggacgccattggagttcccgagaaggctgagctctcatctccctgggacccgcagcatggctgagggaagcttcagcgtgcaatcggaaagctacagtgttgaagacatggatgagggtagcgacgaagtcggggaggaagagatggttgaaggcaacgactatgaagaattcggtgcgtttggtggctatggcaccctcaccagctttgacatccatatcctcagagccttcggaagcttgggtccaggccttcgcatcttatcgaatgagccctgggaactggaaaaccctgtgctggcccagaccctggtggaggcattgcagctggatccggaaacacttgccaatgagacggccgcccgtgctgccaacgtagcccgcgccgccgcctccaaccgtgcggctcgggccgctgccgccgctgcccgtaccgccttcagtcaggtggtcgctagccaccgggtggccacgccgcagacctcccagatgttagtcaccagtaagatggctgcccccgaggctccggcaacctccgcacagtcccagacaggctccccggcccaggaggctgctactgagggccctagtagcgcctgtgctttctctcaggctccgtgtgccagggaggtggacgccaaccggcccagcacagccttcctgggccagaatgatgtcttcgatttcactcagccggcaggtgtcagtggcatggccttcccgcgccccaagagacctgccccagcccaagaggctgccacagagggccccagtgctgcctctggtgtgccccagacgggacctggcagggaggtggcagccacccggcccaagaccaccaagtcggggaaggcgctggccaagactcggtg

SEQ ID NO: 152593 - DNA, 3630 bp, Homo sapiens
  Payload ID: 10024
  Gene Symbol: MAGEE1
  Gene Name: melanoma antigen family E1
  Uniprot ID: Q9HCI5
  ENST ID: ENST00000361470
  CDS Start-End: 208-3081
attcactgctggccagtgcctgcctttttcaccacctctaatttcagcttcagcagttgcttggaactttggttctggcagcagcagcaacatcattaccgctagcggcagttttgtgccgaggcacctacacacctcccgtcctctctgccagatcgcgggcctgtcggtgtctgctcctacacgccaacgccggtgggcaggaccatgtctctggtaagccagaattcgcgccgccgccgccgccgcgttgcaaaggctactgcgcacaacagcagctggggcgaaatgcaggcccctaatgcccccggtctccccgctgatgtgccaggctcagacgtcccccagggtcccagcgattcccagatcctccagggcctctgcgcctctgagggcccaagcacctccgttctgcccacctccgctgagggcccaagcacctttgtgccgcccaccatctctgaggcctcaagcgcctccgggcagcccaccatctctgagggacctggcacctccgtgctgcccacccccagtgagggcctaagcacctccgggcctcccaccatctctaaggggctgtgcacctctgtgacgcttgccgcctctgagggccggaacacctccaggccgcccacttcctctgaggaacctagcacctccgtgccgcccaccgcctctgaggtaccgagcacctccctgccgcccacccctggtgagggaacgagcacctccgtgccgcccacagcctatgagggaccaagcacctccgtggtgcccacccctgatgagggaccaagcacctccgtgctgcctacacctggtgagggaccaggcacctccgtgccgctcgccgccactgagggcctgagcacctccgtgcaggccactcctgatgagggaccgagcacctccgtgccgcccaccgccactgagggcctaagcacccccgtgccacccacccgtgatgagggaccgagcacctccgtgccggccactcctggtgagggaccgagcacctccgtgctgcccgccgcctctgacggacaaagcatctccttggtgcccacccgcggtaagggatcaagcacctccgtgccccccaccgccaccgagggcctgagcacctccgtgcagcccactgctggtgagggatcgagcacctccgtgccgcccacccctggtgggggactgagcacctccgtgccgcccaccgccactgaggagttgagcacctccgtgccgcccactcccggtgagggaccaagcacttccgtactgccaatccccggtgagggactgagcacctctgtgccgcccaccgcctctgatggatcggacacctccgtgccgcccactcctggtgagggcgcaagcaccttagtgcagcccaccgcccctgacggaccgggaagctccgtgctgcctaaccctggtgagggcccgagcacattgtttagctctagtgcttctgtggaccggaacccctccaagtgttcccttgttttgccaagccctagggtaaccaaggcctccgtggactcagattctgagggtcctaagggtgcagaaggccctatagaattcgaggtcctgagagactgtgagagccccaactccattagtattatgggcctcaatacttcccgggttgcaattaccctgaagccccaagaccctatggaacagaacgtagctgagctgttgcagttcctgctggtgaaggatcagagcaagtaccctatccgggagtctgaaatgcgggaatatattgttaaagaatatcgcaaccagtttcctgagatactcaggcgagcagcagcccacctggagtgcatttttaggtttgaattgagagaacttgaccctgaggcacacacctacattctgttaaacaaactgggacctgtgccctttgaagggttagaagagagcccaaatgggccaaagatgggcctcctgatgatgattctaggccaaatattcctgaatggcaaccaagccaaggaggctgagatttgggaaatgctctggaggatgggggtgcagcgggaaaggaggctttccatttttgggaacccaaagagacttctgtctgtggagtttgtatggcagcgttacttagactacaggccagtaactgactgtaaaccagtggagtatgagtttttctggggcccaagatcccacctagaaaccaccaagatgaaaattctgaagttcatggcgaaaatatataacaaagatcctatggattggccagagaaatacaacgaagctctggaagaagatgctgccagagcctttgctgagggttggcaggctctccctcactttaggaggcccttttttgaggaagctgctgcagaggtaccatcccctgattcagaggtttccagctattcctcaaaatatgccccacattcatggcctgagtcaagattggagagcaaggcaaggaagctggtgcagttatttctgcttatggattcaactaagctgcctataccaaagaaaggaattctgtactacattggccgagagtgcagcaaagtgttccctgacctcctgaatcgtgctgcccgcaccctgaaccatgtctatgggacagaactagtggtacttgatcccaggaatcactcctatactctgtacaaccgaagggagatggaagaaactgaggagatcgtagacagtccaaacaggcctggcaacaactttttgatgcaggtcctaagcttcatctttattatgggcaaccatgccagggagtctgcagtctgggcctttctgcggggcttaggggttcaagctgggagaaagcatgtgattacctgcagatacttgagtcagcgctatatagacagtttacgggttcctgacagtgatccagtgcaatatgagtttgtatggggtcctagagcccgtttggaaacctctaagatgaaagccttgcgatatgtggccagaatccacagaaaggaaccacaggactggccacagcagtacagggaggcaatggaagatgaggccaatagagctgatgttgggcacaggcaaatctttgttcacaacttcaggtagaggaatgcatggcagtcagaggggccttgcaaggaggggcctttgagcctcagttctcatgtattggggggtgggggtgggtacatattgtatttggtatttgtgttccagttatatttatgtcttttcatatttagttctggtgtggtgtctggaaatgtttcaactgttttaatatattgtctgattgggtaaatgtgattgaccacttgctgtctctgttgtattttggtatgagttttgatagctctataaaatgttttggaaatctttccatcttgttgcattatctagaaaagaatatagcatatagctatagatataggcttttccttgaaagcttgaaaaaaattcgccagtaaaataatctagcttaaagtgataaactaacaaacaaatataacaacaactgaaaaggcactctaaattgtggctggcttccctttctgtctgctattgtatgaagaatactgatgtttacctgtatttgctttgctgtactaaaatgtaatgaaaaataaaagattaataaatgaaacataatgctaa

SEQ ID NO: 152594 - DNA, 2249 bp, Homo sapiens
  Payload ID: 10025
  Gene Symbol: MAGEE2
  Gene Name: melanoma antigen family E2
  Uniprot ID: Q8TD90
  ENST ID: ENST00000373359
  CDS Start-End: 186-1757
gaggcttgcagtcgttgctggccagcacttgtgtagaaagatcgctcttcacaccagatttcacttttgatccttccagctccagggtctcgggcttcagctttgtgccgaggcaccaacactgctgcggtcctctctccgactgatcgctgatctcaccgttcccgctcctgtctcctggaaccatgtctctggtaagccagaatgcacgccactgtagcgcagagatcactgcagattacggcgacggcagaggtgaaatacaagctactaacgcctccgggtcccccacctccatgctagtcgttgatgccccccagtgccctcaggcgccaatcaactctcagtgtgtcaacacttcccaggccgttcaggacccgaatgacctggaggtcctgatcgacgagcagtccagacgtttgggggcgctcagggtccatgaccctctagaagacaggtcgattgctttggtgaatttcatgagaatgaaaagccagacggaggggtctatccagcagtccgagatgctggagtttctcagagagtactcagatcagttccctgagatcctcagacgagcctcagctcacctggaccaggtctttgggttgaacctgagagttattgatcctcaggctgacacctacaatttagtcagcaaacggggtttccagatcaccgataggatagcggagtccctggacatgccaaaagcaagtctcctggccctagtcctaggccacatcctcttgaatgggaaccgagcaagagaggcctccatttgggacttgctgctaaaagttgatatgtgggataagcctcagaggatcaacaacctctttgggaacacaaggaacctcctcactactgactttgtgtgcatgcgattcttggagtactggccggtgtatggcactaatccccttgagtttgagttcttgtggggctctagagcccacagggaaatcacaaagatggaagccctgaagtttgtgtcagatgcccatgatgaagaaccctggagctggccagaagaatataataaggccctggaaggtgacaaaaccaaagaaagaagcctgactgctggcttagagttctggtcggaggacactatgaatgataaggcaaatgatttggtccagttggctattagtgtcactgaggagatgctgcctatacatcaggatgagctattggctcacactggcaaagaatttgaggatgtgttcccaaatatcctcaatagagctactctaattcttgatatgttctatgggttgtctctgattgaggttgataccagtgagcacatctacctccttgtccagcaaccagaatcagaggaagagcaagtgatgctagagagcctggggagacccactcaagaatatgtaatgccaatcctaggtttgatcttcctgatgggcaaccgtgtcaaagaggccaatgtctggaacttgcttcgaagatttagtgtggatgtagggagaaagcattccatcacccgtaagcttatgagacagcgctatctggaatgcaggccactgtcctactctaatccagttgaatatgagcttctatggggtcctcgagctcaccatgaaaccatcaaaatgaaagtcttggagtacatggccaggctctacagaaagcgaccacagaactggccagaacaatatagggaggctgtggaagatgaggaggccagagccaaatctgaggcaactatcatgtttttccttgaccccacgtgaagtctagggaatatgtatcacttcagctgagtggcataagttaaagatgccttggtaaaataggcattggggctctaaattagaatccaggtagggcttgtgtgggaagtacaaattgtgcttgctgtctgtgttccaattctagtagtatttccttccttttaatatactcttggattaggttaatgaccaatatttataaatggaatttttcatttgccatcccggtcttgtttcagcataaaagttcagacagctctgtaaaatgtattgataatatttacatctttgaaataatcagtaaaatggtctggtacaggagttaaataacaatgacacacacacaacaaaacaaacacaaaaccactgatctgtgattgctctccctttgtgtctactgccgtatacatatatacaactatatatacacaaatatatatatacacaaaactgtcatttacctgtatttgcaataaaagcataatgaattag

SEQ ID NO: 152595 - DNA, 1636 bp, Homo sapiens
  Payload ID: 10026
  Gene Symbol: MAGEF1
  Gene Name: melanoma antigen family F1
  Uniprot ID: Q9HAY2
  ENST ID: ENST00000317897
  CDS Start-End: 182-1105
gcgttgcggccgcaggtttgactcccgtgcggtgcggcccagcagccacaaagctcccgctgccattgctccttgtactcccgccgtcactgccgctgtccaacccctcccccggggcttgcgcggcggctcccacacccctcggcccgtgtacgcgctctgcacctgcctgcccgaaaacatgttgcagacaccagagagcagggggctcccggtcccgcaggccgagggggagaaggatggcggccatgatggtgagacccgggccccgaccgcctcgcaggagcgccccaaggaggagcttggcgccgggagggaggagggggctgcggagcccgccctcacccggaaaggcgcgagggccttggcggccaaagccttggcaaggcgcagggcctaccgccggctgaatcggacggtggcggagttggtgcagttcctcctggtgaaagacaagaagaagagtcccatcacacgctcggagatggtgaaatacgttattggagacttgaagattctgttcccggacatcatcgcaagggccgcagagcatctgcggtatgtctttggttttgagctgaaacagtttgaccgcaagcaccacacttacatcctgatcaacaaactaaaacctctggaggaggaggaggaggaggatctgggaggagatggccccagattgggtctgttaatgatgatcctgggccttatctatatgagaggtaatagcgccagggaggcccaggtctgggagatgctgcgtcggttgggggtgcaaccctcaaagtatcatttcctctttgggtatccgaagaggcttattatggaagattttgtgcagcagcgatatctcagttacaggcgggtgcctcacaccaatccaccagaatatgaattctcttggggtccccgaagcaacctggaaatcagcaagatggaagtcctggggttcgtggccaaactgcataagaaggaaccgcagcactggccagtgcagtaccgtgaggccctagcagacgaggccgacagggccagagccaaggccagagctgaagccagtatgagggccagggccagtgctagggccggcatccacctctggtgagggttggtgaaaagttggccagtgggtccccgtgaggacgaactactgtcctgagtcataagtaatatgggtggggcgagggtcttatttctgtagaaatcgtgtgactttaaggatttagattttgtatcttatgttttgtaacatttaataattactgttaaaatgctgtttgtaaatgagattggtctactttttcctgtaggattttattgtagagttttgctggttttgtaaaatggatggaagaactttgtatttatactgtgattttgaacagattatgcaacattggaaggaaggctgtactttgatggtttgaaggaactcagcagtatgatgatctggttccaggggaaaaaaatagctggttggtgtctagccccccaacacttttgtctgttgtgtataaaagaagaaagactggcatgtaccttcatttgcttagctatttgagtatctagagaaaaattaaaatgcaatgagttagcagtataccctggcacacttaataaattaaacatttgtgga

SEQ ID NO: 152596 - DNA, 1462 bp, Homo sapiens
  Payload ID: 10027
  Gene Symbol: MAGEH1
  Gene Name: melanoma antigen family H1
  Uniprot ID: Q9H213
  ENST ID: ENST00000342972
  CDS Start-End: 271-930
gcgtggcaggagaggcggggccaattttgctgagctttctcgcgggcttgcagctgcggcaagtgctggcggcggctgctcgcgcaagtcagctggcgtgggaactaccctttgtagctgagaacggcttgtttattgctacaaagactctattgacattggtagcttcagcggcagcagcttcttacggtataaagctgttgcttcctgaagaggctacaagcatccttccctaggactgctgtaagctttgagcctctagcaggagacatgcctcggggacgaaagagtcggcgccgccgtaatgcgagagccgcagaagagaaccgcaacaatcgcaaaatccaggcctcagaggcctccgagacccctatggccgcctctgtggtagcgagcacccccgaagacgacctgagcggccccgaggaagacccgagcactccagaggaggcctctaccacccctgaagaagcctcgagcactgcccaagcacaaaagccttcagtgccccggagcaattttcagggcaccaagaaaagtctcctgatgtctatattagcgctcatcttcatcatgggcaacagcgccaaggaagctctggtctggaaagtgctggggaagttaggaatgcagcctggacgtcagcacagcatctttggagatccgaagaagatcgtcacagaagagtttgtgcgcagagggtacctgatttataaaccggtgccccgtagcagtccggtggagtatgagttcttctgggggccccgagcacacgtggaatcgagcaaactgaaagtcatgcattttgtggcaagggttcgtaaccgatgctctaaagactggccttgtaattatgactgggattcggacgatgatgcagaggttgaggctatcctcaattcaggtgctaggggttattccgccccttaagtagatctgaggcagacccttgggggtgtaaaagagagtcacaggtaccccaaggagtagatgccagggtcctaagttgaaaatgatgtcgattgggggcgggggacactgtatttgatatttgtgatcagtgatcattgttcaactgcgaaatagagtgtttgcttttgataatggaaaattgtattcgttttaaaattccgtttgttgagaataacaatatgtttaaaaatataattgaacaaatttttttctttgtttcctgtcattgacatttagtataacagttttgctaacgttctaaaatgaagtcgttccatcataatctatgatcttgtacagcacttatagaaataagctgttcttttgaagttgaaatacccagtaaaatgttgaagaaggatggaggatttcttcatatctgacgtttctgaaaccctttgtgtctgctgttgtgtgaagattgacatttaccatgattttccttagttactgcagaacatagagaaaaataaaagcctaacgaatagta

SEQ ID NO: 152597 - DNA, 4298 bp, Homo sapiens
  Payload ID: 10028
  Gene Symbol: MAGEL2
  Gene Name: melanoma antigen family L2
  Uniprot ID: Q9UJ55
  ENST ID: ENST00000532292
  CDS Start-End: 100-3849
gggagcctctgaacagccacgtaggcattctcttctctctggaggaaaaggcccagcagctgtccgaggaaaagacccaccagctgtcagcaaagggacatgtcgcagctaagtaagaatctgggtgactcgagtcctccggcggaggccccgaagccgcctgtctatagccgccctacggttctgatgcgggccccgcccgcttcctcccgggctccgccagtcccttgggatccacctccaattgacttgcaggcttcattggccgcttggcaggcacctcagcctgcctgggaggccccacagggccagctgcccgccccggtggttccgatgacccagcctcctgccctagggggcccgatagtcccggctcccccgctggggggcccgatgggtaagcctccgactcccggggtcctgatggtgcatcctccacctccgggagccccgatggcccagcctccgaccccgggagtcctgatggtgcatccttcagctcccggagctcccatggcccatcctcctcctccggggaccccaatgtcccaccctccccctccggggaccccaatggcccatcctcctcctccggggaccccgatggcccatcctcctcctccggggaccccgatggtgcatcctcctcctccggggaccccgatggctcatcctccccctccggggacaccgatggctcatcctccccctccggggacaccgatggctcatcctccacctccggggacaccgatggctcatcctccccctccgggtacaccgatggcccagcctccagctccgggagtcctgatggcccagcctctgactccgggagtcctgatggtccagcctgctgctccgggagcaccgatggtccagccgcctccagcagccatgatgacccagcctcagccttcaggagcaccgatggccaagcctccaggtccaggagtcctgatgattcatcctccaggtgcgagagctccgatgacccagcctccagcttcaggagcaccgatggcacagccggcggccccacctgcacagccgatggccccacctgcacagccgatggcttcttgggccccgcaggctcagcctctgatcctgcaaatccagtctcaagttataagggctcctccgcaggttccccagggcccgcaggcacccccagcgcagctagccacacccccgggctggcaggcgacctcgccaggatggcaggccacgcagcaaggctggcaggccactcccctgacttggcagaccacgcaggtcacctggcaggcaccagccgttacctggcaggtgccgccgcccatgcgccaggggcccccgcccatccgccctggcccaccacccatccgccctggcccaccaccggtgcgacaggccccaccgctgatccgccaggccccaccggtgatccgccaggccccacccgtgatccgccaggccccacccgtgatccgccaggcccccgctgtgatccgccaggccccacctgtgatccgccaggccccacctgtgatccgccaggctccacctgtgatccgccaggccccgccgctgatccgccaggcgccgccgcccatccgacctgccccacaggtcctggccacccagccaccgctctggcaggccctgccacccccacctccactgcggcaggccccgcaggctaggctgccggccccgcaggtgcaggcggcgccgcaggtgcctacggccccacctgctacgcaggtacccgcggcgccgcccgctggcccgcaggtgccccagcctgtgctgccggccccgctgtctgccccactgtctgccccgcaggctgtgcactgcccttccatcatctggcaggcccccaaaggtcagcccccggtgccacacgagattccaacgtcaatggaattccaggaggtgcagcagacacaggcgctggcctggcaggcccagaaggcccccactcacatctggcagcccctgcctgcccaggaggcccagaggcaggctccccccttggtccagctggagcagccctttcagggagccccgccctcccaaaaagccgtgcaaatccagctacccccccagcaggcccaggcatcgggtccgcaagcggaggtgcccacactgccgctccagccttcctggcaggcaccgcctgcagtcttgcaggcccagcccggacccccggtagcagcggcaaattttcccctgggctccgctaaatcattgatgactccatcaggagaatgcagggcctcttctatagaccgcaggggctcctctaaagagcgcaggacctcctcgaaggagcgcagggccccttcaaaagaccgcatgatctttgctgccaccttctgtgctcccaaggcagtgtcagctgcgcgagcacacctgccagctgcctggaaaaacctgcctgccacaccggagacctttgctccctcctcaagtgtcttcccagctacctcccagtttcagcctgcctctctgaatgcctttaaaggcccctctgctgcctcagagaccccaaagtcactgccatatgctctgcaggatccctttgcctgtgtagaggccctgcctgcagttccatgggtcccacagcccaatatgaatgcctcaaaggcatcgcaggcagtgcccaccttcctgatggctacagcagctgccccccaggcaactgccaccactcaagaggcctccaagacctccgtcgagccgccacgccgctccggcaaggccacccggaagaagaagcatctggaagcccaagaggacagccgtggccacacgctagcctttcatgactggcagggcccaaggccctgggagaatctaaatctgagtgactgggaggtccaaagccctatccaggtctcgggtgactgggagcacccaaacaccccccgtggcctgagtggttgggagggccctagcacctccaggatcctgagtggctgggaagggcccagcgcatcctgggccctgagtgcctgggagggcccgagcacctccagggccctgggtctctctgaaagcccagggagctctctgcccgtagttgtgtctgaggtcgcaagtgtctctccgggatccagtgccacccaggataattccaaggtggaggcacagcccttgtctcccttggatgagagggcaaatgcgttggtgcagttcctcttagtcaaggaccaagccaaggtgcctgtccagcgctcggagatggtgaaagtcatcctccgagagtataaagatgagtgcttagatatcatcaaccgtgccaacaataagctggagtgtgcctttggttatcaattgaaagaaattgataccaaaaaccacgcctatattatcatcaacaagctgggctaccatacagggaatttggtggcatcctatttagacaggcccaagtttggccttctgatggtggtcttgagcctcatctttatgaaaggcaactgtgtcagggaggatctgatctttaattttctgttcaagttagggttggatgtccgggagacaaacggtctctttggaaatactaagaagctcatcaccgaagtgtttgtcaggcagaagtacctagagtacaggcgaatcccttacactgagcccgcagagtatgagttcctctggggccctcgagcattcctggaaaccagcaagatgcttgtcctgaggtttttggccaagctccataagaaagatccacagagctggccattccattaccttgaagcgctcgcagagtgtgagtgggaagacacagatgaggatgaacctgacaccggtgacagtgcccacggccccaccagcaggccccctccccgctaataggtgtagcagagatctcgctcctgtgtttccctggccagaggccactgacagggtggggggacatttttgttcctggtgtttgtgttccagttccacgagtgtacgtttggattttcaacttggtttcgtatctgccaaagctttgtacattttttatgtggtgttgatttcaatcggctactgttctgttctgtattttggcatctgtgtttttaagtgagatctgtggttctctgttttgtgttttaattgttatgttttggtatcagctttgtgctggctttgtgaaatgaattgagaagctatccatctcatttctggtatagttcatgtagcattgtaatcggttgttctttgaacgttcaaatgactcatcagtaaaaactgtctacagagaagtaaatatctatatctatatatataaatatactttcagcataacagaa

SEQ ID NO: 152598 - DNA, 2837 bp, Homo sapiens
  Payload ID: 10029
  Gene Symbol: MUM1
  Gene Name: melanoma associated antigen (mutated) 1
  Uniprot ID: Q2TAK8
  ENST ID: ENST00000415183
  CDS Start-End: 27-2225
cattgccacttgccacatgagtgtaaatgatggcggatgccaagtatgtcctctgccgatgggaaaagcgattatggcctgcgaaggttttggcccgaaccgcgacttcaacaaaaaataagagaagaaaggaatattttctagctgtgcaaatcctctctctagaggaaaaaattaaggtgaaaagcactgaagttgagatcctagagaagtctcaaattgaagccattgcttcctcgttagcctcacagaatgaggttcctgcggcacccctggaagaactggcctacagacggtcgcttcgcgtggctctggacgttctgagcgagggctcgatttggagtcaagaaagctctgcagggacaggtagagctgaccggtctctgcgagggaagcccatggagcatgtctcctcgccctgtgattcgaactcctcatctcttccccgcggagacgtgttgggcagttccagacctcacaggaggaggccatgtgtgcaacaaagcctgtcaagttcgttcacttgtgaaaaggaccccgagtgcaaagtggaccacaagaaggggctcaggaaaagtgaaaacccaagaggcccgttggtcctcccagctggaggtggtgcccaagatgagagtgggtccagaatccaccacaaaaattggactcttgcaagtaagaggggaggaaactcagcgcagaaggctagcttgtgcctgaatggatcttccctttcagaggacgacacggagagagacatggggagcaaaggaggcagctgggcagccccgtccttgccctccggggtcagggaggacgatccctgtgccaacgctgagggacacgaccccggtctgccgttgggcagcctcactgcgcccccagcccctgagccctcggcctgctcagagcctggagaatgccctgcgaaaaagaggccgcgcctggatggcagccaaaggccgcctgccgtgcagctggagcccatggcagcaggggccgcaccatcccccgggccggggccagggcccagagagtctgtgaccccgcgcagcaccgccaggctgggcccgcctccctcccacgcctctgcggatgcaaccagatgtcttccttgcccggattcccagaagctggagaaagagtgccagtcttccgaagagtccatggggtctaattccatgcgttctatcctggaggaagacgaggaagacgaggagccaccaagagtccttttataccacgaaccacgttcgtttgaagtaggaatgctagtctggcataaacataaaaaataccccttctggccagcagtggtcaaaagcgtcaggcagagagataagaaagcaagtgtgctatacatcgaaggacacatgaacccgaaaatgaaaggtttcacagtgtctcttaaaagtttaaagcactttgattgtaaagagaaacagacgcttctgaatcaagccagggaggacttcaaccaggacatcggctggtgtgtctccctcatcaccgactacagggtccggttaggctgcgggtcttttgctggctctttcctggaatattacgcggctgatataagctatcctgtccgaaaatccatccagcaggacgtcttggggaccaagcttcctcaactgagcaaggggagccccgaggagcccgtggtggggtgccccctggggcagaggcagccctgccggaaaatgctccccgaccgctcgcgggccgcccgggaccgggccaaccagaagctggtggagtacattgtgaaggccaagggcgcggagagccacctgcgggccatcctaaagagcaggaagccatctcgctggctgcagaccttcctgagctccagccagtacgtgacctgtgtggagacctacctggaggatgaggggcagctggacctggtggtgaagtacctgcagggcgtctaccaggaggtgggggccaaggtgctccagcgcaccaacggcgaccggatccggttcattctggacgtgcttctgcccgagtgctgggaaatgcgagtgcgtgcgcttgaccctgtgcggagacggagccgcttacttgacccctgtgcagagatggagctgcttagaagctgtcagcaccagggggtgcgaactccctccctactgcgggcgcacagatgcttcccagcctcggtgggccatcatctgtgcgatctctgcggtggacgaggtggactacaagacggctgaggagaagtacatcaaggggccttcgctgagctaccgggaaaaagaaatatttgacaaccagctccttgaagagcggaaccggcgccgtcggtgagggagcagccggctgtgctgtcagcggggcctggcggtggaagcgcctccagtgtgcatgagcgtgtctgaagatggggggctcagggggcacgtttgcgtttggacctgtctgtgcgttctcctgcgtggcagtcctgatttccatgcttctggagaatccatttcgttaacactgaaagccagttctcttttcctggcagtttttttcattttatttttggcattttttacaagataccgttcgggaaaggcttttgaaaggacggaagcgtattcactgtgcgccagtactcctggctgtgctgtggtttctcccgacgtgcacatcgatctcgtatgtgtggcatctgatattaaacgggaggttttaagaagcgtctgccgtgatcatggagcttcggaagcgggaatggttcttccgggtttgctgttttgtctgtttcccccttgtgtggtttccgcctgcgacagttccagaatttgctctcccactcagtgtgctctgcagctgtgagg

SEQ ID NO: 152599 - DNA, 2793 bp, Homo sapiens
  Payload ID: 10029
  Gene Symbol: MUM1
  Gene Name: melanoma associated antigen (mutated) 1
  ENST ID: ENST00000587460
  CDS Start-End: 27-266
cattgccacttgccacatgagtgtaaatgatggcggatgccaagtatgtcctctgccgatgggaaaagcgattatggcctgcgaaggttttggcccgaaccgcgacttcaacaaaaaataagagaagaaaggaatattttctagctgtgcaaatcctctctctagaggaaaaaattaaggtgaaaagcactgaagttgagatcctagagaagtctcaaattgaagccattgcttcctcgttagggaacgcgaatcccctgagctgaaggagaaggaaaaatggatccgctttcttaaacctttccagaatttgcccctagaaccactcctattcttgacgcccagaatggtcagtgcctcacagaatgaggttcctgcggcacccctggaagaactggcctacagacggtcgcttcgcgtggctctggacgttctgagcgagggctcgatttggagtcaagaaagctctgcagggacaggtagagctgaccggtctctgcgagggaagcccatggagcatgtctcctcgccctgtgattcgaactcctcatctcttccccgcggagacgtgttgggcagttccagacctcacaggaggaggccatgtgtgcaacaaagcctgtcaagttcgttcacttgtgaaaaggaccccgagtgcaaagtggaccacaagaaggggctcaggaaaagtgaaaacccaagaggcccgttggtcctcccagctggaggtggtgcccaagatgagagtgggtccagaatccaccacaaaaattggactcttgcaagtaagaggggaggaaactcagcgcagaaggctagcttgtgcctgaatggatcttccctttcagaggacgacacggagagagacatggggagcaaaggaggcagctgggcagccccgtccttgccctccggggtcagggaggacgatccctgtgccaacgctgagggacacgaccccggtctgccgttgggcagcctcactgcgcccccagcccctgagccctcggcctgctcagagcctggagaatgccctgcgaaaaagaggccgcgcctggatggcagccaaaggccgcctgccgtgcagctggagcccatggcagcaggggccgcaccatcccccgggccggggccagggcccagagagtctgtgaccccgcgcagcaccgccaggctgggcccgcctccctcccacgcctctgcggatgcaaccagatgtcttccttgcccggattcccagaagctggagaaagagtgccagtcttccgaagagtccatggggtctaattccatgcgttctatcctggaggaagacgaggaagacgaggagccaccaagagtccttttataccacgaaccacgttcgtttgaagtaggaatgctagtctggcataaacataaaaaataccccttctggccagcagtggtcaaaagcgtcaggcagagagataagaaagcaagtgtgctatacatcgaaggacacatgaacccgaaaatgaaaggtttcacagtgtctcttaaaagtttaaagcactttgattgtaaagagaaacagacgcttctgaatcaagccagggaggacttcaaccaggacatcggctggtgtgtctccctcatcaccgactacagggtccggttaggctgcgggtcttttgctggctctttcctggaatattacgcggctgatataagctatcctgtccgaaaatccatccagcaggacgtcttggggaccaagcttcctcaactgagcaaggggagccccgaggagcccgtggtggggtgccccctggggcagaggcagccctgccggaaaatgctccccgaccgctcgcgggccgcccgggaccgggccaaccagaagctggtggagtacattgtgaaggccaagggcgcggagagccacctgcgggccatcctaaagagcaggaagccatctcgctggctgcagaccttcctgagctccagccagtacgtgacctgtgtggagacctacctggaggatgaggggcagctggacctggtggtgaagtacctgcagggcgtctaccaggaggtgggggccaaggtgctccagcgcaccaacggcgaccggatccggttcattctggacgtgcttctgcccgaggccatcatctgtgcgatctctgcggtggacgaggtggactacaagacggctgaggagaagtacatcaaggggccttcgctgagctaccgggaaaaagaaatatttgacaaccagctccttgaagagcggaaccggcgccgtcggtgagggagcagccggctgtgctgtcagcggggcctggcggtggaagcgcctccagtgtgcatgagcgtgtctgaagatggggggctcagggggcacgtttgcgtttggacctgtctgtgcgttctcctgcgtggcagtcctgatttccatgcttctggagaatccatttcgttaacactgaaagccagttctcttttcctggcagtttttttcattttatttttggcattttttacaagataccgttcgggaaaggcttttgaaaggacggaagcgtattcactgtgcgccagtactcctggctgtgctgtggtttctcccgacgtgcacatcgatctcgtatgtgtggcatctgatattaaacgggaggttttaagaagcgtctgccgtgatcatggagcttcggaagcgggaatggttcttccgggtttgctgttttgtctgtttcccccttgtgtggtttccgcctgcgacagttccagaatttgctctcccactcagtgtgctctgcagctgtgagg

SEQ ID NO: 152600 - DNA, 522 bp, Homo sapiens
  Payload ID: 10029
  Gene Symbol: MUM1
  Gene Name: melanoma associated antigen (mutated) 1
  ENST ID: ENST00000592374
  CDS Start-End: 377-522
cggggtctgactgcaggacaaagggccgggagcgcgggagggcggcgcccgggagcggccacacatgccccgccaaccggtctcctcaggcagcactcccgggaaaaaggggtagacgcgcggcggaaggggcggggccggcgcgcggccgtggacgccggagagggcgaggccggcgctccttgggagcgcgcgcgtcccattgggcagcgggcggaagggggcggagcttggcgccgccgcgaggcaagccccgcccccggccccgcggggagcggcggcggcggcggcggcggcggtggcggaggcggacacattggcgtgagacctgggagtacgttgtgccaaatcattgccacttgccacatgagtgtaaatgatggcggatgccaagtatgtcctctgccgatgggaaaagcgattatggcctgcgaaggttttggcccgaaccgcgacttcaacaaaaaataagagaagaaaggaatattttctagctgtgcaaatcctctctctagaggaaaa

SEQ ID NO: 152601 - DNA, 4067 bp, Homo sapiens
  Payload ID: 10029
  Gene Symbol: MUM1
  Gene Name: melanoma associated antigen (mutated) 1
  ENST ID: ENST00000591806
  CDS Start-End: 77-2212
ttcgttccaggacacattggcgtgagacctgggagtacgttgtgccaaatcattgccacttgccacatgagtgtaaatgatggcggatgccaagtatgtcctctgccgatgggaaaagcgattatggcctgcgaaggttttggcccgaaccgcgacttcaacaaaaaataagagaagaaaggaatattttctagctgtgcaaatcctctctctagaggaaaaaattaaggtgaaaagcactgaagttgagatcctagagaagtctcaaattgaagccattgcttcctcgttagcctcacagaatgaggttcctgcggcacccctggaagaactggcctacagacggtcgcttcgcgtggctctggacgttctgagcgagggctcgatttggagtcaagaaagctctgcagggacaggtagagctgaccggtctctgcgagggaagcccatggagcatgtctcctcgccctgtgattcgaactcctcatctcttccccgcggagacgtgttgggcagttccagacctcacaggaggaggccatgtgtgcaacaaagcctgtcaagttcgttcacttgtgaaaaggaccccgagtgcaaagtggaccacaagaaggggctcaggaaaagtgaaaacccaagaggcccgttggtcctcccagctggaggtggtgcccaagatgagagtgggtccagaatccaccacaaaaattggactcttgcaagtaagaggggaggaaactcagcgcagaaggctagcttgtgcctgaatggatcttccctttcagaggacgacacggagagagacatggggagcaaaggaggcagctgggcagccccgtccttgccctccggggtcagggaggacgatccctgtgccaacgctgagggacacgaccccggtctgccgttgggcagcctcactgcgcccccagcccctgagccctcggcctgctcagagcctggagaatgccctgcgaaaaagaggccgcgcctggatggcagccaaaggccgcctgccgtgcagctggagcccatggcagcaggggccgcaccatcccccgggccggggccagggcccagagagtctgtgaccccgcgcagcaccgccaggctgggcccgcctccctcccacgcctctgcggatgcaaccagatgtcttccttgcccggattcccagaagctggagaaagagtgccagtcttccgaagagtccatggggtctaattccatgcgttctatcctggaggaagacgaggaagacgaggagccaccaagagtccttttataccacgaaccacgttcgtttgaagtaggaatgctagtctggcataaacataaaaaataccccttctggccagcagtggtcaaaagcgtcaggcagagagataagaaagcaagtgtgctatacatcgaaggacacatgaacccgaaaatgaaaggtttcacagtgtctcttaaaagtttaaagcactttgattgtaaagagaaacagacgcttctgaatcaagccagggaggacttcaaccaggacatcggctggtgtgtctccctcatcaccgactacagggtccggttaggctgcgggtcttttgctggctctttcctggaatattacgcggctgatataagctatcctgtccgaaaatccatccagcaggacgtcttggggaccaagcttcctcaactgagcaaggggagccccgaggagcccgtggtggggtgccccctggggcagaggcagccctgccggaaaatgctccccgaccgctcgcgggccgcccgggaccgggccaaccagaagctggtggagtacattgtgaaggccaagggcgcggagagccacctgcgggccatcctaaagagcaggaagccatctcgctggctgcagaccttcctgagctccagccagtacgtgacctgtgtggagacctacctggaggatgaggggcagctggacctggtggtgaagtacctgcagggcgtctaccaggaggtgggggccaaggtgctccagcgcaccaacggcgaccggatccggttcattctggacgtgcttctgcccgaggccatcatctgtgcgatctctgcggtggacgaggtggactacaagacggctgaggagaagtacatcaaggggccttcgctgagctaccgggaaaaagaaatatttgacaaccagctccttgaagagcggaaccggcgccgtcggtgagggagcagccggctgtgctgtcagcggggcctggcggtggaagcgcctccagtgtgcatgagcgtgtctgaagatggggggctcagggggcacgtttgcgtttggacctgtctgtgcgttctcctgcgtggcagtcctgatttccatgcttctggagaatccatttcgttaacactgaaagccagttctcttttcctggcagtttttttcattttatttttggcattttttacaagataccgttcgggaaaggcttttgaaaggacggaagcgtattcactgtgcgccagtactcctggctgtgctgtggtttctcccgacgtgcacatcgatctcgtatgtgtggcatctgatattaaacgggaggttttaagaagcgtctgccgtgatcatggagcttcggaagcgggaatggttcttccgggtttgctgttttgtctgtttcccccttgtgtggtttccgcctgcgacagttccagaatttgctctcccactcagtgtgctctgcagctgtgaggaaacagccttcgttagaggcgggagcagagacgagccgctgctctgtgtcgtgtttgctgtggccgcagggagaggagcaggacacgcacctttccaggggcctctgtgtcccgcactgtgtgtgagtggaccgcagcgcgcagccacatgccctggctgccatgggccagaccgcctccacctcccccgcccgcctggcctgtcctgagtgcatttccctgcactgtgtcgtcactgcacagccagtcaccgcggtctcagtcatcggcgcggatggctatgctggggtcccagggtggccgcagcagtcagggtcactgtgggagccctggggtggagtgacaaaccgcattgtcctgtgcccgccatggcagaagcgcagcctttgtatggaggcccaaccgcgctcccgtctggagaagcggcttccggggtgtggctgccgggtcggctctggtccacagcacggtgccggggctgcaggttgttgagggctgtgactccgtggggctcagccaggctccagcagggtcagacgtgctgttaagagcaaagccacagacgatgacttgtccattctcagtggatgctccaggctgtgcctacacagcagtgctggtgacatgtccagggttccagggcccggtggcctgggagctgctttctccccactggctgggctgcatctggccctggctggaggccttgctttgaggggctgtgaccctcttcccccaggccctccccagccgacgacagccaccggagaggagatcggaacacgattgtctcagatgcagggcgctgtgcgggacgaagccgcaaggactctcgtatcgggcccttgggactcgggaggtgccagaggcggcggctgctctggacctcggtgttcactgacctttgtttcacttgcctctgctcgactccgagagcaggaaacccggccgtggcctggcagctccgcctcccatgcccgcacgctggggtctgtcttgtctggagcagtggggcacaccccggaggaggcgggggtcagggctgtcggccttggccccctgctggtcgctgtttcggggactcggggcggccagtaccaccgcctgaggcggggctcagcagcgttgcatgtacgggcctcgtactgcctcatggaaaatcctccggagccgccctccattgtgggttcctgagagtaggacacattgccatggttttgtgggaatcacgcgcccctgatggaacttttctgctgttgtgaagtacttttatccatttgcttctctgctgaccttgccaagttgttcgaggtggaattaaacacctcccagacctc

SEQ ID NO: 152602 - DNA, 1018 bp, Homo sapiens
  Payload ID: 10029
  Gene Symbol: MUM1
  Gene Name: melanoma associated antigen (mutated) 1
  ENST ID: ENST00000591337
  CDS Start-End: 226-1018
cgcggggagcggcggcggcggcggcggcggcggtggcggaggcggtgagcgcgggcggcgcggacggcagcggttggcgggcgggtcctccgctgttgcggccgctgcggcctccttgcccgggcttggggcgccgcgctggggaaagccgggggcccggacacattggcgtgagacctgggagtacgttgtgccaaatcattgccacttgccacatgagtgtaaatgatggcggatgccaagtatgtcctctgccgatgggaaaagcgattatggcctgcgaaggttttggcccgaaccgcgacttcaacaaaaaataagagaagaaaggaatattttctagctgtgcaaatcctctctctagaggaaaaaattaaggtgaaaagcactgaagttgagatcctagagaagtctcaaattgaagccattgcttcctcgttagcctcacagaatgaggttcctgcggcacccctggaagaactggcctacagacggtcgcttcgcgtggctctggacgttctgagcgagggctcgatttggagtcaagaaagctctgcagggacaggtagagctgaccggtctctgcgagggaagcccatggagcatgtctcctcgccctgtgattcgaactcctcatctcttccccgcggagacgtgttgggcagttccagacctcacaggaggaggccatgtgtgcaacaaagcctgtcaagttcgttcacttgtgaaaaggaccccgagtgcaaagtggaccacaagaaggggctcaggaaaagtgaaaacccaagaggcccgttggtcctcccagctggaggtggtgcccaagatgagagtgggtccagaatccaccacaaaaattggactcttgcaagtaagaggggaggaaactcagcgcagaaggctagcttgtgcctgaatggatcttccctttcagaggacgacacggagagagacatggggagcaaaggaggcagctgggcagccccgtccttgccctccggggtcagggaggacgatc

SEQ ID NO: 152603 - DNA, 2603 bp, Homo sapiens
  Payload ID: 10029
  Gene Symbol: MUM1
  Gene Name: melanoma associated antigen (mutated) 1
  ENST ID: ENST00000591433
  CDS Start-End: 101-340
agttgtataaaccaccgtgcaaatttcgttccaggacacattggcgtgagacctgggagtacgttgtgccaaatcattgccacttgccacatgagtgtaaatgatggcggatgccaagtatgtcctctgccgatgggaaaagcgattatggcctgcgaaggttttggcccgaaccgcgacttcaacaaaaaataagagaagaaaggaatattttctagctgtgcaaatcctctctctagaggaaaaaattaaggtgaaaagcactgaagttgagatcctagagaagtctcaaattgaagccattgcttcctcgttagggaacgcgaatcccctgagctgaaggagaaggaaaaatggatccgctttcttaaacctttccagaatttgcccctagaaccactcctattcttgacgcccagaatggtcagtgcctcacagaatgaggttcctgcggcacccctggaagaactggcctacagacggtcgcttcgcgtggctctggacgttctgagcgagggctcgatttggagtcaagaaagctctgcagggacaggtagagctgaccggtctctgcgagggaagcccatggagcatgtctcctcgccctgtgattcgaactcctcatctcttccccgcggagacgtgttgggcagttccagacctcacaggaggaggccatgtgtgcaacaaagcctgtcaagttcgttcacttgtgaaaaggaccccgagtgcaaagtggaccacaagaaggggctcaggaaaagtgaaaacccaagaggcccgttggtcctcccagctggaggtggtgcccaagatgagagtgggtccagaatccaccacaaaaattggactcttgcaagtaagaggggaggaaactcagcgcagaaggctagcttgtgcctgaatggatcttccctttcagaggacgacacggagagagacatggggagcaaaggaggcagctgggcagccccgtccttgccctccggggtcagggaggacgatccctgtgccaacgctgagggacacgaccccggtctgccgttgggcagcctcactgcgcccccagcccctgagccctcggcctgctcagagcctggagaatgccctgcgaaaaagaggccgcgcctggatggcagccaaaggccgcctgccgtgcagctggagcccatggcagcaggggccgcaccatcccccgggccggggccagggcccagagagtctgtgaccccgcgcagcaccgccaggctgggcccgcctccctcccacgcctctgcggatgcaaccagatgtcttccttgcccggattcccagaagctggagaaagagtgccagtcttccgaagagtccatggggtctaattccatgcgttctatcctggaggaagacgaggaagacgaggagccaccaagagtccttttataccacgaaccacgttcgtttgaagtaggaatgctagtctggcataaacataaaaaataccccttctggccagcagtggtcaaaagcgtcaggcagagagataagaaagcaagtgtgctatacatcgaaggacacatgaacccgaaaatgaaaggtttcacagtgtctcttaaaagtttaaagcactttgattgtaaagagaaacagacgcttctgaatcaagccagggaggacttcaaccaggacatcggctggtgtgtctccctcatcaccgactacagggtccggttaggctgcgggtcttttgctggctctttcctggaatattacgcggctgatataagctatcctgtccgaaaatccatccagcaggacgtcttggggaccaagcttcctcaactgagcaaggggagccccgaggagcccgtggtggggtgccccctggggcagaggcagccctgccggaaaatgctccccgaccgctcgcgggccgcccgggaccgggccaaccagaagctggtggagtacattgtgaaggccaagggcgcggagagccacctgcgggccatcctaaagagcaggaagccatctcgctggctgcagaccttcctgagctccagccagtacgtgacctgtgtggagacctacctggaggatgaggggcagctggacctggtggtgaagtacctgcagggcgtctaccaggaggtgggggccaaggtgctccagcgcaccaacggcgaccggatccggttcattctggacgtgcttctgcccgaggtgagccgcggaccggcgtgtcacgtgggcagggaggggcctgcgctgggattttgcaactccgcacgaggaggctgccacggtcctcgcccctgctccctggccgttcggcggccaacggagcgtggaggcctcctgtgtttacatcctgtcagtgctgggaaatgcgagtgcgtgcgcttgaccctgtgcggagacggagccgcttacttgacccctgtgcagagatggagctgcttagaagctgtcagcaccagggggtgcgaactccctccctactgcgggcgcacagatgcttcccagcctcggtgggtcagtcctgggaaacccactgcgagttggaaattcccaagtcagaatcgcatttagtacccagataaacccactgtaagttgaaaaac

SEQ ID NO: 152604 - DNA, 867 bp, Homo sapiens
  Payload ID: 10029
  Gene Symbol: MUM1
  Gene Name: melanoma associated antigen (mutated) 1
  ENST ID: ENST00000588810
  CDS Start-End: 74-313
gttccaggacacattggcgtgagacctgggagtacgttgtgccaaatcattgccacttgccacatgagtgtaaatgatggcggatgccaagtatgtcctctgccgatgggaaaagcgattatggcctgcgaaggttttggcccgaaccgcgacttcaacaaaaaataagagaagaaaggaatattttctagctgtgcaaatcctctctctagaggaaaaaattaaggtgaaaagcactgaagttgagatcctagagaagtctcaaattgaagccattgcttcctcgttagggaacgcgaatcccctgagctgaaggagaaggaaaaatggatccgctttcttaaacctttccagaatttgcccctagaaccactcctattcttgacgcccagaatgcctcacagaatgaggttcctgcggcacccctggaagaactggcctacagacggtcgcttcgcgtggctctggacgttctgagcgagggctcgatttggagtcaagaaagctctgcagggacaggtagagctgaccggtctctgcgagggaagcccatggagcatgtctcctcgccctgtgattcgaactcctcatctcttccccgcggagacgtgttgggcagttccagacctcacaggaggaggccatgtgtgcaacaaagcctgtcaagttcgttcacttgtgaaaaggaccccgagtgcaaagtggaccacaagaaggggctcaggaaaagtgaaaacccaagaggcccgttggtcctcccagctggaggtggtgcccaagatgagagtgggtccagaatccaccacaaaaattggactcttgcaagtaagaggggaggaaactcagcgcagaaggctagcttgtgcc

SEQ ID NO: 152605 - DNA, 2235 bp, Homo sapiens
  Payload ID: 10029
  Gene Symbol: MUM1
  Gene Name: melanoma associated antigen (mutated) 1
  ENST ID: ENST00000626522
  CDS Start-End: 100-2235
gcgggtgcggcggcggcggcccgcgctccgcaggacacattggcgtgagacctgggagtacgttgtgccaaatcattgccacttgccacatgagtgtaaatgatggcggatgccaagtatgtcctctgccgatgggaaaagcgattatggcctgcgaaggttttggcccgaaccgcgacttcaacaaaaaataagagaagaaaggaatattttctagctgtgcaaatcctctctctagaggaaaaaattaaggtgaaaagcactgaagttgagatcctagagaagtctcaaattgaagccattgcttcctcgttagcctcacagaatgaggttcctgcggcacccctggaagaactggcctacagacggtcgcttcgcgtggctctggacgttctgagcgagggctcgatttggagtcaagaaagctctgcagggacaggtagagctgaccggtctctgcgagggaagcccatggagcatgtctcctcgccctgtgattcgaactcctcatctcttccccgcggagacgtgttgggcagttccagacctcacaggaggaggccatgtgtgcaacaaagcctgtcaagttcgttcacttgtgaaaaggaccccgagtgcaaagtggaccacaagaaggggctcaggaaaagtgaaaacccaagaggcccgttggtcctcccagctggaggtggtgcccaagatgagagtgggtccagaatccaccacaaaaattggactcttgcaagtaagaggggaggaaactcagcgcagaaggctagcttgtgcctgaatggatcttccctttcagaggacgacacggagagagacatggggagcaaaggaggcagctgggcagccccgtccttgccctccggggtcagggaggacgatccctgtgccaacgctgagggacacgaccccggtctgccgttgggcagcctcactgcgcccccagcccctgagccctcggcctgctcagagcctggagaatgccctgcgaaaaagaggccgcgcctggatggcagccaaaggccgcctgccgtgcagctggagcccatggcagcaggggccgcaccatcccccgggccggggccagggcccagagagtctgtgaccccgcgcagcaccgccaggctgggcccgcctccctcccacgcctctgcggatgcaaccagatgtcttccttgcccggattcccagaagctggagaaagagtgccagtcttccgaagagtccatggggtctaattccatgcgttctatcctggaggaagacgaggaagacgaggagccaccaagagtccttttataccacgaaccacgttcgtttgaagtaggaatgctagtctggcataaacataaaaaataccccttctggccagcagtggtcaaaagcgtcaggcagagagataagaaagcaagtgtgctatacatcgaaggacacatgaacccgaaaatgaaaggtttcacagtgtctcttaaaagtttaaagcactttgattgtaaagagaaacagacgcttctgaatcaagccagggaggacttcaaccaggacatcggctggtgtgtctccctcatcaccgactacagggtccggttaggctgcgggtcttttgctggctctttcctggaatattacgcggctgatataagctatcctgtccgaaaatccatccagcaggacgtcttggggaccaagcttcctcaactgagcaaggggagccccgaggagcccgtggtggggtgccccctggggcagaggcagccctgccggaaaatgctccccgaccgctcgcgggccgcccgggaccgggccaaccagaagctggtggagtacattgtgaaggccaagggcgcggagagccacctgcgggccatcctaaagagcaggaagccatctcgctggctgcagaccttcctgagctccagccagtacgtgacctgtgtggagacctacctggaggatgaggggcagctggacctggtggtgaagtacctgcagggcgtctaccaggaggtgggggccaaggtgctccagcgcaccaacggcgaccggatccggttcattctggacgtgcttctgcccgaggccatcatctgtgcgatctctgcggtggacgaggtggactacaagacggctgaggagaagtacatcaaggggccttcgctgagctaccgggaaaaagaaatatttgacaaccagctccttgaagagcggaaccggcgccgtcggtga

SEQ ID NO: 152606 - DNA, 2235 bp, Homo sapiens
  Payload ID: 10029
  Gene Symbol: MUM1
  Gene Name: melanoma associated antigen (mutated) 1
  ENST ID: ENST00000627377
  CDS Start-End: 1-2199
atgatggcggatgccaagtatgtcctctgccgatgggaaaagcgattatggcctgcgaaggttttggcccgaaccgcgacttcaacaaaaaataagagaagaaaggaatattttctagctgtgcaaatcctctctctagaggaaaaaattaaggtgaaaagcactgaagttgagatcctagagaagtctcaaattgaagccattgcttcctcgttagcctcacagaatgaggttcctgcggcacccctggaagaactggcctacagacggtcgcttcgcgtggctctggacgttctgagcgagggctcgatttggagtcaagaaagctctgcagggacaggtagagctgaccggtctctgcgagggaagcccatggagcatgtctcctcgccctgtgattcgaactcctcatctcttccccgcggagacgtgttgggcagttccagacctcacaggaggaggccatgtgtgcaacaaagcctgtcaagttcgttcacttgtgaaaaggaccccgagtgcaaagtggaccacaagaaggggctcaggaaaagtgaaaacccaagaggcccgttggtcctcccagctggaggtggtgcccaagatgagagtgggtccagaatccaccacaaaaattggactcttgcaagtaagaggggaggaaactcagcgcagaaggctagcttgtgcctgaatggatcttccctttcagaggacgacacggagagagacatggggagcaaaggaggcagctgggcagccccgtccttgccctccggggtcagggaggacgatccctgtgccaacgctgagggacacgaccccggtctgccgttgggcagcctcactgcgcccccagcccctgagccctcggcctgctcagagcctggagaatgccctgcgaaaaagaggccgcgcctggatggcagccaaaggccgcctgccgtgcagctggagcccatggcagcaggggccgcaccatcccccgggccggggccagggcccagagagtctgtgaccccgcgcagcaccgccaggctgggcccgcctccctcccacgcctctgcggatgcaaccagatgtcttccttgcccggattcccagaagctggagaaagagtgccagtcttccgaagagtccatggggtctaattccatgcgttctatcctggaggaagacgaggaagacgaggagccaccaagagtccttttataccacgaaccacgttcgtttgaagtaggaatgctagtctggcataaacataaaaaataccccttctggccagcagtggtcaaaagcgtcaggcagagagataagaaagcaagtgtgctatacatcgaaggacacatgaacccgaaaatgaaaggtttcacagtgtctcttaaaagtttaaagcactttgattgtaaagagaaacagacgcttctgaatcaagccagggaggacttcaaccaggacatcggctggtgtgtctccctcatcaccgactacagggtccggttaggctgcgggtcttttgctggctctttcctggaatattacgcggctgatataagctatcctgtccgaaaatccatccagcaggacgtcttggggaccaagcttcctcaactgagcaaggggagccccgaggagcccgtggtggggtgccccctggggcagaggcagccctgccggaaaatgctccccgaccgctcgcgggccgcccgggaccgggccaaccagaagctggtggagtacattgtgaaggccaagggcgcggagagccacctgcgggccatcctaaagagcaggaagccatctcgctggctgcagaccttcctgagctccagccagtacgtgacctgtgtggagacctacctggaggatgaggggcagctggacctggtggtgaagtacctgcagggcgtctaccaggaggtgggggccaaggtgctccagcgcaccaacggcgaccggatccggttcattctggacgtgcttctgcccgagtgctgggaaatgcgagtgcgtgcgcttgaccctgtgcggagacggagccgcttacttgacccctgtgcagagatggagctgcttagaagctgtcagcaccagggggtgcgaactccctccctactgcgggcgcacagatgcttcccagcctcggtgggccatcatctgtgcgatctctgcggtggacgaggtggactacaagacggctgaggagaagtacatcaaggggccttcgctgagctaccg

SEQ ID NO: 152607 - DNA, 4308 bp, Homo sapiens
  Payload ID: 10030
  Gene Symbol: MUM1L1
  Gene Name: melanoma associated antigen (mutated) 1-like 1
  Uniprot ID: Q5H9M0
  ENST ID: ENST00000337685
  CDS Start-End: 786-2876
agtcttcggggaggagctgcattacacacaggcttcggaggcttccgtggagaagcttggaggtaatggctgtcgtaaatgctagttattttcagagagttctcgaagatttggaataaagccgagccccagaaagacaggtcaaccacagaagtgctgagccaggtaaagaccctgctggacaagcagctggagtgagaatcaagacagctggaccacaggaccagacccagcagtatccatgtaacaggaaaggtccccttgctattcccatcactgggagggggcggagcctcgtcggagccgctcggaagggagctgtacccggccagtattgggggaggggcagcatttcaagaggctgcagctgacaagaagcttcaagcataggttaatatcagagaagcacatgacctgggcaatctgcatgtgatgccaaccaagccttggaaagacagtgcaaccacagaagtgccgagctgggtaaaggccctgctggacaagcagttggagtgagaatcaagacagccggaccacaggaccagacccaccaggatccacatgacagtggtatcttccggtatcatcctattcaaacaacgtgttcaagcatccttggaaaattgaggtggagaacaggccacacaagctgtaaaccctttgtagtcataagacgaaagaggatttgttaagagtattgttttgggtagaacttgcattagcagtgacaaagatagccacctcaacctttggtaataacccttggcacacaaatataaaccataatggagtctgagtatgtcctatgcaactggaaagaccagttgtggccagcaaaagttttgtccagatctgaaacttcatcaaacagtaagaggaaaaaggcattttctctagaagttcaaatactctcactagatgaaaaaattaaattggacagcacagaaacaaagatcctaaataaatctcaaattgaagccattgctgcctcattaggactacagtcagaggacagtgctccacctacagaggaaactgcctatggaagatcactaaaagtggcactgggtattctgaatgagagaacaaatttgagtcaagcaagcacttcagatgaagaggagatcactatgctgtctcaaaatgtaccacaaaaacagtccgattcaccccctcataaaaaataccggaaggatgaaggtgacttaccagggtgtcttgaggaaagggaaaactcagcatgcttgttagcatcttcagagagtgatgattccctgtatgatgataaatcacaagcacccacaatggtcgatactattccaagtgaagtggaaacaaagtcattacaaaactctagctggtgcgagactttcccttcactttcggaagataatgatgaaaaagagaacaagaataagattgatatctcagcagttatgtctgtgcattctgcagtcaaagaggaaagtgcatgtgttaaagatgaaaagtttgctccacctttgtcacctttgtcatcagatatgctcattatgcccaaagctttgaaagaagagagcgaggatacctgcctagagaccctggctgttccctctgaatgctctgctttctcagagaatattgaggatcctggagagggtccctcaaatccatgcttagataccagccagaatcaaccttccatggaatcagagatgggggctgcagcatgccctgggagttgttcaagggaatgcgaggtttcatttagtgcctctaaccctgtctgggattattcacatcttatgagtagtgaaagaaattttcagagactggattttgaagaacttgaggaagaaggtcaagcctctgacaagtcattgcttccaagtcgcattaatctttctctattagatgatgatgaggaagacgaagaacttccacgcttcattttacattatgagacacatccgtttgaaacaggaatgatagtctggtttaaatatcagaaatatccattttggccagcagtgataaaaagtatcagacgaaaagagaggaaagcaagtgtgctttttgttgaggcaaacatgaattctgaaaagaagggcattagagtaaattttagaagattaaagaaatttgattgtaaagagaaacaaatgctagtggacaaagccagggaggattatagtgagagtattgactggtgcatctcactaatttgtgactacagagttagaataggttgtggttctttcacgggctctttgcttgagtattatgctgctgatattagttacccagttaggaaagaaacaaaacaggatactttcaggaacaaatttccaaagctgcataatgaagatgccagggaaccgatggctgtaacttcccagaccaagaaaatgtccttccaaaaaattctccctgaccggatgaaggctgctcgggaccgagccaacaagaacctggtggacttcattgtgaatgcaaagggaacagagaaccatcttctggccattgtaaatggcacaaaaggatccagatggctgaaatcatttttgaatgcaaataggttcacaccctgtattgaaacatactttgaggatgaagatcagttggatgaagtggtgaaatatttacaagaagtctgcaatcaaatagatcaaataatgccaacttggataaaagatgataaaattaaatttatcctagaagttcttctgccagaagcaattatttgttcaatttctgctgttgatgggttagattacgaggcagctgaagcaaagtatctaaaaggaccatgtctaggctacagggaaagagaattatttgatgcaaaaataatatatgaaaagagacgaaaagcaccaacaaatgaagctcactaaatgtgctgaaagttgaaaccatgacagggagctctcatagatactagttgaaaaaagtctctgaacaattctctctaatacatattttctgcaaatgggagcatggataatgtgttcacttttttttgagatctctaggatctgtggttataattacatctttatttccttttcttgcgcttcttcaaagttaattttgtcaacatatttcagcagttctactttcccgtacattttttagaaagcataattcctaaatgattttgaagggaaagtactattttgttttatgacacttttgagtctatgctgtattgttaaatatattgtgcacaattattttaatgttaaaattgcactggtgttagatattaacgaagatgattggaaaaaagtctgaaagatacatcatttctatattccttgcttaatttttataaaatattgggttttcccttaagatagttgaagtatttttcttgccatgcctatttatttttgcaaaaaaattatctgctatatagaaccaaagatagattcgctttgctatatattataactatacttgcttttgcaataaaacaacttgtaattcaaaaatgaagattatctgcatatagtatttatgtgtgtgaataacatcttggcatgcagaaaataattttggctgctttgaacaggattgttcattctacacttccctgaaattccatttttgggagtgtctatccttcaatggctgaatagttccttaaatcagacaagctcctggctatcttcataaccagcagtgagtagatcttcttaatatagctgtctgaccacatgtggaaggcagctagacttattgtatttacagcctggccactctagacatatgaatccaggctgactgcttaagtgcccatctcgtttgatataaactgtagaaaaggcaagcactttgttctgagtcttttatctccaaatacatagttgtctcaaaccaagcaagctttatcaaaatggcttatttgcagaatagttccaatgatataaatgccaactggcaagtcattccaaactgcttgaaggagtagatgaaccagaatctgagaatttggaaataggtcacagaaaaagcctccatttggctaaatatgacaattatctgagtatggttaaatacatacaattaaatgtctgaagccaatgagttgtttattctaacttgaaatatatttttgtgagaataaatgttagaaaagttagtttattttggaaacctgccgtgaaaggaaattctaaaggcttaacatgaaactgtctgcatttctacctgttagacaatggttgctcttgggctcttgttatacagtcatatggctacacgtttatgtaaagtttgcaaaagtttggtgttttgatttataataaaactgttatattattc

SEQ ID NO: 152608 - DNA, 4173 bp, Homo sapiens
  Payload ID: 10030
  Gene Symbol: MUM1L1
  Gene Name: melanoma associated antigen (mutated) 1-like 1
  Uniprot ID: Q5H9M0
  ENST ID: ENST00000357175
  CDS Start-End: 650-2740
agtcttcggggaggagctgcattacacacaggcttcggaggcttccgtggagaagcttggaggtaatggctgtcgtaaatgctagttattttcagagagttctcgaagatttggaataaagccgagccccagaaagacaggtcaaccacagaagtgctgagccaggtaaagaccctgctggacaagcagctggagtgagaatcaagacagctggaccacaggaccagacccagcagtatccatgtaacacataggttaatatcagagaagcacatgacctgggcaatctgcatgtgatgccaaccaagccttggaaagacagtgcaaccacagaagtgccgagctgggtaaaggccctgctggacaagcagttggagtgagaatcaagacagccggaccacaggaccagacccaccaggatccacatgacagtggtatcttccggtatcatcctattcaaacaacgtgttcaagcatccttggaaaattgaggtggagaacaggccacacaagctgtaaaccctttgtagtcataagacgaaagaggatttgttaagagtattgttttgggtagaacttgcattagcagtgacaaagatagccacctcaacctttggtaataacccttggcacacaaatataaaccataatggagtctgagtatgtcctatgcaactggaaagaccagttgtggccagcaaaagttttgtccagatctgaaacttcatcaaacagtaagaggaaaaaggcattttctctagaagttcaaatactctcactagatgaaaaaattaaattggacagcacagaaacaaagatcctaaataaatctcaaattgaagccattgctgcctcattaggactacagtcagaggacagtgctccacctacagaggaaactgcctatggaagatcactaaaagtggcactgggtattctgaatgagagaacaaatttgagtcaagcaagcacttcagatgaagaggagatcactatgctgtctcaaaatgtaccacaaaaacagtccgattcaccccctcataaaaaataccggaaggatgaaggtgacttaccagggtgtcttgaggaaagggaaaactcagcatgcttgttagcatcttcagagagtgatgattccctgtatgatgataaatcacaagcacccacaatggtcgatactattccaagtgaagtggaaacaaagtcattacaaaactctagctggtgcgagactttcccttcactttcggaagataatgatgaaaaagagaacaagaataagattgatatctcagcagttatgtctgtgcattctgcagtcaaagaggaaagtgcatgtgttaaagatgaaaagtttgctccacctttgtcacctttgtcatcagatatgctcattatgcccaaagctttgaaagaagagagcgaggatacctgcctagagaccctggctgttccctctgaatgctctgctttctcagagaatattgaggatcctggagagggtccctcaaatccatgcttagataccagccagaatcaaccttccatggaatcagagatgggggctgcagcatgccctgggagttgttcaagggaatgcgaggtttcatttagtgcctctaaccctgtctgggattattcacatcttatgagtagtgaaagaaattttcagagactggattttgaagaacttgaggaagaaggtcaagcctctgacaagtcattgcttccaagtcgcattaatctttctctattagatgatgatgaggaagacgaagaacttccacgcttcattttacattatgagacacatccgtttgaaacaggaatgatagtctggtttaaatatcagaaatatccattttggccagcagtgataaaaagtatcagacgaaaagagaggaaagcaagtgtgctttttgttgaggcaaacatgaattctgaaaagaagggcattagagtaaattttagaagattaaagaaatttgattgtaaagagaaacaaatgctagtggacaaagccagggaggattatagtgagagtattgactggtgcatctcactaatttgtgactacagagttagaataggttgtggttctttcacgggctctttgcttgagtattatgctgctgatattagttacccagttaggaaagaaacaaaacaggatactttcaggaacaaatttccaaagctgcataatgaagatgccagggaaccgatggctgtaacttcccagaccaagaaaatgtccttccaaaaaattctccctgaccggatgaaggctgctcgggaccgagccaacaagaacctggtggacttcattgtgaatgcaaagggaacagagaaccatcttctggccattgtaaatggcacaaaaggatccagatggctgaaatcatttttgaatgcaaataggttcacaccctgtattgaaacatactttgaggatgaagatcagttggatgaagtggtgaaatatttacaagaagtctgcaatcaaatagatcaaataatgccaacttggataaaagatgataaaattaaatttatcctagaagttcttctgccagaagcaattatttgttcaatttctgctgttgatgggttagattacgaggcagctgaagcaaagtatctaaaaggaccatgtctaggctacagggaaagagaattatttgatgcaaaaataatatatgaaaagagacgaaaagcaccaacaaatgaagctcactaaatgtgctgaaagttgaaaccatgacagggagctctcatagatactagttgaaaaaagtctctgaacaattctctctaatacatattttctgcaaatgggagcatggataatgtgttcacttttttttgagatctctaggatctgtggttataattacatctttatttccttttcttgcgcttcttcaaagttaattttgtcaacatatttcagcagttctactttcccgtacattttttagaaagcataattcctaaatgattttgaagggaaagtactattttgttttatgacacttttgagtctatgctgtattgttaaatatattgtgcacaattattttaatgttaaaattgcactggtgttagatattaacgaagatgattggaaaaaagtctgaaagatacatcatttctatattccttgcttaatttttataaaatattgggttttcccttaagatagttgaagtatttttcttgccatgcctatttatttttgcaaaaaaattatctgctatatagaaccaaagatagattcgctttgctatatattataactatacttgcttttgcaataaaacaacttgtaattcaaaaatgaagattatctgcatatagtatttatgtgtgtgaataacatcttggcatgcagaaaataattttggctgctttgaacaggattgttcattctacacttccctgaaattccatttttgggagtgtctatccttcaatggctgaatagttccttaaatcagacaagctcctggctatcttcataaccagcagtgagtagatcttcttaatatagctgtctgaccacatgtggaaggcagctagacttattgtatttacagcctggccactctagacatatgaatccaggctgactgcttaagtgcccatctcgtttgatataaactgtagaaaaggcaagcactttgttctgagtcttttatctccaaatacatagttgtctcaaaccaagcaagctttatcaaaatggcttatttgcagaatagttccaatgatataaatgccaactggcaagtcattccaaactgcttgaaggagtagatgaaccagaatctgagaatttggaaataggtcacagaaaaagcctccatttggctaaatatgacaattatctgagtatggttaaatacatacaattaaatgtctgaagccaatgagttgtttattctaacttgaaatatatttttgtgagaataaatgttagaaaagttagtttattttggaaacctgccgtgaaaggaaattctaaaggcttaacatgaaactgtctgcatttctacctgttagacaatggttgctcttgggctcttgttatacagtcatatggctacacgtttatgtaaagtttgcaaaagtttggtgttttgatttataataaaactgttatattattca

SEQ ID NO: 152609 - DNA, 3957 bp, Homo sapiens
  Payload ID: 10030
  Gene Symbol: MUM1L1
  Gene Name: melanoma associated antigen (mutated) 1-like 1
  Uniprot ID: Q5H9M0
  ENST ID: ENST00000372552
  CDS Start-End: 435-2525
tttcaccaggctgcagctgacaagaagcttcaagcataggttaatatcagagaagcacatgacctgggcaatctgcatgtgatgccaaccaagccttggaaagacagtgcaaccacagaagtgccgagctgggtaaaggccctgctggacaagcagttggagtgagaatcaagacagccggaccacaggaccagacccaccaggatccacatgacagtggtatcttccggtatcatcctattcaaacaacgtgttcaagcatccttggaaaattgaggtggagaacaggccacacaagctgtaaaccctttgtagtcataagacgaaagaggatttgttaagagtattgttttgggtagaacttgcattagcagtgacaaagatagccacctcaacctttggtaataacccttggcacacaaatataaaccataatggagtctgagtatgtcctatgcaactggaaagaccagttgtggccagcaaaagttttgtccagatctgaaacttcatcaaacagtaagaggaaaaaggcattttctctagaagttcaaatactctcactagatgaaaaaattaaattggacagcacagaaacaaagatcctaaataaatctcaaattgaagccattgctgcctcattaggactacagtcagaggacagtgctccacctacagaggaaactgcctatggaagatcactaaaagtggcactgggtattctgaatgagagaacaaatttgagtcaagcaagcacttcagatgaagaggagatcactatgctgtctcaaaatgtaccacaaaaacagtccgattcaccccctcataaaaaataccggaaggatgaaggtgacttaccagggtgtcttgaggaaagggaaaactcagcatgcttgttagcatcttcagagagtgatgattccctgtatgatgataaatcacaagcacccacaatggtcgatactattccaagtgaagtggaaacaaagtcattacaaaactctagctggtgcgagactttcccttcactttcggaagataatgatgaaaaagagaacaagaataagattgatatctcagcagttatgtctgtgcattctgcagtcaaagaggaaagtgcatgtgttaaagatgaaaagtttgctccacctttgtcacctttgtcatcagatatgctcattatgcccaaagctttgaaagaagagagcgaggatacctgcctagagaccctggctgttccctctgaatgctctgctttctcagagaatattgaggatcctggagagggtccctcaaatccatgcttagataccagccagaatcaaccttccatggaatcagagatgggggctgcagcatgccctgggagttgttcaagggaatgcgaggtttcatttagtgcctctaaccctgtctgggattattcacatcttatgagtagtgaaagaaattttcagagactggattttgaagaacttgaggaagaaggtcaagcctctgacaagtcattgcttccaagtcgcattaatctttctctattagatgatgatgaggaagacgaagaacttccacgcttcattttacattatgagacacatccgtttgaaacaggaatgatagtctggtttaaatatcagaaatatccattttggccagcagtgataaaaagtatcagacgaaaagagaggaaagcaagtgtgctttttgttgaggcaaacatgaattctgaaaagaagggcattagagtaaattttagaagattaaagaaatttgattgtaaagagaaacaaatgctagtggacaaagccagggaggattatagtgagagtattgactggtgcatctcactaatttgtgactacagagttagaataggttgtggttctttcacgggctctttgcttgagtattatgctgctgatattagttacccagttaggaaagaaacaaaacaggatactttcaggaacaaatttccaaagctgcataatgaagatgccagggaaccgatggctgtaacttcccagaccaagaaaatgtccttccaaaaaattctccctgaccggatgaaggctgctcgggaccgagccaacaagaacctggtggacttcattgtgaatgcaaagggaacagagaaccatcttctggccattgtaaatggcacaaaaggatccagatggctgaaatcatttttgaatgcaaataggttcacaccctgtattgaaacatactttgaggatgaagatcagttggatgaagtggtgaaatatttacaagaagtctgcaatcaaatagatcaaataatgccaacttggataaaagatgataaaattaaatttatcctagaagttcttctgccagaagcaattatttgttcaatttctgctgttgatgggttagattacgaggcagctgaagcaaagtatctaaaaggaccatgtctaggctacagggaaagagaattatttgatgcaaaaataatatatgaaaagagacgaaaagcaccaacaaatgaagctcactaaatgtgctgaaagttgaaaccatgacagggagctctcatagatactagttgaaaaaagtctctgaacaattctctctaatacatattttctgcaaatgggagcatggataatgtgttcacttttttttgagatctctaggatctgtggttataattacatctttatttccttttcttgcgcttcttcaaagttaattttgtcaacatatttcagcagttctactttcccgtacattttttagaaagcataattcctaaatgattttgaagggaaagtactattttgttttatgacacttttgagtctatgctgtattgttaaatatattgtgcacaattattttaatgttaaaattgcactggtgttagatattaacgaagatgattggaaaaaagtctgaaagatacatcatttctatattccttgcttaatttttataaaatattgggttttcccttaagatagttgaagtatttttcttgccatgcctatttatttttgcaaaaaaattatctgctatatagaaccaaagatagattcgctttgctatatattataactatacttgcttttgcaataaaacaacttgtaattcaaaaatgaagattatctgcatatagtatttatgtgtgtgaataacatcttggcatgcagaaaataattttggctgctttgaacaggattgttcattctacacttccctgaaattccatttttgggagtgtctatccttcaatggctgaatagttccttaaatcagacaagctcctggctatcttcataaccagcagtgagtagatcttcttaatatagctgtctgaccacatgtggaaggcagctagacttattgtatttacagcctggccactctagacatatgaatccaggctgactgcttaagtgcccatctcgtttgatataaactgtagaaaaggcaagcactttgttctgagtcttttatctccaaatacatagttgtctcaaaccaagcaagctttatcaaaatggcttatttgcagaatagttccaatgatataaatgccaactggcaagtcattccaaactgcttgaaggagtagatgaaccagaatctgagaatttggaaataggtcacagaaaaagcctccatttggctaaatatgacaattatctgagtatggttaaatacatacaattaaatgtctgaagccaatgagttgtttattctaacttgaaatatatttttgtgagaataaatgttagaaaagttagtttattttggaaacctgccgtgaaaggaaattctaaaggcttaacatgaaactgtctgcatttctacctgttagacaatggttgctcttgggctcttgttatacagtcatatggctacacgtttatgtaaagtttgcaaaagtttggtgttttgatttataataaaactgttatattattc

SEQ ID NO: 152610 - DNA, 2686 bp, Homo sapiens
  Payload ID: 10030
  Gene Symbol: MUM1L1
  Gene Name: melanoma associated antigen (mutated) 1-like 1
  ENST ID: ENST00000619455
  CDS Start-End: 650-1924
agtcttcggggaggagctgcattacacacaggcttcggaggcttccgtggagaagcttggaggtaatggctgtcgtaaatgctagttattttcagagagttctcgaagatttggaataaagccgagccccagaaagacaggtcaaccacagaagtgctgagccaggtaaagaccctgctggacaagcagctggagtgagaatcaagacagctggaccacaggaccagacccagcagtatccatgtaacacataggttaatatcagagaagcacatgacctgggcaatctgcatgtgatgccaaccaagccttggaaagacagtgcaaccacagaagtgccgagctgggtaaaggccctgctggacaagcagttggagtgagaatcaagacagccggaccacaggaccagacccaccaggatccacatgacagtggtatcttccggtatcatcctattcaaacaacgtgttcaagcatccttggaaaattgaggtggagaacaggccacacaagctgtaaaccctttgtagtcataagacgaaagaggatttgttaagagtattgttttgggtagaacttgcattagcagtgacaaagatagccacctcaacctttggtaataacccttggcacacaaatataaaccataatggagtctgagtatgtcctatgcaactggaaagaccagttgtggccagcaaaagttttgtccagatctgaaacttcatcaaacagtaagaggaaaaaggcattttctctagaagttcaaatactctcactagatgaaaaaattaaattggacagcacagaaacaaagatcctaaataaatctcaaattgaagccattgctgcctcattaggactacagtcagaggacagtgctccacctacagaggaaactgcctatggaagatcactaaaagtggcactgggtattctgaatgagagaacaaatttgagtcaagcaagcacttcagatgaagaggagatcactatgctgtctcaaaatgtaccacaaaaacagtccgattcaccccctcataaaaaataccggaaggatgaaggtgacttaccagggtgtcttgaggaaagggaaaactcagcatgcttgttagcatcttcagagagtgatgattccctgtatgatgataaatcacaagcacccacaatggtcgatactattccaagtgaagtggaaacaaagtcattacaaaactctagctggtgcgagactttcccttcactttcggaagataatgatgaaaaagagaacaagaataagattgatatctcagcagttatgtctgtgcattctgcagtcaaagaggaaagtgcatgtgttaaagatgaaaagtttgctccacctttgtcacctttgtcatcagatatgctcattatgcccaaagctttgaaagaagagagcgaggatacctgcctagagaccctggctgttccctctgaatgctctgctttctcagagaatattgaggatcctggagagggtccctcaaatccatgcttagataccagccagaatcaaccttccatggaatcagagatgggggctgcagcatgccctgggagttgttcaagggaatgcgaggtttcatttagtgcctctaaccctgtctgggattattcacatcttatgagtagtgaaagaaattttcagagactggattttgaagaacttgaggaagaaggtcaagcctctgacaagtcattgcttccaagtcgcattaatctttctctattagatgatgatgaggaagacgaagaacttccacgcttcattttacattatgagacacatccgtttgaaacaggaatgatagtctggtttaaatatcagaaatatccatttggcagcagtgataaaaagtatcagacgaaaagagaggaaagcaagtgtgctttttgttgaggcaaacatgaattctgaaaagaagggcattagagtaaattttagaagattaaagaaatttgattgtaaagagaaacaaatgctagtggacaaagccagggaggattatagtgagagtattgactggtgcatctcactaatttgtgactacagagttagaataggttgtggttctttcacgggctctttgcttgagtattatgctgctgatattagttacccagttaggaaagaaacaaaacaggatactttcaggaacaaatttccaaagctgcataatgaagatgccagggaaccgatggctgtaacttcccagaccaagaaaatgtccttccaaaaaattctccctgaccggatgaaggctgctcgggaccgagccaacaagaacctggtggacttcattgtgaatgcaaagggaacagagaaccatcttctggccattgtaaatggcacaaaaggatccagatggctgaaatcatttttgaatgcaaataggttcacaccctgtattgaaacatactttgaggatgaagatcagttggatgaagtggtgaaatatttacaagaagtctgcaatcaaatagatcaaataatgccaacttggataaaagatgataaaattaaatttatcctagaagttcttctgccagaagcaattatttgttcaatttctgctgttgatgggttagattacgaggcagctgaagcaaagtatctaaaaggaccatgtctaggctacagggaaagagaattatttgatgc

SEQ ID NO: 152611 - DNA, 3313 bp, Homo sapiens
  Payload ID: 10031
  Gene Symbol: MCAM
  Gene Name: melanoma cell adhesion molecule
  Uniprot ID: P43121
  ENST ID: ENST00000264036
  CDS Start-End: 16-1956
ctccggccgggaagcatggggcttcccaggctggtctgcgccttcttgctcgccgcctgctgctgctgtcctcgcgtcgcgggtgtgcccggagaggctgagcagcctgcgcctgagctggtggaggtggaagtgggcagcacagcccttctgaagtgcggcctctcccagtcccaaggcaacctcagccatgtcgactggttttctgtccacaaggagaagcggacgctcatcttccgtgtgcgccagggccagggccagagcgaacctggggagtacgagcagcggctcagcctccaggacagaggggctactctggccctgactcaagtcaccccccaagacgagcgcatcttcttgtgccagggcaagcgccctcggtcccaggagtaccgcatccagctccgcgtctacaaagctccggaggagccaaacatccaggtcaaccccctgggcatccctgtgaacagtaaggagcctgaggaggtcgctacctgtgtagggaggaacgggtaccccattcctcaagtcatctggtacaagaatggccggcctctgaaggaggagaagaaccgggtccacattcagtcgtcccagactgtggagtcgagtggtttgtacaccttgcagagtattctgaaggcacagctggttaaagaagacaaagatgcccagttttactgtgagctcaactaccggctgcccagtgggaaccacatgaaggagtccagggaagtcaccgtccctgttttctacccgacagaaaaagtgtggctggaagtggagcccgtgggaatgctgaaggaaggggaccgcgtggaaatcaggtgtttggctgatggcaaccctccaccacacttcagcatcagcaagcagaaccccagcaccagggaggcagaggaagagacaaccaacgacaacggggtcctggtgctggagcctgcccggaaggaacacagtgggcgctatgaatgtcagggcctggacttggacaccatgatatcgctgctgagtgaaccacaggaactactggtgaactatgtgtctgacgtccgagtgagtcccgcagcccctgagagacaggaaggcagcagcctcaccctgacctgtgaggcagagagtagccaggacctcgagttccagtggctgagagaagagacaggccaggtgctggaaagggggcctgtgcttcagttgcatgacctgaaacgggaggcaggaggcggctatcgctgcgtggcgtctgtgcccagcatacccggcctgaaccgcacacagctggtcaacgtggccatttttggccccccttggatggcattcaaggagaggaaggtgtgggtgaaagagaatatggtgttgaatctgtcttgtgaagcgtcagggcacccccggcccaccatctcctggaacgtcaacggcacggcaagtgaacaagaccaagatccacagcgagtcctgagcaccctgaatgtcctcgtgaccccggagctgttggagacaggtgttgaatgcacggcctccaacgacctgggcaaaaacaccagcatcctcttcctggagctggtcaatttaaccaccctcacaccagactccaacacaaccactggcctcagcacttccactgccagtcctcataccagagccaacagcacctccacagagagaaagctgccggagccggagagccggggcgtggtcatcgtggctgtgattgtgtgcatcctggtcctggcggtgctgggcgctgtcctctatttcctctataagaagggcaagctgccgtgcaggcgctcagggaagcaggagatcacgctacccccgtctcgtaagagcgaacttgtagttgaagttaagtcagataagctcccagaagagatgggcctcctgcagggcagcagcggtgacaagagggctccgggagaccagggagagaaatacatcgatctgaggcattagccccgaatcacttcagctcccttccctgcctggaccattcccagctccctgctcactcttctctcagccaaagcctccaaagggactagagagaagcctcctgctcccctcgcctgcacaccccctttcagagggccactgggttaggacctgaggacctcacttggccctgcaaggcccgcttttcagggaccagtccaccaccatctcctccacgttgagtgaagctcatcccaagcaaggagccccagtctcccgagcgggtaggagagtttcttgcagaacgtgttttttctttacacacattatggctgtaaatacctggctcctgccagcagctgagctgggtagcctctctgagctggtttcctgccccaaaggctggcttccaccatccaggtgcaccactgaagtgaggacacaccggagccaggcgcctgctcatgttgaagtgcgctgttcacacccgctccggagagcaccccagcagcatccagaagcagctgcagtgttgctgccaccaccctcctgtctgcctcttcaaagtctcctgtgacattttttctttggtcagaagccaggaactggtgtcattccttaaaagatacgtgccggggccaggtgtggtggctcacgcctgtaatcccagcactttgggaggccgaggcgggcggatcacaaagtcaggacgagaccatcctggctaacacggtgaaaccctgtctctactaaaaatacaaaaaaaaattagctaggcgtagtggttggcacctatagtcccagctactcggaaggctgaagcaggagaatggtatgaatccaggaggtggagcttgcagtgagccgagaccgtgccactgcactccagcctgggcaacacagcgagactccgtctcgaggaaaaaaaaagaaaagatacgtgcctgcggtgaggaagctgggcgctgttttcgagttcaggtgaattagcctcaatcccccgtgttcacttggctcccatagccctcttgatggatcacgtaaaactgaaaggcagcggggagcagacaaagatgaggtctacactgtccttcatggggattaaagctatggttatattagcaccaaacttctacaaaccaagctcagggccccaaccctagaagggcccaaatgagagaatggtacttagggatggaaaacgggcctggctagagcttcgggtgtgtgtgtctgtctgtgtgtatgcatacatatgtgtgtatatatggttttgtcaggtgtgtaaatttgcaaattgtttcctttatatatgtatgtatatatatatatgaaaatatatatatatatgaaaaataaagcttaattgtcccagaaa

SEQ ID NO: 152612 - DNA, 632 bp, Homo sapiens
  Payload ID: 10032
  Gene Symbol: MIA
  Gene Name: melanoma inhibitory activity
  Uniprot ID: Q16674
  ENST ID: ENST00000263369
  CDS Start-End: 167-562
gttctggtttcatagcaacttctaggtggtgtgggcgaagtttgggactggtttagggcggggacaagaccaagaacacaagtttccttgtactacgggagagagggaggggaggaaattggagaccccagcacccccttgctcactctcttgctcacagtccacgatggcccggtccctggtgtgccttggtgtcatcatcttgctgtctgccttctccggacctggtgtcaggggtggtcctatgcccaagctggctgaccggaagctgtgtgcggaccaggagtgcagccaccctatctccatggctgtggcccttcaggactacatggcccccgactgccgattcctgaccattcaccggggccaagtggtgtatgtcttctccaagctgaagggccgtgggcggctcttctggggaggcagcgttcagggagattactatggagatctggctgctcgcctgggctatttccccagtagcattgtccgagaggaccagaccctgaaacctggcaaagtcgatgtgaagacagacaaatgggatttctactgccagtgagctcagcctaccgctggccctgccgtttcccctccttggctttatgcaaatacaatcagcccagtgcaaa

SEQ ID NO: 152613 - DNA, 455 bp, Homo sapiens
  Payload ID: 10032
  Gene Symbol: MIA
  Gene Name: melanoma inhibitory activity
  Uniprot ID: Q16674
  ENST ID: ENST00000597784
  CDS Start-End: 53-448
ctaggcctctgtgattgttgaggagggggctgtcactgggaaagtttccacgatggcccggtccctggtgtgccttggtgtcatcatcttgctgtctgccttctccggacctggtgtcaggggtggtcctatgcccaagctggctgaccggaagctgtgtgcggaccaggagtgcagccaccctatctccatggctgtggcccttcaggactacatggcccccgactgccgattcctgaccattcaccggggccaagtggtgtatgtcttctccaagctgaagggccgtgggcggctcttctggggaggcagcgttcagggagattactatggagatctggctgctcgcctgggctatttccccagtagcattgtccgagaggaccagaccctgaaacctggcaaagtcgatgtgaagacagacaaatgggatttctactgccagtgagctcagc

SEQ ID NO: 152614 - DNA, 507 bp, Homo sapiens
  Payload ID: 10032
  Gene Symbol: MIA
  Gene Name: melanoma inhibitory activity
  Uniprot ID: Q16674
  ENST ID: ENST00000594436
  CDS Start-End: 42-437
cttctgtggccagaggggacagcggaggagcccagtccacgatggcccggtccctggtgtgccttggtgtcatcatcttgctgtctgccttctccggacctggtgtcaggggtggtcctatgcccaagctggctgaccggaagctgtgtgcggaccaggagtgcagccaccctatctccatggctgtggcccttcaggactacatggcccccgactgccgattcctgaccattcaccggggccaagtggtgtatgtcttctccaagctgaagggccgtgggcggctcttctggggaggcagcgttcagggagattactatggagatctggctgctcgcctgggctatttccccagtagcattgtccgagaggaccagaccctgaaacctggcaaagtcgatgtgaagacagacaaatgggatttctactgccagtgagctcagcctaccgctggccctgccgtttcccctccttggctttatgcaaatacaatcagcccagtgcaaa

SEQ ID NO: 152615 - DNA, 410 bp, Homo sapiens
  Payload ID: 10032
  Gene Symbol: MIA
  Gene Name: melanoma inhibitory activity
  ENST ID: ENST00000597140
  CDS Start-End: 1-287
cccggtccctggtgtgccttggtgtcatcatcttgctgtctgccttctccggacctggtgtcaggggtggtcctatgcccaagctggctgaccggaagctgtgtgcggaccaggagtgcagccaccctatctccatggctgtggcccttcaggactacatggcccccgactgccgattcctgaccattcaccggggccaagtggtgttcagggagattactatggagatctggctgctcgcctgggctatttccccagtagcattgtccgagaggaccagaccctgaaacctggcaaagtcgatgtgaagacagacaaatgggatttctactgccagtgagctcagcctaccgctggccctgccgtttcccctccttggctttatgcaaatacaatcagcccagtgcaaa

SEQ ID NO: 152616 - DNA, 325 bp, Homo sapiens
  Payload ID: 10032
  Gene Symbol: MIA
  Gene Name: melanoma inhibitory activity
  ENST ID: ENST00000601159
  CDS Start-End: 1-176
ggtccctggtgtgccttggtgtcatcatcttgctgtctgccttctccggacctggtgtcaggggtggtcctatgcccaagctggctgaccggaagctgtgtgcggaccaggagtgcagccgttcagggagattactatggagatctggctgctcgcctgggctatttccccagtagcattgtccgagaggaccagaccctgaaacctggcaaagtcgatgtgaagacagacaaatgggatttctactgccagtgagctcagcctaccgctggccctgccgtttcccctccttggctttatgcaaatacaatcagcccagtgcaaa

SEQ ID NO: 152617 - DNA, 559 bp, Homo sapiens
  Payload ID: 10032
  Gene Symbol: MIA
  Gene Name: melanoma inhibitory activity
  ENST ID: ENST00000597600
  CDS Start-End: 423-559
aggtagacagaaaagttctccaagtcctcaccggcccagaggcccagccatcttcacctctcaagctgtctgtagaggtccacgtgtcaagaaaactgaggacagaggccctcagtccagttcccacaagcaactgcatctccccaacagctgcctgaatgagtttggaagcagtcctcccaccattcagccttcagatgaaactgcacccctggctgacaggctgattgcagccttatagcagaccttaagcctgagacattcgacccacagaaaaggtgataattttggtctttttttttctaaacaggttcttgctctagagtgcagtggcacgatcatggctcactgcggcctctacatcctgggttcaagtggtcctcccacctcaacctcctgagtggctgggactacagtccacgatggcccggtccctggtgtgccttggtgtcatcatcttgctgtctgccttctccggacctggtgtcaggggtggtcctatgcccaagctggctgaccggaagctgtgtgcggaccaggagtgcagccaccctatctc

SEQ ID NO: 152618 - DNA, 2570 bp, Homo sapiens
  Payload ID: 10033
  Gene Symbol: MIA2
  Gene Name: melanoma inhibitory activity 2
  Uniprot ID: Q96PC5
  ENST ID: ENST00000280082
  CDS Start-End: 200-2164
aaaacagacagtgtttgtctctcaagttaaaccaacaagccgatagaaaaaggtagttatcaagagatttttaaaacttcaaccctttttctcttatagttagtgaagagagtagaatatctccagttttggctgacatctctacaacctgaacaattggcttaaacttcacttgggattcccggttgcttgttttagcatggcaaaatttggcgttcacagaatccttcttctggctatttctctgacaaagtgtctggagagtacaaaactgctggcagaccttaaaaaatgtggtgacttggaatgtgaagctttaataaacagagtctcagccatgagagattatagaggacctgactgccgatacctgaacttcactaagggagaagagatatctgtttatgttaaacttgcaggagaaagggaagatttgtgggcaggaagtaaaggaaaggagtttggatattttcccagagatgcagtccagattgaagaggtgttcatatctgaggaaattcagatgtcaacgaaagaatctgactttctttgtcttcttggagtaagttacacatttgacaatgaagatagtgaattaaacggtgattatggtgaaaatatatatccttatgaagaagataaagatgaaaaatctagtatatatgaaagtgattttcagatagaacctggattttatgcaacttatgaaagtactttgtttgaagaccaagttccagcattagaggctcctgaagatatcggaagtaccagtgaatcaaaagactgggaagaagtagttgttgaaagtatggaacaggatcgtattccagaagtgcatgtcccaccatcttcagctgtgtctggagtcaaagaatggtttggattgggaggagaacaagctgaagagaaggcttttgaatcagttattgaacctgtacaagaaagctcatttcggagtagaaaaatagcagtggaagatgagaatgacctagaggaattaaataatggtgagcctcaaacagaacatcagcaagaatctgaatcagaaattgattcagtgccaaagacacagtctgaactagcatctgagtcagagcacattcccaaacctcaatccactggttggtttggtggaggatttacaagttatttaggttttggagatgaggatacagggcttgaattaatagctgaagaaagcaatccaccactacaagattttcccaattccatatcatctgataaagaagccacagttccatgtacagaaatattaacagaaaaaaaagacacaatcactaatgatagcttgagtctcaagccaagttggtttgattttggttttgctatactaggctttgcatatgccaaggaagataaaattatgttagatgacaggaaaaatgaagaagatggtggggcagatgaacatgaacatcctctaacaagtgaattagaccctgaaaaagaacaagaaatagaaacgataaaaattatagaaacagaagatcaaatagacaagaaaccagtctcagaaaaaacagacgaatctgatactataccatatttgaaaaagttcttgtataattttgacaacccttggaacttccagaacattccaaaggaaacagaattgccatttcccaaacagatactggatcaaaataatgtaattgaaaatgaagaaactggagaattttccattgataattatcccacagataatacaaaagttatgatattcaaaagttcatacagtctgtcagatatggtctctaacatagagttacctacgagaattcacgaagaagtatattttgaaccctcatcttctaaagatagtgatgaaaattcgaaaccatcagtagacaccgaagggcctgctctggtggagatagacagatctgtggaaaataccctgctaaatagtcagatggtttcaactgataactctttgtcttctcaaaattatatttctcagaaagaagatgcttctgagtttcagattctgaaatacttattccaaattgatgtttatgatttcatgaattctgcattttcaccaattgtaattcttacagaaagggtaagtttgccttttaaaccttttgcaataattttacctattttgctaaatataagagtggctacaaaatatgtttgaatgaatcctccctgtttaatgtttatataatgtttctctttccatgacatcttacctgtaagatttctctttatatgaatgttttgtcaaatggatattgatttttaaaaacatttccctaagttttgttgatgttgatcttgagcggtgtttgctttttactccaccctccccatttttcaaattagggaaagttaggtactaaataagttaactcaggaataataggaactagagctgggtgtggtggtgtgtgcctggagttcccactacttaggaggctgaggcaggaggatccttttactgaatgtaacaaggagaataaaagggaagagtgagcccaagggtttgagaccagtctgggcaacatagctagaccttatctcttaaaaaagaaaaaaaaaaa

SEQ ID NO: 152619 - DNA, 554 bp, Homo sapiens
  Payload ID: 10033
  Gene Symbol: MIA2
  Gene Name: melanoma inhibitory activity 2
  ENST ID: ENST00000557148
  CDS Start-End: 278-554
agggttgctctgtgattctatgtctagagatgtgatctccctatgttgctcaggctgcccaggctggtctcgaactcctgggctcaagtgattctcctgctttggcctctcaaagtgctggggttacaggcatgagccgccatggctggctgatgattcattctttggcattatgcattagtgaagagagtagaatatctccagttttggctgacatctctacaacctgaacaattggcttaaacttcacttgggattcccggttgcttgttttagcatggcaaaatttggcgttcacagaatccttcttctggctatttctctgacaaagtgtctggagagtacaaaactgctggcagaccttaaaaaatgtggtgacttggaatgtgaagctttaataaacagagtctcagccatgagagattatagaggacctgactgccgatacctgaacttcactaagggagaagagatatctgtttatgttaaacttgcaggagaaagggaagatttgtgggcaggaagtaaaggaaaggagtttggatattttccca

SEQ ID NO: 152620 - DNA, 8142 bp, Homo sapiens
  Payload ID: 10034
  Gene Symbol: MIA3
  Gene Name: melanoma inhibitory activity family, member 3
  Uniprot ID: Q5JRA6
  ENST ID: ENST00000344922
  CDS Start-End: 26-5749
accggctccccgaggtgaccacaacatggctgcggcgcctgggctgctcgtctggctgctcgtgctccggctgccctggcgggtgccgggccagctggaccccagcactggccggcggttctcggagcacaaactctgcgcggacgacgaatgcagcatgttaatgtaccgcggtgaggctcttgaagatttcacaggcccggattgtcgttttgtgaattttaaaaaaggtgatcctgtatatgtttactataaactggcaagaggatggcctgaagtttgggctggaagtgttggacgcacttttggatattttccaaaagatttaatccaggtagttcatgaatataccaaagaagagctacaagttccaacagatgagacggattttgtttgttttgatggaggaagagatgattttcataattataatgtagaagaacttttagggtttttggaactgtacaattctgcagctacagattctgagaaagctgtagaaaaaactttacaggatatggaaaaaaaccctgaattatctaaggaaagggaacctgaacctgaaccagtagaagccaactcagaggaaagtgatagtgtattctcagaaaacactgaggatcttcaggaacagtttacaactcagaagcaccactcccatgcaaacagccaagcaaatcatgctcagggagagcaggcttcatttgaatcttttgaagaaatgctgcaagataaactaaaagtgccagaaagtgaaaacaacaaaaccagcaatagttctcaggtctcaaatgaacaggataagattgatgcctataaacttttgaaaaaagaaatgactctagacttgaaaaccaaatttggctcaacagctgatgcacttgtatctgatgatgagacaaccagactcgttacttcattagaagatgattttgatgaggaattggatactgagtattatgcagttggaaaggaagatgaggagaaccaagaagactttgatgagttgccattacttacctttacagatggggaagatatgaaaactccagcaaagtctggcgttgagaaatatccaacagataaagagcagaattcaaatgaagaggacaaggttcagctaactgtgccccctggcatcaaaaatgatgataaaaatatactaacaacctggggggacactatcttctctattgtcacaggaggtgaagaaacaagagatacgatggatttagagagctctagttcagaggaagaaaaagaagatgatgatgatgcattagtcccagatagcaaacaggggaaaccacagtcagcaacagattatagtgaccctgacaatgtagatgatggtctttttattgtagacattcctaaaacaaataatgacaaagaagtaaacgcagaacatcacattaaaggaaaagggaggggagttcaggaatccaagaggggcctggtacaagataagacagaattagaggatgaaaatcaagaaggcatgactgtgcacagttctgttcacagcaataacctcaactctatgccagctgctgaaaagggtaaagacacattaaaatcagcttatgatgatacagaaaatgacctaaaaggagcagctattcatatctcaaaaggaatgctccacgaagaaaagcctggagagcagattttggaaggtggctcagagagtgaatctgcacagaaagctgcagggaatcaaatgaatgacagaaagattcaacaggaatccctgggtagtgcaccactcatgggagatgaccaccctaacgcatccagagacagtgtggagggagacgctttggtaaatggggccaaactgcacacgctttcagtggagcatcaacgtgaggaattgaaagaggaattagttcttaaaactcaaaaccaacctagattctcctctccagatgagattgatttgcccagagaactggaagacgaggttcccattctgggaagaaatcttccctggcaacaagaaagagatgtggctgccacagccagtaagcaaatgagtgagaagataaggctctctgagggagaagccaaagaggactccttggatgaagagttttttcatcacaaggcaatgcagggcacagaggtaggacagacagaccaaactgacagcacaggaggaccagctttcctttctaaagtagaagaggatgattatccctctgaagaactactagaggatgaaaacgctataaatgcaaaacggtctaaagaaaaaaaccctgggaatcagggcaggcagtttgatgttaatctgcaagtccctgacagagcagttttagggaccattcatccagatccagaaattgaagaaagcaagcaagaaactagtatgattttggatagcgaaaaaacaagtgagactgctgccaaaggggtcaacacaggaggcagggaaccaaatacaatggtggaaaaagaacgccctctggcagataagaaagcacagagaccatttgaacgaagtgacttttctgacagcataaaaattcagactccagaattaggtgaagtgtttcagaataaagattctgattatctgaagaacgacaaccctgaggaacatctgaagacctcagggcttgcaggggagcctgagggagaactctcaaaagaggaccatgagaacacagagaagtacatgggcacagaaagccaggggtctgctgctgcagaacctgaagatgactcgttccactggactccacatacaagtgtagagccagggcatagtgacaagagggaggacttacttatcataagcagcttctttaaagaacaacagtctttgcagcggttccagaagtactttaatgtccatgagctggaagccttgctacaagaaatgtcatcaaaactgaagtcagcgcagcaggagagcctgccctataatatggaaaaagtcctagataaggtcttccgtgcttctgagtcacaaattctgagcatagcagaaaaaatgcttgatactcgtgtggctgaaaatagagatctgggaatgaacgaaaataacatatttgaagaggctgcagtgcttgatgacattcaagacctcatctattttgtcaggtacaagcactccacagcagaggagacagccacactggtgatggcaccacctctagaggaaggcttgggtggagcaatggaagagatgcaaccactgcatgaagataatttctcacgagagaagacagcagaacttaatgtgcaggttcctgaagaacccacccacttggaccaacgtgtgattggggacactcatgcctcagaagtgtcacagaagccaaatactgagaaagacctggacccagggccagttacaacagaagacactcctatggatgctattgatgcaaacaagcaaccagagacagccgccgaagagccggcaagtgtcacacctttggaaaacgcaatccttctaatatattcattcatgttttatttaactaagtcgctagttgctacattgcctgatgatgttcagcctgggcctgatttttatggactgccatggaaacctgtatttatcactgccttcttgggaattgcttcgtttgccattttcttatggagaactgtccttgttgtgaaggatagagtatatcaagtcacggaacagcaaatttctgagaagttgaagactatcatgaaagaaaatacagaacttgtacaaaaattgtcaaattatgaacagaagatcaaggaatcaaagaaacatgttcaggaaaccaggaaacaaaatatgattctctctgatgaagcaattaaatataaggataaaatcaagacacttgaaaaaaatcaggaaattctggatgacacagctaaaaatcttcgtgttatgctagaatctgagagagaacagaatgtcaagaatcaggacttgatatcagaaaacaagaaatctatagagaagttaaaggatgttatttcaatgaatgcctcagaattttcagaggttcagattgcacttaatgaagctaagcttagtgaagagaaggtgaagtctgaatgccatcgggttcaagaagaaaatgctaggcttaagaagaaaaaagagcagttgcagcaggaaatcgaagactggagtaaattacatgctgagctcagtgagcaaatcaaatcatttgagaagtctcagaaagatttggaagtagctcttactcacaaggatgataatattaatgctttgactaactgcattacacagttgaatctgttagagtgtgaatctgaatctgagggtcaaaataaaggtggaaatgattcagatgaattagcaaatggagaagtgggaggtgaccggaatgagaagatgaaaaatcaaattaagcagatgatggatgtctctcggacacagactgcaatatcggtagttgaagaggatctaaagcttttacagcttaagctaagagcctccgtgtccactaaatgtaacctggaagaccaggtaaagaaattggaagatgaccgcaactcactacaagctgccaaagctggactggaagatgaatgcaaaaccttgaggcagaaagtggagattctgaatgagctctatcagcagaaggagatggctttgcaaaagaaactgagtcaagaagagtatgaacggcaagaaagagagcacaggctgtcagctgcagatgaaaaggcagtttcggctgcagaggaagtaaaaacttacaagcggagaattgaagaaatggaggatgaattacagaagacagagcggtcatttaaaaaccagatcgctacccatgagaagaaagctcatgaaaactggctcaaagctcgtgctgcagaaagagctatagctgaagagaaaagggaagctgccaatttgagacacaaattattagaattaacacaaaagatggcaatgctgcaagaagaacctgtgattgtaaaaccaatgccaggaaaaccaaatacacaaaaccctccacggagaggtcctctgagccagaatggctcttttggcccatcccctgtgagtggtggagaatgctcccctccattgacagtggagccacccgtgagacctctctctgctactctcaatcgaagagatatgcctagaagtgaatttggatcagtggacgggcctctacctcatcctcgatggtcagctgaggcatctgggaaaccctctccttctgatccaggatctggtacagctaccatgatgaacagcagctcaagaggctcttcccctaccagggtactcgatgaaggcaaggttaatatggctccaaaagggccccctcctttcccaggagtccctctcatgagcacccccatgggaggccctgtaccaccacccattcgatatggaccaccacctcagctctgcggaccttttgggcctcggccacttcctccaccctttggccctggtatgcgtccaccactaggcttaagagaatttgcaccaggcgttccaccaggaagacgggacctgcctctccaccctcggggatttttacctggacacgcaccatttagacctttaggttcacttggcccaagagagtactttattcctggtacccgattaccacccccaacccatggtccccaggaatacccaccaccacctgctgtaagagacttactgccgtcaggctctagagatgagcctccacctgcctctcagagcactagccaggactgttcacaggctttaaaacagagcccataaaactatgacctctgaggtttcattggaaagaaagtgtactgtgcattatccattacagtaaaggatttcattggcttcaaaatccaaaagtttattttaaaaggtttgttgttagaactaagctgccttggcagtgtgcatttttgagccaaacaattcaaaaatgtcatttcttccctaaataaaaatcaccttttaagctagagcgtccttacaactttgaaatgtgcaataaagaatacctgtgttttagctaatgtagcatatgtaattgcaaaatgatttagaatgtcatgaaaaatatgaacatttcctgtggaaatgctttaagaacatgtatttccattatcctatttttagtgtacaccagctgaatacggagcaatggtgtttataagcgtttttttaaactatctggtcacaaagactgttacgctaaaaatgtttactaaaagatcactaaactatctcccctcttgctgaagttctttgtagtaatagctcataaaaatttgtttattaatatttcccaagtgtctgttgactcattggactgttatgaggcttgtgccatttggggaacatgtaaactcaggctcccagaactgaagatggtggctggtggcacacttccggctgctcctccgtcacctgtgaactctacaagtgacgtctttttatttcaaagaagtttatttcccacttgtatagcattcacatgctttctttacgatcctcattgtctatttgagaatggttttctgagagtgagtttacattagtagcaagagttgtttgacctgatgttccattgtttttaccattcctgtagaaaaagggtgcacaacagaaaaatgaaaatgatgtgtcatggccataaaagtatagaaatctttaaaaattttaaaatgtacagtcccttatctatctttcccattccttgccactgatttttgaggaatataataaaaagattggaagagtataatgccatgagaaagaatgatttaggactgtgagggttataacatgccctaggtcagcaaccaagggttgaaatcagttctgttttagggggaaatgggggcgacagatattattccaaaattaatattaattaatatttaaacgttggtgtttttatttaaaaatcagtaactaaccatctggaattgcaccatacttaaagtcttatccattactacactgtctttaaaacaatgtttctttaaatactctacaacgtttctaagaacgaacttcagacattttaattacagtaataatagcactccttttaaggagtttcagatccacactaaaactaaaatcataaaaggctgatacttttgtttgctgctaggctatattcttccattctttgaagtcctatgatgtaatatttttgaaacctagtgtatgtcttgtcactgttgtgatatttaatcgattaagaataccttgtaaaaaggagcaaaagcttcaatgtgaaacaattttctctctttatactaaacaactgaagatagatagtttagaaagataaggacctttgaaagaagacaactctgtcaaagttcataaggaatataaaaattcttcaggaaaagagaattcaatctatatgtcctcccgtttaatatcaagaatagaagaaattaagaggaaaactccacagaagagcataggccacttttagccatgtaaaaataagattaagtcacaaatacaacttttgaatttacctgtcaatatctctttaggacacaaaacaatgctgaagttaatataatttctaattttaaatgtcatttaagtgtagattatgccatctaggaaggtaagtaggaaaggtaaattaaatctatttttaaaattcaaaatattagagtatttttcccctctaaagccttttttggtgattattctgtatctgacataattgagaaactggtaagctgtaaagattccagtgtagcttctctgagaagttgtgagccagtccataactgcttcctcacatccatctgattgcaccatttctgcagcaaaccccaaagcagggtgccaatatgcagatggcatagggagtatcatccctcagccaaatcacttttccatctctaaagtttcatctattttggaagtcatctccaactaattgtgtctggatttagttgctaaaattgtcttatttatgaagcagcaatattcagcctgaaagcatttctgccatagttgttgtagttatatcgccaatggctgatttttttcattggaaagtaaatttaagtaattcgtgggatgtggtatattctgtgtcaacttcaagataatcactcattttctcgttatattcaggtctgaattaaagttaagttaatcacacagtg

SEQ ID NO: 152621 - DNA, 2026 bp, Homo sapiens
  Payload ID: 10034
  Gene Symbol: MIA3
  Gene Name: melanoma inhibitory activity family, member 3
  Uniprot ID: Q5JRA6
  ENST ID: ENST00000344507
  CDS Start-End: 4-1506
aacatggctgcggcgcctgggctgctcgtctggctgctcgtgctccggctgccctggcgggtgccgggccagctggaccccagcactggccggcggttctcggagcacaaactctgcgcggacgacgaatgcagcatgttaatgtaccgcggtgaggctcttgaagatttcacaggcccggattgtcgttttgtgaattttaaaaaaggtgatcctgtatatgtttactataaactggcaagaggatggcctgaagtttgggctggaagtgttggacgcacttttggatattttccaaaagatttaatccaggtagttcatgaatataccaaagaagagctacaagttccaacagatgagacggattttgtttgttttgatggaggaagagatgattttcataattataatgtagaagaacttttagggtttttggaactgtacaattctgcagctacagattctgagaaagctgtagaaaaaactttacaggatatggaaaaaaaccctgaattatctaaggaaagggaacctgaacctgaaccagtagaagccaactcagaggaaagtgatagtgtattctcagaaaacactgaggatcttcaggaacagtttacaactcagaagcaccactcccatgcaaacagccaagcaaatcatgctcagggagagcaggcttcatttgaatcttttgaagaaatgctgcaagataaactaaaagtgccagaaagtgaaaacaacaaaaccagcaatagttctcaggtctcaaatgaacaggataagattgatgcctataaacttttgaaaaaagaaatgactctagacttgaaaaccaaatttggctcaacagctgatgcacttgtatctgatgatgagacaaccagactcgttacttcattagaagatgattttgatgaggaattggatactgagtattatgcagttggaaaggaagatgaggagaaccaagaagactttgatgagttgccattacttacctttacagatggggaagatatgaaaactccagcaaagtctggcgttgagaaatatccaacagataaagagcagaattcaaatgaagaggacaaggttcagctaactgtgccccctggcatcaaaaatgatgataaaaatatactaacaacctggggggacactatcttctctattgtcacaggaggtgaagaaacaagagatacgatggatttagagagctctagttcagaggaagaaaaagaagatgatgatgatgcattagtcccagatagcaaacaggggaaaccacagtcagcaacagattatagtgaccctgacaatgtagatgatggtctttttattgtagacattcctaaaacaaataatgacaaagaagtaaacgcagaacatcacattaaaggaaaagggaggggagttcaggaatccaagaggggcctggtacaagataagacagaattagaggatgaaaatcaagaaggctttaaaacagagcccataaaactatgacctctgaggtttcattggaaagaaagtgtactgtgcattatccattacagtaaaggatttcattggcttcaaaatccaaaagtttattttaaaaggtttgttgttagaactaagctgccttggcagtgtgcatttttgagccaaacaattcaaaaatgtcatttcttccctaaataaaaatcaccttttaagctagagcgtccttacaactttgaaatgtgcaataaagaatacctgtgttttagctaatgtagcatatgtaattgcaaaatgatttagaatgtcatgaaaaatatgaacatttcctgtggaaatgctttaagaacatgtatttccattatcctatttttagtgtacaccagctgaatacggagcaatggtgtttataagcgtttttttaaactatctggtcacaaagactgttacgctaaaaatgtttactaaaagatcactaaactatctcccctcttgctgaagttctttgtagtaatagctcataaaaatttgtttattaatattt

SEQ ID NO: 152622 - DNA, 2735 bp, Homo sapiens
  Payload ID: 10034
  Gene Symbol: MIA3
  Gene Name: melanoma inhibitory activity family, member 3
  Uniprot ID: Q5JRA6
  ENST ID: ENST00000340535
  CDS Start-End: 174-2531
gacgtgttttataggcggcataaagcgaaagtgcaggcagctgtggaaggcgaagttcaatcccagagtccgccccctgaattggggcctttccggaggaggaagctctgaaaaacagggggcccagtgccattccgcagggaattgtcgcttgcgttcagctgttctacacaatggactcagtacctgccactgtgccttctatcgccgctaccccgggggacccggaacttgtgggacccttgtctgtgctctacgcagccttcatagccaagctgctggagctagttgctacattgcctgatgatgttcagcctgggcctgatttttatggactgccatggaaacctgtatttatcactgccttcttgggaattgcttcgtttgccattttcttatggagaactgtccttgttgtgaaggatagagtatatcaagtcacggaacagcaaatttctgagaagttgaagactatcatgaaagaaaatacagaacttgtacaaaaattgtcaaattatgaacagaagatcaaggaatcaaagaaacatgttcaggaaaccaggaaacaaaatatgattctctctgatgaagcaattaaatataaggataaaatcaagacacttgaaaaaaatcaggaaattctggatgacacagctaaaaatcttcgtgttatgctagaatctgagagagaacagaatgtcaagaatcaggacttgatatcagaaaacaagaaatctatagagaagttaaaggatgttatttcaatgaatgcctcagaattttcagaggttcagattgcacttaatgaagctaagcttagtgaagagaaggtgaagtctgaatgccatcgggttcaagaagaaaatgctaggcttaagaagaaaaaagagcagttgcagcaggaaatcgaagactggagtaaattacatgctgagctcagtgagcaaatcaaatcatttgagaagtctcagaaagatttggaagtagctcttactcacaaggatgataatattaatgctttgactaactgcattacacagttgaatctgttagagtgtgaatctgaatctgagggtcaaaataaaggtggaaatgattcagatgaattagcaaatggagaagtgggaggtgaccggaatgagaagatgaaaaatcaaattaagcagatgatggatgtctctcggacacagactgcaatatcggtagttgaagaggatctaaagcttttacagcttaagctaagagcctccgtgtccactaaatgtaacctggaagaccaggtaaagaaattggaagatgaccgcaactcactacaagctgccaaagctggactggaagatgaatgcaaaaccttgaggcagaaagtggagattctgaatgagctctatcagcagaaggagatggctttgcaaaagaaactgagtcaagaagagtatgaacggcaagaaagagagcacaggctgtcagctgcagatgaaaaggcagtttcggctgcagaggaagtaaaaacttacaagcggagaattgaagaaatggaggatgaattacagaagacagagcggtcatttaaaaaccagatcgctacccatgagaagaaagctcatgaaaactggctcaaagctcgtgctgcagaaagagctatagctgaagagaaaagggaagctgccaatttgagacacaaattattagaattaacacaaaagatggcaatgctgcaagaagaacctgtgattgtaaaaccaatgccaggaaaaccaaatacacaaaaccctccacggagaggtcctctgagccagaatggctcttttggcccatcccctgtgagtggtggagaatgctcccctccattgacagtggagccacccgtgagacctctctctgctactctcaatcgaagagatatgcctagaagtgaatttggatcagtggacgggcctctacctcatcctcgatggtcagctgaggcatctgggaaaccctctccttctgatccaggatctggtacagctaccatgatgaacagcagctcaagaggctcttcccctaccagggtactcgatgaaggcaaggttaatatggctccaaaagggccccctcctttcccaggagtccctctcatgagcacccccatgggaggccctgtaccaccacccattcgatatggaccaccacctcagctctgcggaccttttgggcctcggccacttcctccaccctttggccctggtatgcgtccaccactaggcttaagagaatttgcaccaggcgttccaccaggaagacgggacctgcctctccaccctcggggatttttacctggacacgcaccatttagacctttaggttcacttggcccaagagagtactttattcctggtacccgattaccacccccaacccatggtccccaggaatacccaccaccacctgctgtaagagacttactgccgtcaggctctagagatgagcctccacctgcctctcagagcactagccaggactgttcacaggctttaaaacagagcccataaaactatgacctctgaggtttcattggaaagaaagtgtactgtgcattatccattacagtaaaggatttcattggcttcaaaatccaaaagtttattttaaaaggtttgttgttagaactaagctgccttggcagtgtgcatttttgagccaaacaattcaaaaatgtcatttcttccctaaataaaaatcaccttttaagctag

SEQ ID NO: 152623 - DNA, 3045 bp, Homo sapiens
  Payload ID: 10034
  Gene Symbol: MIA3
  Gene Name: melanoma inhibitory activity family, member 3
  ENST ID: ENST00000354906
  CDS Start-End: 1-3045
attagtcccagatagcaaacaggggaaaccacagtcagcaacagattatagtgaccctgacaatgtagatgatggtctttttattgtagacattcctaaaacaaataatgacaaagaagtaaacgcagaacatcacattaaaggaaaagggaggggagttcaggaatccaagaggggcctggtacaagataagacagaattagaggatgaaaatcaagaaggcatgactgtgcacagttctgttcacagcaataacctcaactctatgccagctgctgaaaagggtaaagacacattaaaatcagcttatgatgatacagaaaatgacctaaaaggagcagctattcatatctcaaaaggaatgctccacgaagaaaagcctggagagcagattttggaaggtggctcagagagtgaatctgcacagaaagctgcagggaatcaaatgaatgacagaaagattcaacaggaatccctgggtagtgcaccactcatgggagatgaccaccctaacgcatccagagacagtgtggagggagacgctttggtaaatggggccaaactgcacacgctttcagtggagcatcaacgtgaggaattgaaagaggaattagttcttaaaactcaaaaccaacctagattctcctctccagatgagattgatttgcccagagaactggaagacgaggttcccattctgggaagaaatcttccctggcaacaagaaagagatgtggctgccacagccagtaagcaaatgagtgagaagataaggctctctgagggagaagccaaagaggactccttggatgaagagttttttcatcacaaggcaatgcagggcacagaggtaggacagacagaccaaactgacagcacaggaggaccagctttcctttctaaagtagaagaggatgattatccctctgaagaactactagaggatgaaaacgctataaatgcaaaacggtctaaagaaaaaaaccctgggaatcagggcaggcagtttgatgttaatctgcaagtccctgacagagcagttttagggaccattcatccagatccagaaattgaagaaagcaagcaagaaactagtatgattttggatagcgaaaaaacaagtgagactgctgccaaaggggtcaacacaggaggcagggaaccaaatacaatggtggaaaaagaacgccctctggcagataagaaagcacagagaccatttgaacgaagtgacttttctgacagcataaaaattcagactccagaattaggtgaagtgtttcagaataaagattctgattatctgaagaacgacaaccctgaggaacatctgaagacctcagggcttgcaggggagcctgagggagaactctcaaaagaggaccatgagaacacagagaagtacatgggcacagaaagccaggggtctgctgctgcagaacctgaagatgactcgttccactggactccacatacaagtgtagagccagggcatagtgacaagagggaggacttacttatcataagcagcttctttaaagaacaacagtctttgcagcggttccagaagtactttaatgtccatgagctggaagccttgctacaagaaatgtcatcaaaactgaagtcagcgcagcaggagagcctgccctataatatggaaaaagtcctagataaggtcttccgtgcttctgagtcacaaattctgagcatagcagaaaaaatgcttgatactcgtgtggctgaaaatagagatctgggaatgaacgaaaataacatatttgaagaggctgcagtgcttgatgacattcaagacctcatctattttgtcaggtacaagcactccacagcagaggagacagccacactggtgatggcaccacctctagaggaaggcttgggtggagcaatggaagagatgcaaccactgcatgaagataatttctcacgagagaagacagcagaacttaatgtgcaggttcctgaagaacccacccacttggaccaacgtgtgattggggacactcatgcctcagaagtgtcacagaagccaaatactgagaaagacctggacccagggccagttacaacagaagacactcctatggatgctattgatgcaaacaagcaaccagagacagccgccgaagagccggcaagtgtcacacctttggaaaacgcaatccttctaatatattcattcatgttttatttaactaagtcgctagttgctacattgcctgatgatgttcagcctgggcctgatttttatggactgccatggaaacctgtatttatcactgccttcttgggaattgcttcgtttgccattttcttatggagaactgtccttgttgtgaaggatagagtatatcaagtcacggaacagcaaatttctgagaagttgaagactatcatgaaagaaaatacagaacttgtacaaaaattgtcaaattatgaacagaagatcaaggaatcaaagaaacatgttcaggaaaccaggaaacaaaatatgattctctctgatgaagcaattaaatataaggataaaatcaagacacttgaaaaaaatcaggaaattctggatgacacagctaaaaatcttcgtgttatgctagaatctgagagagaacagaatgtcaagaatcaggacttgttgcagcaggaaatcgaagactggagtaaattacatgctgagctcagtgagcaaatcaaatcatttgagaagtctcagaaagatttggaagtagctcttactcacaaggatgataatattaatgctttgactaactgcattacacagttgaatctgttagagtgtgaatctgaatctgagggtcaaaataaaggtggaaatgattcagatgaattagcaaatggagaagtgggaggtgaccggaatgagaagatgaaaaatcaaattaagcagatgatggatgtctctcggacacagactgcaatatcggtagttgaagaggatctaaagcttttacagcttaagctaagagcctccgtgtccactaaatgtaacctggaagaccaggt

SEQ ID NO: 152624 - DNA, 605 bp, Homo sapiens
  Payload ID: 10034
  Gene Symbol: MIA3
  Gene Name: melanoma inhibitory activity family, member 3
  ENST ID: ENST00000450260
  CDS Start-End: 1-322
gtcagctgaggcatctgggaaaccctctccttctgatccaggatctggtacagctaccatgatgaacagcagctcaagaggctcttcccctaccagggtactcgatgaaggcaaggttaatatggctccaaaagggccccctcctttcccaggagtccctctcatgagcacccccatgggaggccctgtaccaccacccattcgatatggaccaccacctcagctctgcggaccttttgggcctcggccacttcctccaccctttgataaagatggcaggccaggcacagtggctcacgcctgtaatcccagcactttatgaatcccagcattcattagacgaggctgaggcaggtggatcccttgagcctaggagtttgagaccagcctgggcaacatggtgaaacccccatctctacaaaaaatccaaaaattagctgggagtggtggcgtgcacctgtagtcccagctactggggagtctgaggtgggaggattgattgagtccgggagattgaggctgcagtgagccatgatcactcattacactccagcccatgtgacaggcaagaccctgccgccaaaaaaaaaaaaaaaaaaaaaaaa

SEQ ID NO: 152625 - DNA, 3823 bp, Homo sapiens
  Payload ID: 10035
  Gene Symbol: MLPH
  Gene Name: melanophilin
  Uniprot ID: Q9BV36
  ENST ID: ENST00000264605
  CDS Start-End: 295-2097
atccagaggtgtccgcgctcccggagctgggcggagcggggcgcagcccacgtggttcgggcgggaggcgccgggacgtggccagttgcccgcctgccccggagagccaggcgctaaccagccgctctgcgccccgcgccctgcttgcccccattatccagccttgccccggcgccctgacctgacgccctggcctgacgccctgcttcgtcgcctcctttctctcccaggtgctggaccagggactgagcgtcccccggagagggtccggtgtgaccccgacaagaagcagaaatggggaagaaactggatctttccaagctcactgatgaagaggcccagcatgtcttggaagttgttcaacgagattttgacctccgaaggaaagaagaggaacggctagaggcgttgaagggcaagattaagaaggaaagctccaagagggagctgctttccgacactgcccatctgaacgagacccactgcgcccgctgcctgcagccctaccagctgcttgtgaatagcaaaaggcagtgcctggaatgtggcctcttcacctgcaaaagctgtggccgcgtccacccggaggagcagggctggatctgtgacccctgccatctggccagagtcgtgaagatcggctcactggagtggtactatgagcatgtgaaagcccgcttcaagaggttcggaagtgccaaggtcatccggtccctccacgggcggctgcagggtggagctgggcctgaactgatatctgaagagagaagtggagacagcgaccagacagatgaggatggagaacctggctcagaggcccaggcccaggcccagccctttggcagcaaaaaaaagcgcctcctctccgtccacgacttcgacttcgagggagactcagatgactccactcagcctcaaggtcactccctgcacctgtcctcagtccctgaggccagggacagcccacagtccctcacagatgagtcctgctcagagaaggcagcccctcacaaggctgagggcctggaggaggctgatactggggcctctgggtgccactcccatccggaagagcagccgaccagcatctcaccttccagacacggcgccctggctgagctctgcccgcctggaggctcccacaggatggccctggggactgctgctgcactcgggtcgaatgtcatcaggaatgagcagctgcccctgcagtacttggccgatgtggacacctctgatgaggaaagcatccgggctcacgtgatggcctcccaccattccaagcggagaggccgggcgtcttctgagagtcagatctttgagctgaataagcatatttcagctgtggaatgcctgctgacctacctggagaacacagttgtgcctcccttggccaagggtctaggtgctggagtgcgcacggaggccgatgtagaggaggaggccctgaggaggaagctggaggagctgaccagcaacgtcagtgaccaggagacctcgtccgaggaggaggaagccaaggacgaaaaggcagagcccaacagggacaaatcagttgggcctctcccccaggcggacccggaggtgggcacggctgcccatcaaaccaacagacaggaaaaaagcccccaggaccctggggaccccgtccagtacaacaggaccacagatgaggagctgtcagagctggaggacagagtggcagtgacggcctcagaagtccagcaggcagagagcgaggtttcagacattgaatccaggattgcagccctgagggccgcagggctcacggtgaagccctcgggaaagccccggaggaagtcaaacctcccgatatttctccctcgagtggctgggaaacttggcaagagaccagaggacccaaatgcagacccttcaagtgaggccaaggcaatggctgtgccctatcttctgagaagaaagttcagtaattccctgaaaagtcaaggtaaagatgatgattcttttgatcggaaatcagtgtaccgaggctcgctgacacagagaaaccccaacgcgaggaaaggaatggccagccacaccttcgcgaaacctgtggtggcccaccagtcctaacgggacaggacagagagacagagcagccctgcactgttttccctccaccacagccatcctgtccctcattggctctgtgctttccactatacacagtcaccgtcccaatgagaaacaagaaggagcaccctccacatggactcccacctgcaagtggacagcgacattcagtcctgcactgctcacctgggtttactgatgactcctggctgccccaccatcctctctgatctgtgagaaacagctaagctgctgtgacttccctttaggacaatgttgtgtaaatctttgaaggacacaccgaagacctttatactgtgatcttttacccctttcactcttggctttcttatgttgctttcatgaatggaatggaaaaaagatgactcagttaaggcaccagccatatgtgtattcttgatggtctatatcggggtgtgagcagatgtttgcgtatttcttgtgggtgtgactggatattagacatccggacaagtgactgaactaatgatctgctgaataatgaaggaggaatagacaccccagtccccaccctacgtgcacccgctctgcaagttcccatgtgatctgtagaccaggggaaattacactgcggtcaagggcagagcctgcacatgacagcaagtgagcatttgatagatgctcagatgctagtgcagagagcctgctgggagacgaagagacagcaggcagagctccagatgggcaaggaagaggcttggttctagcctggctctgcccctcactgcagtggatccagtggggcagaggacagagggtcacaaccaatgagggatgtctgccaaggatgggggtgcagaggccacaggagtcagcttgccactcgcccattggttacatagatgatctctcagacaggctgggactcagagttatttcctagtatcggtgtgccccatccagttttaagtggagccctccaagactctccagagctgcctttgaacatcctaacagtaatcacatctcaccctccctgaggttcactttagacaggacccaatggctgcactgcctttgtcagagggggtgctgagaggagtggcttcttttagaatcaaacagtagagacaagagtcaagccttgtgtcttcaagcattgaccaagttaagtgtttccttccctctctcaataagacacttccaggagctttccaatctctcacttaaaactaaggtttgaatctcaaagtgttgctgggaggctgatactcctgcaacttcaggagacctgtgagcacacattagcagctgtttctctgactccttgtggcatcagataaaaacgtgggagtttttccatataattcccagccttacttataaattctattctttgaaaaaattattcaggctaggtaaggtggctcatacctataatcccagccctttgagaggccaaggtgggagaattgcttgaggccaggagtttgagacctcctgggcaacatagtgagatcccatctctacaaaaaacaaaacaaaaaaattacccaagcatgatggtatatgcctgtagtcgtacctacttacttaggaggctgaggcaggaggatcacttgagccctggaggttggggctgcagtgagccatgatcgcatcactatactcgagcctgggcaacagagtgagaccttgtctcttaaaaaaattaataataaataaatgaaaataattcttcaga

SEQ ID NO: 152626 - DNA, 2332 bp, Homo sapiens
  Payload ID: 10035
  Gene Symbol: MLPH
  Gene Name: melanophilin
  Uniprot ID: Q9BV36
  ENST ID: ENST00000338530
  CDS Start-End: 212-1930
agttgcccgcctgccccggagagccaggcgctaaccagccgctctgcgccccgcgccctgcttgcccccattatccagccttgccccggcgccctgacctgacgccctggcctgacgccctgcttcgtcgcctcctttctctcccaggtgctggaccagggactgagcgtcccccggagagggtccggtgtgaccccgacaagaagcagaaatggggaagaaactggatctttccaagctcactgatgaagaggcccagcatgtcttggaagttgttcaacgagattttgacctccgaaggaaagaagaggaacggctagaggcgttgaagggcaagattaagaaggaaagctccaagagggagctgctttccgacactgcccatctgaacgagacccactgcgcccgctgcctgcagccctaccagctgcttgtgaatagcaaaaggcagtgcctggaatgtggcctcttcacctgcaaaagctgtggccgcgtccacccggaggagcagggctggatctgtgacccctgccatctggccagagtcgtgaagatcggctcactggagtggtactatgagcatgtgaaagcccgcttcaagaggttcggaagtgccaaggtcatccggtccctccacgggcggctgcagggtggagctgggcctgaactgatatctgaagagagaagtggagacagcgaccagacagatgaggatggagaacctggctcagaggcccaggcccaggcccagccctttggcagcaaaaaaaagcgcctcctctccgtccacgacttcgacttcgagggagactcagatgactccactcagcctcaaggtcactccctgcacctgtcctcagtccctgaggccagggacagcccacagtccctcacagatgagtcctgctcagagaaggcagcccctcacaaggctgagggcctggaggaggctgatactggggcctctgggtgccactcccatccggaagagcagccgaccagcatctcaccttccagacacggcgccctggctgagctctgcccgcctggaggctcccacaggatggccctggggactgctgctgcactcgggtcgaatgtcatcaggaatgagcagctgcccctgcagtacttggccgatgtggacacctctgatgaggaaagcatccgggctcacgtgatggcctcccaccattccaagcggagaggccgggcgtcttctgagagtcagggtctaggtgctggagtgcgcacggaggccgatgtagaggaggaggccctgaggaggaagctggaggagctgaccagcaacgtcagtgaccaggagacctcgtccgaggaggaggaagccaaggacgaaaaggcagagcccaacagggacaaatcagttgggcctctcccccaggcggacccggaggtgggcacggctgcccatcaaaccaacagacaggaaaaaagcccccaggaccctggggaccccgtccagtacaacaggaccacagatgaggagctgtcagagctggaggacagagtggcagtgacggcctcagaagtccagcaggcagagagcgaggtttcagacattgaatccaggattgcagccctgagggccgcagggctcacggtgaagccctcgggaaagccccggaggaagtcaaacctcccgatatttctccctcgagtggctgggaaacttggcaagagaccagaggacccaaatgcagacccttcaagtgaggccaaggcaatggctgtgccctatcttctgagaagaaagttcagtaattccctgaaaagtcaaggtaaagatgatgattcttttgatcggaaatcagtgtaccgaggctcgctgacacagagaaaccccaacgcgaggaaaggaatggccagccacaccttcgcgaaacctgtggtggcccaccagtcctaacgggacaggacagagagacagagcagccctgcactgttttccctccaccacagccatcctgtccctcattggctctgtgctttccactatacacagtcaccgtcccaatgagaaacaagaaggagcaccctccacatggactcccacctgcaagtggacagcgacattcagtcctgcactgctcacctgggtttactgatgactcctggctgccccaccatcctctctgatctgtgagaaacagctaagctgctgtgacttccctttaggacaatgttgtgtaaatctttgaaggacacaccgaagacctttatactgtgatcttttacccctttcactcttggctttcttatgttgctttcatgaatggaatggaaaaaagatgactcagttaaggcacca

SEQ ID NO: 152627 - DNA, 2171 bp, Homo sapiens
  Payload ID: 10035
  Gene Symbol: MLPH
  Gene Name: melanophilin
  Uniprot ID: Q9BV36
  ENST ID: ENST00000410032
  CDS Start-End: 394-1767
attggaattcggaaggacaggcaggccgggcggactggagacggcggctcgccttgggaccctctgagcttgcgggccccgctgagcacccaaaggccggccctagagtccaggagaagagcgcagcggcgcggagctcccaggcgttccccgcagcgcgtcctcggtcctggaaccaccgcgccgcgcgtcctggcttccacatctgccccatttgcccgcggatcttgactttttcttggcgggcaaggcctcggtctcctccccgcagcagggctgcccgcggctgcgggaccctcctggtcctgatgcctggcagaatcgaaggggtgctggaccagggactgagcgtcccccggagagggtccggtgtgaccccgacaagaagcagaaatggggaagaaactggatctttccaagctcactgatgaagaggcccagcatgtcttggaagttgttcaacgagattttgacctccgaaggaaagaagaggaacggctagaggcgttgaagggcaagattaagaaggaaagctccaagagggagctgctttccgacactgcccatctgaacgagacccactgcgcccgctgcctgcagccctaccagctgcttgtgaatagcaaaaggcagtgcctggaatgtggcctcttcacctgcaaaagctgtggccgcgtccacccggaggagcagggctggatctgtgacccctgccatctggccagagtcgtgaagatcggctcactggagtggtactatgagcatgtgaaagcccgcttcaagaggttcggaagtgccaaggtcatccggtccctccacgggcggctgcagggtggagctgggcctgaactgatatctgaagagagaagtggagacagcgaccagacagatgaggatggagaacctggctcagaggcccaggcccaggcccagccctttggcagcaaaaaaaagcgcctcctctccgtccacgacttcgacttcgagggagactcagatgactccactcagcctcaaggtcactccctgcacctgtcctcagtccctgaggccagggacagcccacagggtctaggtgctggagtgcgcacggaggccgatgtagaggaggaggccctgaggaggaagctggaggagctgaccagcaacgtcagtgaccaggagacctcgtccgaggaggaggaagccaaggacgaaaaggcagagcccaacagggacaaatcagttgggcctctcccccaggcggacccggaggtgggcacggctgcccatcaaaccaacagacaggaaaaaagcccccaggaccctggggaccccgtccagtacaacaggaccacagatgaggagctgtcagagctggaggacagagtggcagtgacggcctcagaagtccagcaggcagagagcgaggtttcagacattgaatccaggattgcagccctgagggccgcagggctcacggtgaagccctcgggaaagccccggaggaagtcaaacctcccgatatttctccctcgagtggctgggaaacttggcaagagaccagaggacccaaatgcagacccttcaagtgaggccaaggcaatggctgtgccctatcttctgagaagaaagttcagtaattccctgaaaagtcaaggtaaagatgatgattcttttgatcggaaatcagtgtaccgaggctcgctgacacagagaaaccccaacgcgaggaaaggaatggccagccacaccttcgcgaaacctgtggtggcccaccagtcctaacgggacaggacagagagacagagcagccctgcactgttttccctccaccacagccatcctgtccctcattggctctgtgctttccactatacacagtcaccgtcccaatgagaaacaagaaggagcaccctccacatggactcccacctgcaagtggacagcgacattcagtcctgcactgctcacctgggtttactgatgactcctggctgccccaccatcctctctgatctgtgagaaacagctaagctgctgtgacttccctttaggacaatgttgtgtaaatctttgaaggacacaccgaagacctttatactgtgatcttttacccctttcactcttggctttcttatgttgctttcatgaatggaatggaaaaaagatgactcagttaaggcaccagc

SEQ ID NO: 152628 - DNA, 2031 bp, Homo sapiens
  Payload ID: 10035
  Gene Symbol: MLPH
  Gene Name: melanophilin
  Uniprot ID: Q9BV36
  ENST ID: ENST00000409373
  CDS Start-End: 187-1629
aggcgctaaccagccgctctgcgccccgcgccctgcttgcccccattatccagccttgccccggcgccctgacctgacgccctggcctgacgccctgcttcgtcgcctcctttctctcccaggtgctggaccagggactgagcgtcccccggagagggtccggtgtgaccccgacaagaagcagaaatggggaagaaactggatctttccaagctcactgatgaagaggcccagcatgtcttggaagttgttcaacgagattttgacctccgaaggaaagaagaggaacggctagaggcgttgaagggcaagattaagaaggaaagctccaagagggagctgctttccgacactgcccatctgaacgagacccactgcgcccgctgcctgcagccctaccagctgcttgtgaatagcaaaaggcagtgcctggaatgtggcctcttcacctgcaaaagctgtggccgcgtccacccggaggagcagggctggatctgtgacccctgccatctggccagagtcgtgaagatcggctcactggagtggtactatgagcatgtgaaagcccgcttcaagaggttcggaagtgccaaggtcatccggtccctccacgggcggctgcagggtggagctgggcctgaactgatatctgaagagagaagtggagacagcgaccagacagatgaggatggagaacctggctcagaggcccaggcccaggcccagccctttggcagcaaatccctcacagatgagtcctgctcagagaaggcagcccctcacaaggctgagggcctggaggaggctgatactggggcctctgggtgccactcccatccggaagagcagccgaccagcatctcaccttccagacacggcgccctggctgagctctgcccgcctggaggctcccacaggatggccctggggactgctgctgcactcgggtcgaatgtcatcaggaatgagcagctgcccctgcagtacttggccgatgtggacacctctgatgaggaaagcatccgggctcacgtgatggcctcccaccattccaagcggagaggccgggcgtcttctgagagtcagggtctaggtgctggagtgcgcacggaggccgatgtagaggaggaggccctgaggaggaagctggaggagctgaccagcaacgtcagtgaccaggagacctcgtccgaggaggaggaagccaaggacgaaaaggcagagcccaacagggacaaatcagttgggcctctcccccaggcggacccggaggtttcagacattgaatccaggattgcagccctgagggccgcagggctcacggtgaagccctcgggaaagccccggaggaagtcaaacctcccgatatttctccctcgagtggctgggaaacttggcaagagaccagaggacccaaatgcagacccttcaagtgaggccaaggcaatggctgtgccctatcttctgagaagaaagttcagtaattccctgaaaagtcaaggtaaagatgatgattcttttgatcggaaatcagtgtaccgaggctcgctgacacagagaaaccccaacgcgaggaaaggaatggccagccacaccttcgcgaaacctgtggtggcccaccagtcctaacgggacaggacagagagacagagcagccctgcactgttttccctccaccacagccatcctgtccctcattggctctgtgctttccactatacacagtcaccgtcccaatgagaaacaagaaggagcaccctccacatggactcccacctgcaagtggacagcgacattcagtcctgcactgctcacctgggtttactgatgactcctggctgccccaccatcctctctgatctgtgagaaacagctaagctgctgtgacttccctttaggacaatgttgtgtaaatctttgaaggacacaccgaagacctttatactgtgatcttttacccctttcactcttggctttcttatgttgctttcatgaatggaatggaaaaaagatgactcagttaaggcacca

SEQ ID NO: 152629 - DNA, 863 bp, Homo sapiens
  Payload ID: 10035
  Gene Symbol: MLPH
  Gene Name: melanophilin
  ENST ID: ENST00000432475
  CDS Start-End: 1-598
gtccgaggaggaggaagccaaggacgaaaaggcagagcccaacagggacaaatcagttgggcctctcccccaggcggacccggaggtgggcacggctgcccatcaaaccaacagacaggaaaaaagcccccaggaccctggggaccccgtccagtacaacaggaccacagatgaggagctgtcagagctggaggacagagtggcagtgacggcctcagaagtccagcaggcagagagcgaggtttcagacattgaatccaggattgcagccctgagggccgcagggctcacggtgaagccctcgggaaagccccggaggaagtcaaacctcccgatatttctccctcgagtggctgggaaacttggcaagagaccagaggacccaaatgcagacccttcaagtgaggccaaggcaatggctgtgccctatcttctgagaagaaagttcagtaattccctgaaaagtcaaggtaaagatgatgattcttttgatcggaaatcagtgtaccgaggctcgctgacacagagaaaccccaacgcgaggaaaggaatggccagccacaccttcgcgatgaaggagtggccccaaccaatgtgatcagtcgcaggaggcaaccaatcagaggctgaagggaagttacaaagttacacatgaagacttggccgatgaccagtctggttggttgcgggaggggaccaatccgagaaacctgtggtggcccaccagtcctaacgggacaggacagagagacagagcagccctgcactgttttccctccaccacagccatcctgtccctcattggctctgtgctttccactatacacagtcaccgtcccaatgagaaacaagaaggagcaccc

SEQ ID NO: 152630 - DNA, 726 bp, Homo sapiens
  Payload ID: 10035
  Gene Symbol: MLPH
  Gene Name: melanophilin
  ENST ID: ENST00000434770
  CDS Start-End: 1-438
gtccagtacaacaggaccacagatgaggagctgtcagagctggaggacagagtggcagtgacggcctcagaagtccagcaggcagagagcgaggtttcagacattgaatccaggattgcagccctgagggccgcagggctcacggtgaagccctcgggaaagccccggaggaagtcaaacctcccgatatttctccctcgagtggctgggaaacttggcaagagaccagaggacccaaatgcagacccttcaagtgaggccaaggcaatggctgtgccctatcttctgagaagaaagttcagtaattccctgaaaagtcaaggtaaagatgatgattcttttgatcggaaatcagtgtaccgaggctcgctgacacagagaaaccccaacgcgaggaaaggaatggccagccacaccttcgcgtcaccgtcccaatgagaaacaagaaggagcaccctccacatggactcccacctgcaagtggacagcgacattcagtcctgcactgctcacctgggtttactgatgactcctggctgccccaccatcctctctgatctgtgagaaacagctaagctgctgtgacttccctttaggacaatgttgtgtaaatctttgaaggacacaccgaagacctttatactgtgatcttttacccctttcactcttggctttcttatgttgctttcatgaatggaatggaaaaaagatgactcagttaaggca

SEQ ID NO: 152631 - DNA, 565 bp, Homo sapiens
  Payload ID: 10035
  Gene Symbol: MLPH
  Gene Name: melanophilin
  ENST ID: ENST00000429898
  CDS Start-End: 355-565
cattggaattcggaaggacaggcaggccgggcggactggagacggcggctcgccttgggaccctctgagcttgcgggccccgctgagcacccaaaggccggccctagagtccaggagaagagcgcagcggcgcggagctcccaggcgttccccgcagcgcgtcctcggtcctggaaccaccgcgccgcgcgtcctggcttccacatctgccccatttgcccgcggatcttgactttttcttggcgggcaaggcctcggtctcctccccgcagcagggctgcccgcggctgcgggaccctcctggtcctgatgcctggcagaatcgaaggggtgtgaccccgacaagaagcagaaatggggaagaaactggatctttccaagctcactgatgaagaggcccagcatgtcttggaagttgttcaacgagattttgacctccgaaggaaagaagaggaacggctagaggcgttgaagggcaagattaagaaggaaagctccaagagggagctgctttccgacactgcccatctgaacgagacccactgcgcccgctgcctgcagccct

SEQ ID NO: 152632 - DNA, 610 bp, Homo sapiens
  Payload ID: 10035
  Gene Symbol: MLPH
  Gene Name: melanophilin
  ENST ID: ENST00000436965
  CDS Start-End: 1-610
ccagacacggcgccctggctgagctctgcccgcctggaggctcccacaggatggccctggggactgctgctgcactcgctttcaggttttcactgcaagtaattcaaacccactctcgctctgaagggtcgaatgtcatcaggaatgagcagctgcccctgcagtacttggccgatgtggacacctctgatgaggaaagcatccgggctcacgtgatggcctcccaccattccaagcggagaggccgggcgtcttctgagagtcagggtctaggtgctggagtgcgcacggaggccgatgtagaggaggaggccctgaggaggaagctggaggagctgaccagcaacgtcagtgaccaggagacctcgtccgaggaggaggaagccaaggacgaaaaggcagagcccaacagggacaaatcagttgggcctctcccccaggcggacccggaggtgggcacggctgcccatcaaaccaacagacaggaaaaaagcccccaggaccctggggaccccgtccagtacaacaggaccacagatgaggagctgtcagagctggaggacagagtggcagtgacggcctcagaagtccagcaggcagagagcgaggt

SEQ ID NO: 152633 - DNA, 744 bp, Homo sapiens
  Payload ID: 10035
  Gene Symbol: MLPH
  Gene Name: melanophilin
  ENST ID: ENST00000422695
  CDS Start-End: 351-744
attgattcacaacacccttatgtgtaactcccattactattctcatcatggagaagagagaaaaaagtcagtagaagattcagtaacaggtccaagatgacacagcttgtgggccacactcctagttggaattccgactcttgcagttggtttgagcccacatgcttaacctcacacacacacacaccattcagaaagaatatagaagacaccattaataatgattgctttctggtcatggagataggaaaactgaattgcaaaagcggttcctggagaacagaatgtgctggaccagggactgagcgtcccccggagagggtccggtgtgaccccgacaagaagcagaaatggggaagaaactggatctttccaagctcactgatgaagaggcccagcatgtcttggaagttgttcaacgagattttgacctccgaaggaaagaagaggaacggctagaggcgttgaagggcaagattaagaaggaaagctccaagagggagctgctttccgacactgcccatctgaacgagacccactgcgcccgctgcctgcagccctaccagctgcttgtgaatagcaaaaggcagtgcctggaatgtggcctcttcacctgcaaaagctgtggccgcgtccacccggaggagcagggctggatctgtgacccctgccatctggccagagtcgtgaagatcggctcactggagtggtactatgagcatgtgaaagcccgcttcaagaggt

SEQ ID NO: 152634 - DNA, 841 bp, Homo sapiens
  Payload ID: 10035
  Gene Symbol: MLPH
  Gene Name: melanophilin
  ENST ID: ENST00000415753
  CDS Start-End: 1-709
ctctgatgaggaaagcatccgggctcacgtgatggcctcccaccattccaagcggagaggccgggcgtcttctgagagtcagatctttgagctgaataagcatatttcagctgtggaatgcctgctgacctacctggagaacacagttgtgcctcccttggccaagggtctaggtgctggagtgcgcacggaggccgatgtagaggaggaggccctgaggaggaagctggaggagctgaccagcaacgtcagtgaccaggagacctcgtccgaggaggaggaagccaaggacgaaaaggcagagcccaacagggacaaatcagttgggcctctcccccaggcggacccggaggtttcagacattgaatccaggattgcagccctgagggccgcagggctcacggtgaagccctcgggaaagccccggaggaagtcaaacctcccgatatttctccctcgagtggctgggaaacttggcaagagaccagaggacccaaatgcagacccttcaagtgaggccaaggcaatggctgtgccctatcttctgagaagaaagttcagtaattccctgaaaagtcaaggtaaagatgatgattcttttgatcggaaatcagtgtaccgaggctcgctgacacagagaaaccccaacgcgaggaaaggaatggccagccacaccttcgcgaaacctgtggtggcccaccagtcctaacgggacaggacagagagacagagcagccctgcactgttttccctccaccacagccatcctgtccctcattggctctgtgctttccactatacacagtcaccgtcccaatgagaaacaagaaggagcaccctc

SEQ ID NO: 152635 - DNA, 1447 bp, Homo sapiens
  Payload ID: 10035
  Gene Symbol: MLPH
  Gene Name: melanophilin
  ENST ID: ENST00000437893
  CDS Start-End: 1-1083
acttcgacttcgagggagactcagatgactccactcagcctcaaggtcactccctgcacctgtcctcagtccctgaggccagggacagcccacagtccctcacagatgagtcctgctcagagaaggcagcccctcacaaggctgagggcctggaggaggctgatactggggcctctgggtgccactcccatccggaagagcagccgaccagcatctcaccttccagacacggcgccctggctgagctctgcccgcctggaggctcccacaggatggccctggggactgctgctgcactcgatctttgagctgaataagcatatttcagctgtggaatgcctgctgacctacctggagaacacagttgtgcctcccttggccaagggtctaggtgctggagtgcgcacggaggccgatgtagaggaggaggccctgaggaggaagctggaggagctgaccagcaacgtcagtgaccaggagacctcgtccgaggaggaggaagccaaggacgaaaaggcagagcccaacagggacaaatcagttgggcctctcccccaggcggacccggaggtgggcacggctgcccatcaaaccaacagacaggaaaaaagcccccaggaccctggggaccccgtccagtacaacaggaccacagatgaggagctgtcagagctggaggacagagtggcagtgacggcctcagaagtccagcaggcagagagcgaggtttcagacattgaatccaggattgcagccctgagggccgcagggctcacggtgaagccctcgggaaagccccggaggaagtcaaacctcccgatatttctccctcgagtggctgggaaacttggcaagagaccagaggacccaaatgcagacccttcaagtgaggccaaggcaatggctgtgccctatcttctgagaagaaagttcagtaattccctgaaaagtcaaggtaaagatgatgattcttttgatcggaaatcagtgtaccgaggctcgctgacacagagaaaccccaacgcgaggaaaggaatggccagccacaccttcgcgaaacctgtggtggcccaccagtcctaacgggacaggacagagagacagagcagccctgcactgttttccctccaccacagccatcctgtccctcattggctctgtgctttccactatacacagtcaccgtcccaatgagaaacaagaaggagcaccctccacatggactcccacctgcaagtggacagcgacattcagtcctgcactgctcacctgggtttactgatgactcctggctgccccaccatcctctctgatctgtgagaaacagctaagctgctgtgacttccctttaggacaatgttgtgtaaatctttgaaggacacaccgaagacctttatactgtgatcttttacccctttcactcttggctttcttatgttgctttcat

SEQ ID NO: 152636 - DNA, 1314 bp, Homo sapiens
  Payload ID: 10036
  Gene Symbol: MREG
  Gene Name: melanoregulin
  Uniprot ID: Q8N565
  ENST ID: ENST00000263268
  CDS Start-End: 297-941
cggggcgtctcgtggacgcatgcgccccaaattgcgctcggggaattaaaagaggggaaaaaaagcccgaagaaaactcacgccccaaacaaaacgcaaggagaggagggcgcgcggcctgcagccctcgcccgcgtccccggccgcggcgtgatgcgcgcggaccagcccgcgacgcccgggctgccgctgtccccgcacctggacgctggcgcggtggccgcgccccagcctcgatcgctcgccgcggcgactcggccccaggcttccggcgccggtgggggccctcgctctccatggggctgagggactggctgagaaccgtgtgctgctgctgcgggtgcgagtgcttggaggagcgcgccctgcctgagaaggagcccctcgtcagtgataacaatccatattcctcatttggagcaactctggtgagggatgatgagaagaatttatggagtatgccccatgatgtgtcccacacagaggcagacgacgacagaaccctgtacaatttgatagtcattcgtaatcagcaggccaaagactcagaggagtggcagaagctcaactatgatatccataccctgcggcaggttcgaagggaagtaagaaacagatggaagtgcatcttagaagatttaggttttcaaaaggaagctgactctttgttgtcagtgactaaactcagcaccatcagtgattctaaaaacacaaggaaagctcgagagatgttgttaaaactggctgaagaaaccaatattttcccaacaagttgggagctctcagagagatatctctttgttgtggaccgtctcattgcacttgatgctgcagaagagttctttaagcttgctcgtcgaacttaccccaagaagcctggggttccatgcctggcagatggccagaaagaactgcactaccttccgtttccaagtccctaaaggagaggctcaggggcagaatgggaattcttccatgaggactcagcagtcaaccaaagttggacaattacatgtagaagagagtgagcaaatagagtttgcttagtgaaaaatgatactgaattctacataaatgtaaagtctttaatctgaggaccctgccccatgaattgtgcaggctgcattgaaacgccttggtgatctcatatttaggaagaaagttaaagagttggtcagatggatagttcataatgggtggttccattctgagagcccattgccccagctttggttttagttgtgtcataatctctgatcattaatcctactgactgagtggactatttcagttaataaaacaatatgattaata

SEQ ID NO: 152637 - DNA, 584 bp, Homo sapiens
  Payload ID: 10036
  Gene Symbol: MREG
  Gene Name: melanoregulin
  ENST ID: ENST00000420348
  CDS Start-End: 239-584
agtgccttcttaggattcaagacctggttgcaaagcttcaacttgagctttagttttttgctttggtatttcttctgcactccttgtttacaaggatttcatttcagcaaagaaggcatctattgaaataagaccaaccagcaggaagattctaaaccgtattcaagaaagtgataacaatccatattcctcatttggagcaactctggtgagggatgatgagaagaatttatggagtatgccccatgatgtgtcccacacagaggcagacgacgacagaaccctgtacaatttgatagtcattcgtaatcagcaggccaaagactcagaggagtggcagaagctcaactatgatatccataccctgcggcaggttcgaagggaagtaagaaacagatggaagtgcatcttagaagatttaggttttcaaaaggaagctgactctttgttgtcagtgactaaactcagcaccatcagtgattctaaaaacacaaggaaagctcgagagatgttgttaaaactggctgaagaaaccaatattttcccaacaagttgggagctctcagagagatatctctttgttg

SEQ ID NO: 152638 - DNA, 576 bp, Homo sapiens
  Payload ID: 10036
  Gene Symbol: MREG
  Gene Name: melanoregulin
  ENST ID: ENST00000439791
  CDS Start-End: 190-576
agtctagtgagaggcagtcctgcgttctgcctggtgggagtcagagtcttaagatttgccaagtcctgatgccatcagcattcacattgccttacagaggtctcctccccactccaagatagtgataacaatccatattcctcatttggagcaactctggtgagggatgatgagaagaatttatggagtatgccccatgatgtgtcccacacagaggcagacgacgacagaaccctgtacaatttgatagtcattcgtaatcagcaggccaaagactcagaggagtggcagaagctcaactatgatatccataccctgcggcaggttcgaagggaagtaagaaacagatggaagtgcatcttagaagatttaggttttcaaaaggaagctgactctttgttgtcagtgactaaactcagcaccatcagtgattctaaaaacacaaggaaagctcgagagatgttgttaaaactggctgaagaaaccaatattttcccaacaagttgggagctctcagagagatatctctttgttgtggaccgtctcattgcacttgatgctgcagaagagttcttt

SEQ ID NO: 152639 - DNA, 560 bp, Homo sapiens
  Payload ID: 10036
  Gene Symbol: MREG
  Gene Name: melanoregulin
  ENST ID: ENST00000424992
  CDS Start-End: 203-560
ttcaacttgagctttagtttcttcctttggtatttcttctgcactccttgtttacaaggatttcatttcagcaaaggagccatctattgaaataagatcaaccagcgggaagattctaaaccatattcaggaaagtgataacaatccatattcctcatttggagcaactctggtgagggatgatgagaagaatttatggagtatgccccatgatgtgtcccacacagaggcagacgacgacagaaccctgtacaatttgatagtcattcgtaatcagcaggccaaagactcagaggagtggcagaagctcaactatgatatccataccctgcggcaggttcgaagggaagtaagaaacagatggaagtgcatcttagaagatttaggttttcaaaaggaagctgactctttgttgtcagtgactaaactcagcaccatcagtgattctaaaaacacaaggaaagctcgagagatgttgttaaaactggctgaagaaaccaatattttcccaacaagttgggagctctcagagagatatctctttgttgtggaccgtctca

SEQ ID NO: 152640 - DNA, 2618 bp, Homo sapiens
  Payload ID: 10036
  Gene Symbol: MREG
  Gene Name: melanoregulin
  Uniprot ID: Q8N565
  ENST ID: ENST00000620139
  CDS Start-End: 287-931
cgtggacgcatgcgccccaaattgcgctcggggaattaaaagaggggaaaaaaagcccgaagaaaactcacgccccaaacaaaacgcaaggagaggagggcgcgcggcctgcagccctcgcccgcgtccccggccgcggcgtgatgcgcgcggaccagcccgcgacgcccgggctgccgctgtccccgcacctggacgctggcgcggtggccgcgccccagcctcgatcgctcgccgcggcgactcggccccaggcttccggcgccggtgggggccctcgctctccatggggctgagggactggctgagaaccgtgtgctgctgctgcgggtgcgagtgcttggaggagcgcgccctgcctgagaaggagcccctcgtcagtgataacaatccatattcctcatttggagcaactctggtgagggatgatgagaagaatttatggagtatgccccatgatgtgtcccacacagaggcagacgacgacagaaccctgtacaatttgatagtcattcgtaatcagcaggccaaagactcagaggagtggcagaagctcaactatgatatccataccctgcggcaggttcgaagggaagtaagaaacagatggaagtgcatcttagaagatttaggttttcaaaaggaagctgactctttgttgtcagtgactaaactcagcaccatcagtgattctaaaaacacaaggaaagctcgagagatgttgttaaaactggctgaagaaaccaatattttcccaacaagttgggagctctcagagagatatctctttgttgtggaccgtctcattgcacttgatgctgcagaagagttctttaagcttgctcgtcgaacttaccccaagaagcctggggttccatgcctggcagatggccagaaagaactgcactaccttccgtttccaagtccctaaaggagaggctcaggggcagaatgggaattcttccatgaggactcagcagtcaaccaaagttggacaattacatgtagaagagagtgagcaaatagagtttgcttagtgaaaaatgatactgaattctacataaatgtaaagtctttaatctgaggaccctgccccatgaattgtgcaggctgcattgaaacgccttggtgatctcatatttaggaagaaagttaaagagttggtcagatggatagttcataatgggtggttccattctgagagcccattgccccagctttggttttagttgtgtcataatctctgatcattaatcctactgactgagtggactatttcagttaataaaacaatatgattaatagagagagctgtcattgagtcccaaaatggattgccagttttaaaataattattataaaatgtatgctaaccccaaaataatactaggcatgaggtgacctctctgatttggtcaccttgtagaaccttggagggtgtcagggcatctctttgagtatcagttatgattattcagaagtatagatgtatcaaatgatagaaatgacaaggaatggctgggcgtggtggctcatgcctgtaatcccagcactttgggaggccaaggtgggtggatcatgaggtcaggagttcaagaccagcctgaccaacatggtgaaaccctgtctctactaaaaatacaaaaattagccaggtgtgatggcacgcgcttgtaatcccagcctctggagtagctggaactacaggcgcgtgccaccacacctggctaattttttgtatttttagtagagacggggtttcaccatgttagccacgatggtctcgatctcctgacctcgtcatccgcctgccccagcctcccaaagtgctgggattacaggcgtgagtcaccgcgcccggccaagcccttggcattttatctggaatagcatctgtaaactgaagtgtttgacctctgttttcttctctcctctttcatctgtttctgattcgttggctggcagctgcacctgtggggggacctctcatgcagacttgcacatatgcagggagtattgcactgaagatctttgctggaccttcttctcttcagaagataattttcaaaagggagcaatgctgtgaatgcagcttgcttctctctacagattgagaagtccagcttcaaaagttacttgccacttaagcaaggaacttgtcaagagatcatggttcatgttactgaaaagactttaaggatttgtaaggttaatccatagattgctgagaaaaatggaaatatttttatttttacagattttgcacttctgaattcaggttaaaaactaacttgtatttagtctgcttagaggactgtgacttgaaaatttttatataccaatgagctttttggtagcgtccacaatgtttaaaatatttcataggcgagatccgtgttctccatttattaatgcattgtagaccaatttaactgctgtgtttcaggaaaattcttcctagtttaataagcaagctaaaagttttattttttatatttagtgcttaatctttgcctcatgttatgtaaaattagcctgcagatattttctctcaattctgtagactctcgcaagataaacattcaaacagtgaaacaaacaataaaataaataaacct

SEQ ID NO: 152641 - DNA, 1289 bp, Homo sapiens
  Payload ID: 10037
  Gene Symbol: MTNR1A
  Gene Name: melatonin receptor 1A
  Uniprot ID: P48039
  ENST ID: ENST00000307161
  CDS Start-End: 203-1255
gggaatccaagcgggctcgcggcggacaccaggtgtcacctggccgtggcgtccggcgcggcgtgggcgtccgggggcgcggcgtggaggagcgcgcgggatggggcgtgggcgcggggagcgccgggcggagccttaacaagtggtcgggcgggcggacgaggcgggcgatggccccgcggccgggacgcgcacagggaccatgcagggcaacggcagcgcgctgcccaacgcctcccagcccgtgctccgcggggacggcgcgcggccctcgtggctggcgtccgccctggcctgcgtcctcatcttcaccatcgtggtggacatcctgggcaacctcctggtcatcctgtcggtgtatcggaacaagaagctcaggaacgcaggaaacatctttgtggtgagcttagcggtggcagacctggtggtggccatttatccgtacccgttggtgctgatgtcgatatttaacaacgggtggaacctgggctatctgcactgccaagtcagtgggttcctgatgggcctgagcgtcatcggctccatattcaacatcaccggcatcgccatcaaccgctactgctacatctgccacagtctcaagtacgacaaactgtacagcagcaagaactccctctgctacgtgctcctcatatggctcctgacgctggcggccgtcctgcccaacctccgtgcagggactctccagtacgacccgaggatctactcgtgcaccttcgcccagtccgtcagctccgcctacaccatcgccgtggtggttttccacttcctcgtccccatgatcatagtcatcttctgttacctgagaatatggatcctggttctccaggtcagacagagggtgaaacctgaccgcaaacccaaactgaaaccacaggacttcaggaattttgtcaccatgtttgtggtttttgtcctttttgccatttgctgggctcctctgaacttcattggcctggccgtggcctctgaccccgccagcatggtgcctaggatcccagagtggctgtttgtggccagttactacatggcgtatttcaacagctgcctcaatgccattatatacgggctactgaaccaaaatttcaggaaggaatacaggagaattatagtctcgctctgtacagccagggtgttctttgtggacagctctaacgacgtggccgatagggttaaatggaaaccgtctccactgatgaccaacaataatgtagtaaaggtggactccgtttaaaaaagcaccacgttccgggtgagatggacacgct

SEQ ID NO: 152642 - DNA, 1565 bp, Homo sapiens
  Payload ID: 10038
  Gene Symbol: MTNR1B
  Gene Name: melatonin receptor 1B
  Uniprot ID: P49286
  ENST ID: ENST00000257068
  CDS Start-End: 7-1095
tctgcgatgtcagagaacggctccttcgccaactgctgcgaggcgggcgggtgggcagtgcgcccgggctggtcgggggctggcagcgcgcggccctccaggacccctcgacctccctgggtggctccagcgctgtccgcggtgctcatcgtcaccaccgccgtggacgtcgtgggcaacctcctggtgatcctctccgtgctcaggaaccgcaagctccggaacgcaggtaatttgttcttggtgagtctggcattggctgacctggtggtggccttctacccctacccgctaatcctcgtggccatcttctatgacggctgggccctgggggaggagcactgcaaggccagcgcctttgtgatgggcctgagcgtcatcggctctgtcttcaatatcactgccatcgccattaaccgctactgctacatctgccacagcatggcctaccaccgaatctaccggcgctggcacacccctctgcacatctgcctcatctggctcctcaccgtggtggccttgctgcccaacttctttgtggggtccctggagtacgacccacgcatctattcctgcaccttcatccagaccgccagcacccagtacacggcggcagtggtggtcatccacttcctcctccctatcgctgtcgtgtccttctgctacctgcgcatctgggtgctggtgcttcaggcccgcaggaaagccaagccagagagcaggctgtgcctgaagcccagcgacttgcggagctttctaaccatgtttgtggtgtttgtgatctttgccatctgctgggctccacttaactgcatcggcctcgctgtggccatcaacccccaagaaatggctccccagatccctgaggggctatttgtcactagctacttactggcttatttcaacagctgcctgaatgccattgtctatgggctcttgaaccaaaacttccgcagggaatacaagaggatcctcttggccctttggaacccacggcactgcattcaagatgcttccaagggcagccacgcggaggggctgcagagcccagctccacccatcattggtgtgcagcaccaggcagatgctctctagcctggatctgaggcacaccagcagcatgacaaactcatgaaatggtgggagagagtctgctgcaagggtgagaccaggcagcctgctgggccacactgtcctgttggcatcacagccccaaggctgggggaacttcatgctgggacaagcagcccatcaacgccatgggttcaggctgatccaggagatgctcacaggccacaggacctggaaaacactcttggtggtgtcttggggatttggtgcacacaagaccaaggaaaggacagaatgaggaaaggcctggggcagaagagcccaactccttctcatagctgaccctcatcctcctgccttggcctcctggctgctttctccccttccccccagcgtggcaggatctcttcctgttagcaaggatgaaagagagaggtcagtaggactggaacttggtaactgcaagggcctcaggtggggcaggtgcagagggc

SEQ ID NO: 152643 - DNA, 425 bp, Homo sapiens
  Payload ID: 10038
  Gene Symbol: MTNR1B
  Gene Name: melatonin receptor 1B
  ENST ID: ENST00000528076
  CDS Start-End: 1-340
cgggctggtcgggggctggcagcgcgcggccctccaggacccctcgacctccctgggtggctccagcgctgtccgcggtgctcatcgtcaccaccgccgtggacgtcgtgggcaacctcctggtgatcctctccgtgctcaggaaccgcaagctccggaacgcaggtttttggtgataaaccaggagctgagagaatcaaaaagaatggtaaagcccaggcccaggacatcaagcaatgtacatatttggaatgacctcatgctgtgggccctgattgtaaataaaaatgcttttgcggaaacagcaaaatttggggaagcctgtcttccacctccttgactgaaaagtctggtcagaggtgccacctggctacttcctcctcatccttctaggaccttcctctggacccctcagttctgagccc

SEQ ID NO: 152644 - DNA, 1220 bp, Homo sapiens
  Payload ID: 10038
  Gene Symbol: MTNR1B
  Gene Name: melatonin receptor 1B
  ENST ID: ENST00000532482
  CDS Start-End: 1-240
atgtcagagaacggctccttcgccaactgctgcgaggcgggcgggtgggcagtgcgcccgggctggtcgggggctggcagcgcgcggccctccaggacccctcgacctccctgggtggctccagcgctgtccgcggtgctcatcgtcaccaccgccgtggacgtcgtgggcaacctcctggtgatcctctccgtgctcaggaaccgcaagctccggaacgcagggatatcctatctgtagtgtctgttgctgcatgtggtgggttgacttcagagatagcaccagagaaaggcagacagggaggagtggaggcaaggtgggaggtagggtcagggcaccgacccaacttaaaaggtaatttgttcttggtgagtctggcattggctgacctggtggtggccttctacccctacccgctaatcctcgtggccatcttctatgacggctgggccctgggggaggagcactgcaaggccagcgcctttgtgatgggcctgagcgtcatcggctctgtcttcaatatcactgccatcgccattaaccgctactgctacatctgccacagcatggcctaccaccgaatctaccggcgctggcacacccctctgcacatctgcctcatctggctcctcaccgtggtggccttgctgcccaacttctttgtggggtccctggagtacgacccacgcatctattcctgcaccttcatccagaccgccagcacccagtacacggcggcagtggtggtcatccacttcctcctccctatcgctgtcgtgtccttctgctacctgcgcatctgggtgctggtgcttcaggcccgcaggaaagccaagccagagagcaggctgtgcctgaagcccagcgacttgcggagctttctaaccatgtttgtggtgtttgtgatctttgccatctgctgggctccacttaactgcatcggcctcgctgtggccatcaacccccaagaaatggctccccagatccctgaggggctatttgtcactagctacttactggcttatttcaacagctgcctgaatgccattgtctatgggctcttgaaccaaaacttccgcagggaatacaagaggatcctcttggccctttggaacccacggcactgcattcaagatgcttccaagggcagccacgcggaggggctgcagagcccagctccacccatcattggtgtgcagcaccaggcagatgctctctag

SEQ ID NO: 152645 - DNA, 7415 bp, Homo sapiens
  Payload ID: 10039
  Gene Symbol: MAGI1
  Gene Name: membrane associated guanylate kinase, WW and PDZ domain containing 1
  Uniprot ID: Q96QZ7
  ENST ID: ENST00000330909
  CDS Start-End: 1-3864
atgtccaaagtgatccagaagaagaaccactggactagcagggttcacgaatgcaccgtgaagcggggaccccagggcgagctgggggtgacggtgctgggaggcgcggagcacggggagtttccgtacgtcggagcggtggcggcggtcgaggcagcggggcttcccggcggcggcgagggcccgaggctgggcgaaggggagctgcttctggaggtgcagggggtccgggtgtccggcttgccccgctatgacgtgctgggggtcatcgacagctgcaaggaggccgtcaccttcaaggccgtcagacaaggaggaaggctgaacaaggacctgcgacattttctcaatcagcgattccagaaggggtctcctgatcatgagctccagcagaccataagggataacctttaccgccatgctgtgccttgcacaacccgatctcccagagaaggagaagtgcctggcgtggactataactttctgactgtgaaggagttcttggacctcgagcagagtgggactcttctggaagtcggcacctatgaaggaaactattatgggacacccaagcctcctagccagccagtcagtgggaaagtgatcacgacggatgccttgcacagccttcagtctggctctaagcagtcgaccccgaagcgaaccaagtcctacaatgatatgcaaaatgctggcatagtccacgcggagaatgaggaggaggatgacgttcctgaaatgaacagcagctttacagccgattctggtgaacaagaggagcacactctccaagaaacagcattaccacctgtgaatagtagcatcatcgctgctcccatcacggacccttctcagaagttccctcaatacctacctctttctgcagaggataatttaggtcctctacctgaaaactgggagatggcctatactgaaaatggagaagtctattttatagaccataacacgaaaacaacatcttggttagaccctcggtgcctaaacaagcagcagaagccactggaagagtgtgaagatgatgaaggggtacacaccgaggagctggacagtgaactagaactgcctgctggttgggaaaagattgaagaccctgtctatggtatctactatgtagaccacatcaacaggaagacacaatatgagaacccggttctagaagccaaacggaagaagcagcttgagcagcagcagcagcagcaacagcagcagcaacagcagcagcagcagcagcagcagcagcagacagaagaatggacagaagatcactcagcccttgtgcctcctgttattccaaaccaccctccaagcaatccagagccagccagagaagttccacttcagggcaaacccttttttacacgaaacccttctgagttgaaaggcaagttcattcacacaaagctgcggaaaagcagtcgtggctttggcttcacggtggttggaggggatgaacctgatgagtttctccagatcaagagcttggtcctagatggtcctgctgcattggatggcaagatggaaacaggggatgtgattgtaagtgtgaatgacacctgtgttttgggacacacacatgctcaagttgtgaagatcttccagtccatccccattggtgccagcgtggaccttgaactctgccgaggttatccattgccttttgatccagatgaccccaatacaagtttagtgacctcggtagccattttggataaagaaccaattattgtgaatgggcaagagacctatgattcaccagctagccacagtagtaaaacaggcaaagtcaatggcatgaaggatgccaggccaagcagcccagcggacgtggcttcaaatagttctcatggttatcctaatgacactgtttctttggcttcctccatagccactcagccagaactcataactgttcatattgtcaaagggccaatgggctttggttttactatcgcagacagtcctggtgggggtggccaaagagtgaaacagattgttgacagcccaaggtgccgaggcctgaaagaaggggatctcatagtggaagttaataagaagaacgtgcaggccctaactcacaaccaagtggtggatatgctggttgagtgtcctaagggaagtgaggtcacattgttggtgcaacgaggagggctgccagttcccaagaagagcccaaagtcgcaaccactggaaaggaaagacagccagaatagttctcagcacagtgtttccagccaccgaagcctgcacacagcatccccaagccacagcacacaggtgctccccgagttcccacctgcagaggcccaagctccagatcaaactgacagctctggccagaaaaaaccagatccttttaaaatctgggcccagtccaggagcatgtatgaaaaccgacctatgtcaccttcacctgcgtcgggattgagcaagggtgagagagagagagaaatcaattccacgaattttggagaatgtccgattccagattaccaggaacaggacatcttcctctggagaaaagagactggatttggatttaggattctgggtggaaatgaaccaggggaacctatttatattggtcacatcgtaccactgggtgctgctgatactgacggccgcctgaggtctggagatgaattaatctgtgtggatgggacgccagtaattggaaaatcacaccagcttgtggtccagcttatgcaacaagctgccaagcaaggccacgtcaatctcacggtgcggcgtaaagtggtttttgcggtgcccaaaaccgagaacgaggtgccctcgccagcctcctctcatcacagtagcaaccagccggcctcgctgacagaagagaagcgcactccgcagggcagccagaactcgctgaacacggtgagctcgggcagcggcagcaccagcggcatcggcagtggcggcggcgggggcagcggcgtggtcagcaccgtggtgcagccctacgacgtggagatccggcgcggggagaacgagggcttcggcttcgtcatcgtgtcctcggtgagcaggcccgaagcaggcacgacctttggcaatgcatgtgtggctatgcctcacaaaataggtcggattattgaggggagccctgctgaccgctgtggcaagctgaaagtaggagaccggatcttggcagtaaatggatgttccatcaccaacaaatcccattcagacattgtgaacctaatcaaggaagcgggaaacacagttaccctccgcatcattcctggggatgagtcctcgaatgccaccttgctgaccaatgcagagaagattgccaccatcaccaccacacacaccccttctcagcaagggacccaggagacaaggaataccaccaaaccaaagcaggaatctcaatttgagttcaaagcaccccaagcaacacaggagcaagatttttacactgtggaactggaaagaggagccaagggatttggctttagccttcgaggaggccgagagtataacatggacctctatgttctgcgcttagcagaggacggtcctgcggagaggtgtggaaagatgaggattggtgatgaaattttagagatcaatggtgagaccaccaaaaacatgaagcattctcgagctatagaactgattaagaatggtggccgcagagttcgtctgtttctgaagcggggagacggctcagtaccagaatatgcgatgatacctcctaatatcgctgcatgtatgagaaatgaaaagctcggggaggcttgcttctaccttatgggccataatcaaactacgaccccagcagcgaccgccacggccccgccaccggtccacaaggtgttccggaagtgagggccgggcccgaccgccggcagcatccgtcattggagtccagttacccacccgatcttcacaaatcatcaccacatggggaaaagcgggcacacgcaagggatccgaaaggcagcagagagtatagcagacaacccaatgaacaccacacctggaatgggacttcgaggaaacccgacagcggggcatgccgacccaaggaccgggcgccggagggacggagggacgcgcaggccgagcgcgcggcagccgccaacggccccaagaggcggtccccagagaagcggagggagggcacccgcagcgccgacaacactttggagaggagggagaagcacgagaagagacgagacgtctctccggagcggaggcgagagcggtcacccacccgcaggagagacggctcccccagccggcggagacggtctctggagagactcctggagcagaggaggtcccccgagcgcaggagagggggctcgcccgagcgcagggccaagtccaccgaccggaggcgcgcacgctcccccgagcgcaggagagagcggtccctggacaaaaggaacagagaggacagagccagccaccgagaaagggaagaggcgaatctgaaacaggatgccggcagaagttccagacatcccccggagcagagaaggcgaccttacaaagaatgtagcaccgacctcagtatctgagacgctgagtcacattccaacctttaccgtgtcaaaggttctaagaggaaagtcacaaacctgaaattatttagtttcttacctaatgaagcatctgacacctgatgatcctatgaataacaacaaacattttatgcatttgaaatcttataagaaaaaatatatatgaaaagtattgtgcctgatgtatcatattaaagaaagtatttttaaatgcatacttttttggaaattatttgccaaatgctggcccaaagggatataaattttgtttctacgtaacctgtagaatcgtcaagaattgttcccgttttggggcaatctttttctctcctggttaaatggggctgttgatcattttctctacgtaagggaatttattgattaagtttaattaatttgatatagactgtcatgtagtgatgtagtgctatactgtagtcggaagtttttcttaaaagcaaagagcaaaaatgcaaagttttatttgtaaaagctgaggacccttggggatggattaggtttgccgatgatcctaaaagtaagcaaactgtatgacaagactactattgcaaatgaaggatatttatagctaaactgcgcagcacaaagaagttttatattgtgagttatagttggttcagaaaacagtttgtactctccctggcccaggaaggcacacagacaaaaatgtcggccacttttactcaaatacagcccaagcacagacagtcaggttcgtgatcatcaccaacatctgataaaatctcattgaaggcaatgccatcacagctttgctcaattactacgaggaagagacaacaagcatctttcgtgttgtctcgtctgattggaggctgaatagtagatggaatggggggacagtgtgcctggtgtgaggaagacgtaagatccccaatttggaaagcatgcccccctcccttttagtagaagcccatggttgccctttgccaaactggggaggaggcaatgagccttggtggaaggaacctctctgttgatatttaaagaagtgagggctgtgggtattcattgttagaaatgccaatttcactttgaaaccatagtccaagtctctaggttggtagaagggaaaggaaggaagtggtcccagtgattctaggtctggttgggaaacttctgcctcatgactctgtcctttgagtcctttggacagcagcacaaaacataacaatttttatttttaaacagacccattctttttgatcccacaggagctgtggttgggtcggccgtagccccgggatgtggtttaagtggattactgcctagctgagccaaaatgtttgcttgtacctgttggaccactacagcaaaccgctgcttacagtgcattgtgtatttctgtagtactgttttgcattttccatagagacagaaaactttgcaagtcaatcactgttgttcccatggtactgtaagaaaaaaaaaaaggaaaaagaaaaaaaaaaagaaaaccagccaatcattgcgtgtacagagctaaaaattgtaattaatagagcctgttgggaaaaaaaagaaaacaactgttgcctttttttcttgtataaaagagaatttatgacaaaatttagctgtgaggaatgtgatacgtgtttatatttctgaatatggaacaaattgattcatggggatatattttaatgtaaactaaatcaggtatgtaaagttgttttaaaatgggagactatataagtaattctctaaagctttagttggtttgaatatcatcatttcctccatggtgagcctgcttgtgaattattaagcacttgtttgcattctctgttcttcactcatttatttcttgcagtgtgctatggacttaatgctctttctgtattgatgaaaagcagtatgtgggccaatctttttataaaacactatgcatatataaatattacattgttcatagctttatttgacttatgggtttatacataacattagaatgagtagctgtagttgtgtggacatttataaaacaagttcctttcctggaacagacacaatatacattctgtagctaaaaaggagggaaaagtctgtgaatgctatttttattattaaagttttccatacaaagcatacattgagctgtagtaaggctgaggaagagtacaactgaataatgatgttctttttcatcaagttcctaagagctgacttggagattttattcccagggctccactgctaggattcttctcactagttctaacaaaatctgtgatgttaaatgactgatgctctcaattgtgatccagagttttaaataaatgaaatcaaggtggattttgggaatatatcctgaagttaacatcttgatgtccttcttgttgtaagatgatatttggcaatttaaaatctatgtgctacccacctgggcttgtctcaatccgtggactttttggtgtggcagtttcacctgaattccacacatcagatttgtttggaaatattgtactgtacagggactatgcattatgcagaaagatatagttttctttgaactgctgtaaccttaaattggaaactgattcttgtgagcctactttccttaatcccgccgcccccctcccccacttaatgtaaatgtcttgatgagagataatggatgagtattttgtatgatgaaatcaaacgatttaggaatttgtctccctccgttacacagttgatgcctgaaagaatgttgggggggaggactcaacaccctaattgtattttttaagtttcttttgtgaaagattttttaatgcatttttactgtaaaaatacatggaaatgtatgcattccacaaccac

SEQ ID NO: 152646 - DNA, 4389 bp, Homo sapiens
  Payload ID: 10039
  Gene Symbol: MAGI1
  Gene Name: membrane associated guanylate kinase, WW and PDZ domain containing 1
  Uniprot ID: Q96QZ7
  ENST ID: ENST00000402939
  CDS Start-End: 1-4389
atgtccaaagtgatccagaagaagaaccactggactagcagggttcacgaatgcaccgtgaagcggggaccccagggcgagctgggggtgacggtgctgggaggcgcggagcacggggagtttccgtacgtcggagcggtggcggcggtcgaggcagcggggcttcccggcggcggcgagggcccgaggctgggcgaaggggagctgcttctggaggtgcagggggtccgggtgtccggcttgccccgctatgacgtgctgggggtcatcgacagctgcaaggaggccgtcaccttcaaggccgtcagacaaggaggaaggctgaacaaggacctgcgacattttctcaatcagcgattccagaaggggtctcctgatcatgagctccagcagaccataagggataacctttaccgccatgctgtgccttgcacaacccgatctcccagagaaggagaagtgcctggcgtggactataactttctgactgtgaaggagttcttggacctcgagcagagtgggactcttctggaagtcggcacctatgaaggaaactattatgggacacccaagcctcctagccagccagtcagtgggaaagtgatcacgacggatgccttgcacagccttcagtctggctctaagcagtcgaccccgaagcgaaccaagtcctacaatgatatgcaaaatgctggcatagtccacgcggagaatgaggaggaggatgacgttcctgaaatgaacagcagctttacagccgattctggtgaacaagaggagcacactctccaagaaacagcattaccacctgtgaatagtagcatcatcgctgctcccatcacggacccttctcagaagttccctcaatacctacctctttctgcagaggataatttaggtcctctacctgaaaactgggagatggcctatactgaaaatggagaagtctattttatagaccataacacgaaaacaacatcttggttagaccctcggtgcctaaacaagcagcagaagccactggaagagtgtgaagatgatgaaggggtacacaccgaggagctggacagtgaactagaactgcctgctggttgggaaaagattgaagaccctgtctatggtatctactatgtagaccacatcaacaggaagacacaatatgagaacccggttctagaagccaaacggaagaagcagcttgagcagcagcagcagcagcaacagcagcagcaacagcagcagcagcagcagcagcagcagcagacagaagaatggacagaagatcactcagcccttgtgcctcctgttattccaaaccaccctccaagcaatccagagccagccagagaagttccacttcagggcaaacccttttttacacgaaacccttctgagttgaaaggcaagttcattcacacaaagctgcggaaaagcagtcgtggctttggcttcacggtggttggaggggatgaacctgatgagtttctccagatcaagagcttggtcctagatggtcctgctgcattggatggcaagatggaaacaggggatgtgattgtaagtgtgaatgacacctgtgttttgggacacacacatgctcaagttgtgaagatcttccagtccatccccattggtgccagcgtggaccttgaactctgccgaggttatccattgccttttgatccagatgaccccaatacaagtttagtgacctcggtagccattttggataaagaaccaattattgtgaatgggcaagagacctatgattcaccagctagccacagtagtaaaacaggcaaagtcaatggcatgaaggatgccaggccaagcagcccagcggacgtggcttcaaatagttctcatggttatcctaatgacactgtttctttggcttcctccatagccactcagccagaactcataactgttcatattgtcaaagggccaatgggctttggttttactatcgcagacagtcctggtgggggtggccaaagagtgaaacagattgttgacagcccaaggtgccgaggcctgaaagaaggggatctcatagtggaagttaataagaagaacgtgcaggccctaactcacaaccaagtggtggatatgctggttgagtgtcctaagggaagtgaggtcacattgttggtgcaacgaggagggctgccagttcccaagaagagcccaaagtcgcaaccactggaaaggaaagacagccagaatagttctcagcacagtgtttccagccaccgaagcctgcacacagcatccccaagccacagcacacaggtgctccccgagttcccacctgcagaggcccaagctccagatcaaactgacagctctggccagaaaaaaccagatccttttaaaatctgggcccagtccaggagcatgtatgaaaaccgacttccagattaccaggaacaggacatcttcctctggagaaaagagactggatttggatttaggattctgggtggaaatgaaccaggggaacctatttatattggtcacatcgtaccactgggtgctgctgatactgacggccgcctgaggtctggagatgaattaatctgtgtggatgggacgccagtaattggaaaatcacaccagcttgtggtccagcttatgcaacaagctgccaagcaaggccacgtcaatctcacggtgcggcgtaaagtggtttttgcggtgcccaaaaccgagaacgaggtgccctcgccagcctcctctcatcacagtagcaaccagccggcctcgctgacagaagagaagcgcactccgcagggcagccagaactcgctgaacacggtgagctcgggcagcggcagcaccagcggcatcggcagtggcggcggcgggggcagcggcgtggtcagcaccgtggtgcagccctacgacgtggagatccggcgcggggagaacgagggcttcggcttcgtcatcgtgtcctcggtgagcaggcccgaagcaggcacgacctttggcaatgcatgtgtggctatgcctcacaaaataggtcggattattgaggggagccctgctgaccgctgtggcaagctgaaagtaggagaccggatcttggcagtaaatggatgttccatcaccaacaaatcccattcagacattgtgaacctaatcaaggaagcgggaaacacagttaccctccgcatcattcctggggatgagtcctcgaatgccaccttgctgaccaatgcagagaagattgccaccatcaccaccacacacaccccttctcagcaagggacccaggagacaaggaataccaccaaaccaaagcaggaatctcaatttgagttcaaagcaccccaagcaacacaggagcaagatttttacactgtggaactggaaagaggagccaagggatttggctttagccttcgaggaggccgagagtataacatggacctctatgttctgcgcttagcagaggacggtcctgcggagaggtgtggaaagatgaggattggtgatgaaattttagagatcaatggtgagaccaccaaaaacatgaagcattctcgagctatagaactgattaagaatggtggccgcagagttcgtctgtttctgaagcggggagacggctcagtaccagaatatgaccccagcagcgaccgccacggccccgccaccggtccacaaggtgttccggaagtgagggccgggcccgaccgccggcagcatccgtcattggagtccagttacccacccgatcttcacaaatcatcaccacatggggaaaagcgggcacacgcaagggatccgaaaggcagcagagagtatagcagacaacccaatgaacaccacacctggaatgggacttcgaggaaacccgacagcggggcatgccgacccaaggaccgggcgccggagggacggagggacgcgcaggccgagcgcgcggcagccgccaacggccccaagaggcggtccccagagaagcggagggagggcacccgcagcgccgacaacactttggagaggagggagaagcacgagaagagacgagacgtctctccggagcggaggcgagagcggtcacccacccgcaggagagacggctcccccagccggcggagacggtctctggagagactcctggagcagaggaggtcccccgagcgcaggagagggggctcgcccgagcgcagggccaagtccaccgaccggaggcgcgcacgctcccccgagcgcaggagagagcggtccctggacaaaaggaacagagaggacagagccagccaccgagaaagggaagaggcgaatctgaaacaggatgccggcagaagttccagacatcccccggagcagagaaggcgaccttacaaagaatgtagcaccgacctcagtatctga

SEQ ID NO: 152647 - DNA, 556 bp, Homo sapiens
  Payload ID: 10039
  Gene Symbol: MAGI1
  Gene Name: membrane associated guanylate kinase, WW and PDZ domain containing 1
  ENST ID: ENST00000479287
  CDS Start-End: 1-556
gaggaggaggatgacgttcctgaaatgaacagcagctttacagccgattctggtgaacaagaggagcacactctccaagaaacagcattaccacctgtgaatagtagcatcatcgctgctcccatcacggacccttctcagaagttccctcaatacctacctctttctgcagaggataatttaggtcctctacctgaaaactgggagatggcctatactgaaaatggagaagtctattttatagaccataacacgaaaacaacatcttggttagaccctcggtgcctaaacaagcagcagaagccactggaagagtgtgaagatgatgaactgcctgctggttgggaaaagattgaagaccctgtctatggtatctactatgtagaccacatcaacaggaagacacaatatgagaacccggttctagaagccaaacggaagaagcagcttgagcagcagcagcagcagcaacagcagcagcaacagcagcagcagcagcagcagcagcagcagacagaagaatggacagaagatcactcagcccttgtgcctcctg

SEQ ID NO: 152648 - DNA, 4193 bp, Homo sapiens
  Payload ID: 10039
  Gene Symbol: MAGI1
  Gene Name: membrane associated guanylate kinase, WW and PDZ domain containing 1
  ENST ID: ENST00000463103
  CDS Start-End: 1-3396
gccggaggaagcctggggacaggcaggcggcggcagaggctccctgccaccggaggcacaacccgatctcccagagaaggagaagtgcctggcgtggactataactttctgactgtgaaggagttcttggacctcgagcagagtgggactcttctggaagtcggcacctatgaaggaaactattatgggacacccaagcctcctagccagccagtcagtgggaaagtgatcacgacggatgccttgcacagccttcagtctggctctaagcagtcgaccccgaagcgaaccaagtcctacaatgatatgcaaaatgctggcatagtccacgcggagaatgaggaggaggatgacgttcctgaaatgaacagcagctttacagccgattctggtgaacaagaggagcacactctccaagaaacagcattaccacctgtgaatagtagcatcatcgctgctcccatcacggacccttctcagaagttccctcaatacctacctctttctgcagaggataatttaggtcctctacctgaaaactgggagatggcctatactgaaaatggagaagtctattttatagaccataacacgaaaacaacatcttggttagaccctcggtgcctaaacaagcagcagaagccactggaagagtgtgaagatgatgaaggggtacacaccgaggagctggacagtgaactagaactgcctgctggttgggaaaagattgaagaccctgtctatggtatctactatgtagaccacatcaacaggaagacacaatatgagaacccggttctagaagccaaacggaagaagcagcttgagcagcagcagcagcagcaacagcagcagcaacagcagcagcagcagcagcagcagcagcagacagaagaatggacagaagatcactcagcccttgtgcctcctgttattccaaaccaccctccaagcaatccagagccagccagagaagttccacttcagggcaaacccttttttacacgaaacccttctgagttgaaaggcaagttcattcacacaaagctgcggaaaagcagtcgtggctttggcttcacggtggttggaggggatgaacctgatgagtttctccagatcaagagcttggtcctagatggtcctgctgcattggatggcaagatggaaacaggggatgtgattgtaagtgtgaatgacacctgtgttttgggacacacacatgctcaagttgtgaagatcttccagtccatccccattggtgccagcgtggaccttgaactctgccgaggttatccattgccttttgatccagatgaccccaatacaagtttagtgacctcggtagccattttggataaagaaccaattattgtgaatgggcaagagacctatgattcaccagctagccacagtagtaaaacaggcaaagtcaatggcatgaaggatgccaggccaagcagcccagcggacgtggcttcaaatagttctcatggttatcctaatgacactgtttctttggcttcctccatagccactcagccagaactcataactgttcatattgtcaaagggccaatgggctttggttttactatcgcagacagtcctggtgggggtggccaaagagtgaaacagattgttgacagcccaaggtgccgaggcctgaaagaaggggatctcatagtggaagttaataagaagaacgtgcaggccctaactcacaaccaagtggtggatatgctggttgagtgtcctaagggaagtgaggtcacattgttggtgcaacgaggagggctgccagttcccaagaagagcccaaagtcgcaaccactggaaaggaaagacagccagaatagttctcagcacagtgtttccagccaccgaagcctgcacacagcatccccaagccacagcacacaggtgctccccgagttcccacctgcagaggcccaagctccagatcaaactgacagctctggccagaaaaaaccagatccttttaaaatctgggcccagtccaggagcatgtatgaaaaccgacctatgtcaccttcacctgcgtcgggattgagcaagggtgagagagagagagaaatcaattccacgaattttggagaatgtccgattccagattaccaggaacaggacatcttcctctggagaaaagagactggatttggatttaggattctgggtggaaatgaaccaggggaacctatttatattggtcacatcgtaccactgggtgctgctgatactgacggccgcctgaggtctggagatgaattaatctgtgtggatgggacgccagtaattggaaaatcacaccagcttgtggtccagcttatgcaacaagctgccaagcaaggccacgtcaatctcacggtgcggcgtaaagtggtttttgcggtgcccaaaaccgagaacgaggtgccctcgccagcctcctctcatcacagtagcaaccagccggcctcgctgacagaagagaagcgcactccgcagggcagccagaactcgctgaacacggtgagctcgggcagcggcagcaccagcggcatcggcagtggcggcggcgggggcagcggcgtggtcagcaccgtggtgcagccctacgacgtggagatccggcgcggggagaacgagggcttcggcttcgtcatcgtgtcctcggtgagcaggcccgaagcaggcacgacctttgcaggcaatgcatgtgtggctatgcctcacaaaataggtcggattattgaggggagccctgctgaccgctgtggcaagctgaaagtaggagaccggatcttggcagtaaatggatgttccatcaccaacaaatcccattcagacattgtgaacctaatcaaggaagcgggaaacacagttaccctccgcatcattcctggggatgagtcctcgaatgccaccttgctgaccaatgcagagaagattgccaccatcaccaccacacacaccccttctcagcaagggacccaggagacaaggaataccaccaaaccaaagcaggaatctcaatttgagttcaaagcaccccaagcaacacaggagcaagatttttacactgtggaactggaaagaggagccaagggatttggctttagccttcgaggaggccgagagtataacatggacctctatgttctgcgcttagcagaggacggtcctgcggagaggtgtggaaagatgaggattggtgatgaaattttagagatcaatggtgagaccaccaaaaacatgaagcattctcgagctatagaactgattaagaatggtggccgcagagttcgtctgtttctgaagcggggagacggctcagtaccagaatatggtgggtcaaactatgaaaacattccttccttccctggcatgactccatgaatttgtctccagaacggcagcaggaaagtcttttttgtttcccctattcaccagtgtcttaccagcctctcgcaccatgtgattatttgcctcgcttgttctgaaatctctacacatttcatccttttgcttgcttacgtggactggggcatggcctaagacaagatctttatagccccctttctgataatcagagagaacgttttgtctagtccgaccaagagcgaaggaatgtttgtttgtactgtgccaaactgttcctcagatccaattgttagcacaaaatgactatatactccttttaagaagcaggaaagcaggtttcctgagtgatatgttgaggcacaattattttttcctttttggttacttggtgtctttatttaagaggcatgaaattttgagagatttgggggctttgctaacctcccttatgctctgtatacaacacttctccatcccccaactggtgtcttaccccaaatcagaccatctgagcccactactatcaaacaaacaaacaaaaactgttaatatattagccataatgtttttaaatgataaaggatgaaataaattcccagtgctcatcatgagggaaacatgtgactatacctttcctatgaggaaagccaggttatacatagagttcctttgtcatatctttagacttgatttgagtagacagcaatgatctttacatagcttagtgttctgatggcaaaatattgtatatgataataattatgtcctatttatttgagatttgtgtttaaaattaaaaaaaaaaaaaaaaa

SEQ ID NO: 152649 - DNA, 3694 bp, Homo sapiens
  Payload ID: 10039
  Gene Symbol: MAGI1
  Gene Name: membrane associated guanylate kinase, WW and PDZ domain containing 1
  ENST ID: ENST00000460329
  CDS Start-End: 1-3410
cagcgtggtgggaggcggtttcaggctcacaaagggaaggattaatcttggcgattgggctggggtttgcaggcacaacccgatctcccagagaaggagaagtgcctggcgtggactataactttctgactgtgaaggagttcttggacctcgagcagagtgggactcttctggaagtcggcacctatgaaggaaactattatgggacacccaagcctcctagccagccagtcagtgggaaagtgatcacgacggatgccttgcacagccttcagtctggctctaagcagtcgaccccgaagcgaaccaagtcctacaatgatatgcaaaatgctggcatagtccacgcggagaatgaggaggaggatgacgttcctgaaatgaacagcagctttacagccgattctggtgaacaagaggagcacactctccaagaaacagcattaccacctgtgaatagtagcatcatcgctgctcccatcacggacccttctcagaagttccctcaatacctacctctttctgcagaggataatttaggtcctctacctgaaaactgggagatggcctatactgaaaatggagaagtctattttatagaccataacacgaaaacaacatcttggttagaccctcggtgcctaaacaagcagcagaagccactggaagagtgtgaagatgatgaaggggtacacaccgaggagctggacagtgaactagaactgcctgctggttgggaaaagattgaagaccctgtctatggtatctactatgtagaccacatcaacaggaagacacaatatgagaacccggttctagaagccaaacggaagaagcagcttgagcagcagcagcagcagcaacagcagcagcaacagcagcagcagcagcagcagcagcagcagacagaagaatggacagaagatcactcagcccttgtgcctcctgttattccaaaccaccctccaagcaatccagagccagccagagaagttccacttcagggcaaacccttttttacacgaaacccttctgagttgaaaggcaagttcattcacacaaagctgcggaaaagcagtcgtggctttggcttcacggtggttggaggggatgaacctgatgagtttctccagatcaagagcttggtcctagatggtcctgctgcattggatggcaagatggaaacaggggatgtgattgtaagtgtgaatgacacctgtgttttgggacacacacatgctcaagttgtgaagatcttccagtccatccccattggtgccagcgtggaccttgaactctgccgaggttatccattgccttttgatccagatgaccccaatacaagtttagtgacctcggtagccattttggataaagaaccaattattgtgaatgggcaagagacctatgattcaccagctagccacagtagtaaaacaggcaaagtcaatggcatgaaggatgccaggccaagcagcccagcggacgtggcttcaaatagttctcatggttatcctaatgacactgtttctttggcttcctccatagccactcagccagaactcataactgttcatattgtcaaagggccaatgggctttggttttactatcgcagacagtcctggtgggggtggccaaagagtgaaacagattgttgacagcccaaggtgccgaggcctgaaagaaggggatctcatagtggaagttaataagaagaacgtgcaggccctaactcacaaccaagtggtggatatgctggttgagtgtcctaagggaagtgaggtcacattgttggtgcaacgaggagggctgccagttcccaagaagagcccaaagtcgcaaccactggaaaggaaagacagccagaatagttctcagcacagtgtttccagccaccgaagcctgcacacagcatccccaagccacagcacacaggtgctccccgagttcccacctgcagaggcccaagctccagatcaaactgacagctctggccagaaaaaaccagatccttttaaaatctgggcccagtccaggagcatgtatgaaaaccgacctatgtcaccttcacctgcgtcgggattgagcaagggtgagagagagagagaaatcaattccacgaattttggagaatgtccgattccagattaccaggaacaggacatcttcctctggagaaaagagactggatttggatttaggattctgggtggaaatgaaccaggggaacctatttatattggtcacatcgtaccactgggtgctgctgatactgacggccgcctgaggtctggagatgaattaatctgtgtggatgggacgccagtaattggaaaatcacaccagcttgtggtccagcttatgcaacaagctgccaagcaaggccacgtcaatctcacggtgcggcgtaaagtggtttttgcggtgcccaaaaccgagaacgaggtgccctcgccagcctcctctcatcacagtagcaaccagccggcctcgctgacagaagagaagcgcactccgcagggcagccagaactcgctgaacacggtgagctcgggcagcggcagcaccagcggcatcggcagtggcggcggcgggggcagcggcgtggtcagcaccgtggtgcagccctacgacgtggagatccggcgcggggagaacgagggcttcggcttcgtcatcgtgtcctcggtgagcaggcccgaagcaggcacgacctttggcaatgcatgtgtggctatgcctcacaaaataggtcggattattgaggggagccctgctgaccgctgtggcaagctgaaagtaggagaccggatcttggcagtaaatggatgttccatcaccaacaaatcccattcagacattgtgaacctaatcaaggaagcgggaaacacagttaccctccgcatcattcctggggatgagtcctcgaatgccaccttgctgaccaatgcagagaagattgccaccatcaccaccacacacaccccttctcagcaagggacccaggagacaaggaataccaccaaaccaaagcaggaatctcaatttgagttcaaagcaccccaagcaacacaggagcaagatttttacactgtggaactggaaagaggagccaagggatttggctttagccttcgaggaggccgagagtataacatggacctctatgttctgcgcttagcagaggacggtcctgcggagaggtgtggaaagatgaggattggtgatgaaattttagagatcaatggtgagaccaccaaaaacatgaagcattctcgagctatagaactgattaagaatggtggccgcagagttcgtctgtttctgaagcggggagacggctcagtaccagaatatggtgggtcaaactatgaaaacattccttccttccctggcatgactccatgaatttgtctccagaacggcagcaggaaagtcttttttgtttcccctattcaccagtgtcttaccagcctctcgcaccatgtgattatttgcctcgcttgttctgaaatctctacacatttcatccttttgcttgcttacgtggactggggcatggcctaagacaagatctttatagccccctttctgataatcagagagaacgttttgtctagtccgaccaagagcgaaggaatgtttgtttgtactgtgccaaactgttcctcagatccaattgttagcacaaa

SEQ ID NO: 152650 - DNA, 4791 bp, Homo sapiens
  Payload ID: 10039
  Gene Symbol: MAGI1
  Gene Name: membrane associated guanylate kinase, WW and PDZ domain containing 1
  Uniprot ID: Q96QZ7
  ENST ID: ENST00000483466
  CDS Start-End: 243-4013
cggaatgcaaacaaagctcgcgggcgcctgtgcggggctcgcggggaagcccagaaagtttgttttatgatggcttgagtgcgcgagcgtgtgcaggggagcgaggctgccaagtttctctctcctgttttgtgatttggggagagatgtttctcccatgaacaagcggaggcttgggggctcgtgctgtggggggcacctgtctctcgttttatttttttggaggaggggtgtaactcatcatgtccaaagtgatccagaagaagaaccactggactagcagggttcacgaatgcaccgtgaagcggggaccccagggcgagctgggggtgacggtgctgggaggcgcggagcacggggagtttccgtacgtcggagcggtggcggcggtcgaggcagcggggcttcccggcggcggcgagggcccgaggctgggcgaaggggagctgcttctggaggtgcagggggtccgggtgtccggcttgccccgctatgacgtgctgggggtcatcgacagctgcaaggaggccgtcaccttcaaggccgtcagacaaggaggaaggctgaacaaggacctgcgacattttctcaatcagcgattccagaaggggtctcctgatcatgagctccagcagaccataagggataacctttaccgccatgctgtgccttgcacaacccgatctcccagagaaggagaagtgcctggcgtggactataactttctgactgtgaaggagttcttggacctcgagcagagtgggactcttctggaagtcggcacctatgaaggaaactattatgggacacccaagcctcctagccagccagtcagtgggaaagtgatcacgacggatgccttgcacagccttcagtctggctctaagcagtcgaccccgaagcgaaccaagtcctacaatgatatgcaaaatgctggcatagtccacgcggagaatgaggaggaggatgacgttcctgaaatgaacagcagctttacagccgattctggtgaacaagaggagcacactctccaagaaacagcattaccacctgtgaatagtagcatcatcgctgctcccatcacggacccttctcagaagttccctcaatacctacctctttctgcagaggataatttaggtcctctacctgaaaactgggagatggcctatactgaaaatggagaagtctattttatagaccataacacgaaaacaacatcttggttagaccctcggtgcctaaacaagcagcagaagccactggaagagtgtgaagatgatgaaggggtacacaccgaggagctggacagtgaactagaactgcctgctggttgggaaaagattgaagaccctgtctatggtatctactatgtagaccacatcaacaggaagacacaatatgagaacccggttctagaagccaaacggaagaagcagcttgagcagcagcagcagcagcaacagcagcagcaacagcagcagcagcagcagcagcagcagcagacagaagaatggacagaagatcactcagcccttgtgcctcctgttattccaaaccaccctccaagcaatccagagccagccagagaagttccacttcagggcaaacccttttttacacgaaacccttctgagttgaaaggcaagttcattcacacaaagctgcggaaaagcagtcgtggctttggcttcacggtggttggaggggatgaacctgatgagtttctccagatcaagagcttggtcctagatggtcctgctgcattggatggcaagatggaaacaggggatgtgattgtaagtgtgaatgacacctgtgttttgggacacacacatgctcaagttgtgaagatcttccagtccatccccattggtgccagcgtggaccttgaactctgccgaggttatccattgccttttgatccagatgaccccaatacaagtttagtgacctcggtagccattttggataaagaaccaattattgtgaatgggcaagagacctatgattcaccagctagccacagtagtaaaacaggcaaagtcaatggcatgaaggatgccaggccaagcagcccagcggacgtggcttcaaatagttctcatggttatcctaatgacactgtttctttggcttcctccatagccactcagccagaactcataactgttcatattgtcaaagggccaatgggctttggttttactatcgcagacagtcctggtgggggtggccaaagagtgaaacagattgttgacagcccaaggtgccgaggcctgaaagaaggggatctcatagtggaagttaataagaagaacgtgcaggccctaactcacaaccaagtggtggatatgctggttgagtgtcctaagggaagtgaggtcacattgttggtgcaacgaggagggctgccagttcccaagaagagcccaaagtcgcaaccactggaaaggaaagacagccagaatagttctcagcacagtgtttccagccaccgaagcctgcacacagcatccccaagccacagcacacaggtgctccccgagttcccacctgcagaggcccaagctccagatcaaactgacagctctggccagaaaaaaccagatccttttaaaatctgggcccagtccaggagcatgtatgaaaaccgacctatgtcaccttcacctgcgtcgggattgagcaagggtgagagagagagagaaatcaattccacgaattttggagaatgtccgattccagattaccaggaacaggacatcttcctctggagaaaagagactggatttggatttaggattctgggtggaaatgaaccaggggaacctatttatattggtcacatcgtaccactgggtgctgctgatactgacggccgcctgaggtctggagatgaattaatctgtgtggatgggacgccagtaattggaaaatcacaccagcttgtggtccagcttatgcaacaagctgccaagcaaggccacgtcaatctcacggtgcggcgtaaagtggtttttgcggtgcccaaaaccgagaacgaggtgccctcgccagcctcctctcatcacagtagcaaccagccggcctcgctgacagaagagaagcgcactccgcagggcagccagaactcgctgaacacggtgagctcgggcagcggcagcaccagcggcatcggcagtggcggcggcgggggcagcggcgtggtcagcaccgtggtgcagccctacgacgtggagatccggcgcggggagaacgagggcttcggcttcgtcatcgtgtcctcggtgagcaggcccgaagcaggcacgacctttgcaggcaatgcatgtgtggctatgcctcacaaaataggtcggattattgaggggagccctgctgaccgctgtggcaagctgaaagtaggagaccggatcttggcagtaaatggatgttccatcaccaacaaatcccattcagacattgtgaacctaatcaaggaagcgggaaacacagttaccctccgcatcattcctggggatgagtcctcgaatgccaccttgctgaccaatgcagagaagattgccaccatcaccaccacacacaccccttctcagcaagggacccaggagacaaggaataccaccaaaccaaagcaggaatctcaatttgagttcaaagcaccccaagcaacacaggagcaagatttttacactgtggaactggaaagaggagccaagggatttggctttagccttcgaggaggccgagagtataacatggacctctatgttctgcgcttagcagaggacggtcctgcggagaggtgtggaaagatgaggattggtgatgaaattttagagatcaatggtgagaccaccaaaaacatgaagcattctcgagctatagaactgattaagaatggtggccgcagagttcgtctgtttctgaagcggggagacggctcagtaccagaatatggtgggtcaaactatgaaaacattccttccttccctggcatgactccatgaatttgtctccagaacggcagcaggaaagtcttttttgtttcccctattcaccagtgtcttaccagcctctcgcaccatgtgattatttgcctcgcttgttctgaaatctctacacatttcatccttttgcttgcttacgtggactggggcatggcctaagacaagatctttatagccccctttctgataatcagagagaacgttttgtctagtccgaccaagagcgaaggaatgtttgtttgtactgtgccaaactgttcctcagatccaattgttagcacaaaatgactatatactccttttaagaagcaggaaagcaggtttcctgagtgatatgttgaggcacaattattttttcctttttggttacttggtgtctttatttaagaggcatgaaattttgagagatttgggggctttgctaacctcccttatgctctgtatacaacacttctccatcccccaactggtgtcttaccccaaatcagaccatctgagcccactactatcaaacaaacaaacaaaaactgttaatatattagccataatgtttttaaatgataaaggatgaaataaattcccagtgctcatcatgagggaaacatgtgactatacctttcctatgaggaaagccaggttatacatagagttcctttgtcatatctttagacttgatttgagtagacagcaatgatctttacatagcttagtgttctgatggcaaaatattgtatatgataataattatgtcctatttatttgagatttgtgtttaaaa

SEQ ID NO: 152651 - DNA, 3045 bp, Homo sapiens
  Payload ID: 10039
  Gene Symbol: MAGI1
  Gene Name: membrane associated guanylate kinase, WW and PDZ domain containing 1
  ENST ID: ENST00000472257
  CDS Start-End: 1-3045
aagcagtcgaccccgaagcgaaccaagtcctacaatgatatgcaaaatgctggcatagtccacgcggagaatgaggaggaggatgacgttcctgaaatgaacagcagctttacagccgattctggtgaacaagaggagcacactctccaagaaacagcattaccacctgtgaatagtagcatcatcgctgctcccatcacggacccttctcagaagttccctcaatacctacctctttctgcagaggataatttaggtcctctacctgaaaactgggagatggcctatactgaaaatggagaagtctattttatagaccataacacgaaaacaacatcttggttagaccctcggtgcctaaacaagcagcagaagccactggaagagtgtgaagatgatgaaggggtacacaccgaggagctggacagtgaactagaactgcctgctggttgggaaaagattgaagaccctgtctatggtatctactatgtagaccacatcaacaggaagacacaatatgagaacccggttctagaagccaaacggaagaagcagcttgagcagcagcagcagcagcaacagcagcagcaacagcagcagcagcagcagcagcagcagcagacagaagaatggacagaagatcactcagcccttgtgcctcctgttattccaaaccaccctccaagcaatccagagccagccagagaagttccacttcagggcaaacccttttttacacgaaacccttctgagttgaaaggcaagttcattcacacaaagctgcggaaaagcagtcgtggctttggcttcacggtggttggaggggatgaacctgatgagtttctccagatcaagagcttggtcctagatggtcctgctgcattggatggcaagatggaaacaggggatgtgattgtaagtgtgaatgacacctgtgttttgggacacacacatgctcaagttgtgaagatcttccagtccatccccattggtgccagcgtggaccttgaactctgccgaggttatccattgccttttgatccagatgaccccaatacaagtttagtgacctcggtagccattttggataaagaaccaattattgtgaatgggcaagagacctatgattcaccagctagccacagtagtaaaacaggcaaagtcaatggcatgaaggatgccaggccaagcagcccagcggacgtggcttcaaatagttctcatggttatcctaatgacactgtttctttggcttcctccatagccactcagccagaactcataactgttcatattgtcaaagggccaatgggctttggttttactatcgcagacagtcctggtgggggtggccaaagagtgaaacagattgttgacagcccaaggtgccgaggcctgaaagaaggggatctcatagtggaagttaataagaagaacgtgcaggccctaactcacaaccaagtggtggatatgctggttgagtgtcctaagggaagtgaggtcacattgttggtgcaacgaggagggctgccagttcccaagaagagcccaaagtcgcaaccactggaaaggaaagacagccagaatagttctcagcacagtgtttccagccaccgaagcctgcacacagcatccccaagccacagcacacaggtgctccccgagttcccacctgcagaggcccaagctccagatcaaactgacagctctggccagaaaaaaccagatccttttaaaatctgggcccagtccaggagcatgtatgaaaaccgacttccagattaccaggaacaggacatcttcctctggagaaaagagactggatttggatttaggattctgggtggaaatgaaccaggggaacctatttatattggtcacatcgtaccactgggtgctgctgatactgacggccgcctgaggtctggagatgaattaatctgtgtggatgggacgccagtaattggaaaatcacaccagcttgtggtccagcttatgcaacaagctgccaagcaaggccacgtcaatctcacggtgcggcgtaaagtggtttttgcggtgcccaaaaccgagaacgaggtgccctcgccagcctcctctcatcacagtagcaaccagccggcctcgctgacagaagagaagcgcactccgcagggcagccagaactcgctgaacacggtgagctcgggcagcggcagcaccagcggcatcggcagtggcggcggcgggggcagcggcgtggtcagcaccgtggtgcagccctacgacgtggagatccggcgcggggagaacgagggcttcggcttcgtcatcgtgtcctcggtgagcaggcccgaagcaggcacgacctttgcaggcaatgcatgtgtggctatgcctcacaaaataggtcggattattgaggggagccctgctgaccgctgtggcaagctgaaagtaggagaccggatcttggcagtaaatggatgttccatcaccaacaaatcccattcagacattgtgaacctaatcaaggaagcgggaaacacagttaccctccgcatcattcctggggatgagtcctcgaatgccaccttgctgaccaatgcagagaagattgccaccatcaccaccacacacaccccttctcagcaagggacccaggagacaaggaataccaccaaaccaaagcaggaatctcaatttgagttcaaagcaccccaagcaacacaggagcaagatttttacactgtggaactggaaagaggagccaagggatttggctttagccttcgaggaggccgagagtataacatggacctctatgttctgcgcttagcagaggacggtcctgcggagaggtgtggaaagatgaggattggtgatgaaattttagagatcaatggtgagaccaccaaaaacatgaagcattctcgagctatagaactgattaagaatggtggccgcagagttcgtctgtttctgaagcggggagacggctcagtaccagaatatggtgggtcaaactatgaaaacattccttccttccctggcatgactccatga

SEQ ID NO: 152652 - DNA, 3555 bp, Homo sapiens
  Payload ID: 10039
  Gene Symbol: MAGI1
  Gene Name: membrane associated guanylate kinase, WW and PDZ domain containing 1
  Uniprot ID: Q96QZ7
  ENST ID: ENST00000497477
  CDS Start-End: 1-3483
atgtccaaagtgatccagaagaagaaccactggactagcagggttcacgaatgcaccgtgaagcggggaccccagggcgagctgggggtgacggtgctgggaggcgcggagcacggggagtttccgtacgtcggagcggtggcggcggtcgaggcagcggggcttcccggcggcggcgagggcccgaggctgggcgaaggggagctgcttctggaggtgcagggggtccgggtgtccggcttgccccgctatgacgtgctgggggtcatcgacagctgcaaggaggccgtcaccttcaaggccgtcagacaaggaggaaggctgaacaaggacctgcgacattttctcaatcagcgattccagaaggggtctcctgatcatgagctccagcagaccataagggataacctttaccgccatgctgtgccttgcacaacccgatctcccagagaaggagaagtgcctggcgtggactataactttctgactgtgaaggagttcttggacctcgagcagagtgggactcttctggaagtcggcacctatgaaggaaactattatgggacacccaagcctcctagccagccagtcagtgggaaagtgatcacgacggatgccttgcacagccttcagtctggctctaagcagtcgaccccgaagcgaaccaagtcctacaatgatatgcaaaatgctggcatagtccacgcggagaatgaggaggaggatgacgttcctgaaatgaacagcagctttacagccgattctggtgaacaagaggagcacactctccaagaaacagcattaccacctgtgaatagtagcatcatcgctgctcccatcacggacccttctcagaagttccctcaatacctacctctttctgcagaggataatttaggtcctctacctgaaaactgggagatggcctatactgaaaatggagaagtctattttatagaccataacacgaaaacaacatcttggttagaccctcggtgcctaaacaagcagcagaagccactggaagagtgtgaagatgatgaaggggtacacaccgaggagctggacagtgaactagaactgcctgctggttgggaaaagattgaagaccctgtctatggtatctactatgtagaccacatcaacaggaagacacaatatgagaacccggttctagaagccaaacggaagaagcagcttgagcagcagcagcagcagcaacagcagcagcaacagcagcagcagcagcagcagcagcagcagacagaagaatggacagaagatcactcagcccttgtgcctcctgttattccaaaccaccctccaagcaatccagagccagccagagaagttccacttcagggcaaacccttttttacacgaaacccttctgagttgaaaggcaagttcattcacacaaagctgcggaaaagcagtcgtggctttggcttcacggtggttggaggggatgaacctgatgagtttctccagatcaagagcttggtcctagatggtcctgctgcattggatggcaagatggaaacaggggatgtgattgtaagtgtgaatgacacctgtgttttgggacacacacatgctcaagttgtgaagatcttccagtccatccccattggtgccagcgtggaccttgaactctgccgaggttatccattgccttttgatccagatgaccccaatacaagtttagtgacctcggtagccattttggataaagaaccaattattgtgaatgggcaagagacctatgattcaccagctagccacagtagtaaaacaggcaaagtcaatggcatgaaggatgccaggccaagcagcccagcggacgtggcttcaaatagttctcatggttatcctaatgacactgtttctttggcttcctccatagccactcagccagaactcataactgttcatattgtcaaagggccaatgggctttggttttactatcgcagacagtcctggtgggggtggccaaagagtgaaacagattgttgacagcccaaggtgccgaggcctgaaagaaggggatctcatagtggaagttaataagaagaacgtgcaggccctaactcacaaccaagtggtggatatgctggttgagtgtcctaagggaagtgaggtcacattgttggtgcaacgaggagggctgccagttcccaagaagagcccaaagtcgcaaccactggaaaggaaagacagccagaatagttctcagcacagtgtttccagccaccgaagcctgcacacagcatccccaagccacagcacacaggtgctccccgagttcccacctgcagaggcccaagctccagatcaaactgacagctctggccagaaaaaaccagatccttttaaaatctgggcccagtccaggagcatgtatgaaaaccgacttccagattaccaggaacaggacatcttcctctggagaaaagagactggatttggatttaggattctgggtggaaatgaaccaggggaacctatttatattggtcacatcgtaccactgggtgctgctgatactgacggccgcctgaggtctggagatgaattaatctgtgtggatgggacgccagtaattggaaaatcacaccagcttgtggtccagcttatgcaacaagctgccaagcaaggccacgtcaatctcacggtgcggcgtaaagtggtttttgcggtgcccaaaaccgagaacgaggtgccctcgccagcctcctctcatcacagtagcaaccagccggcctcgctgacagaagagaagcgcactccgcagggcagccagaactcgctgaacacggtgagctcgggcagcggcagcaccagcggcatcggcagtggcggcggcgggggcagcggcgtggtcagcaccgtggtgcagccctacgacgtggagatccggcgcggggagaacgagggcttcggcttcgtcatcgtgtcctcggtgagcaggcccgaagcaggcacgacctttgagtcctcgaatgccaccttgctgaccaatgcagagaagattgccaccatcaccaccacacacaccccttctcagcaagggacccaggagacaaggaataccaccaaaccaaagcaggaatctcaatttgagttcaaagcaccccaagcaacacaggagcaagatttttacactgtggaactggaaagaggagccaagggatttggctttagccttcgaggaggccgagagtataacatggacctctatgttctgcgcttagcagaggacggtcctgcggagaggtgtggaaagatgaggattggtgatgaaattttagagatcaatggtgagaccaccaaaaacatgaagcattctcgagctatagaactgattaagaatggtggccgcagagttcgtctgtttctgaagcggggagacggctcagtaccagaatatggtgggtcaaactatgaaaacattccttccttccctggcatgactccatgaatttgtctccagaacggcagcaggaaagtcttttttgtttcccctattcaccagtgtcttaccagcctctcg

SEQ ID NO: 152653 - DNA, 6225 bp, Homo sapiens
  Payload ID: 10039
  Gene Symbol: MAGI1
  Gene Name: membrane associated guanylate kinase, WW and PDZ domain containing 1
  ENST ID: ENST00000621418
  CDS Start-End: 611-4078
aggaggaaggctgaacaaggacctgcgacattttctcaatcagcgattccagaaggggtctcctgatcatgagctccagcagaccataagggataacctttaccgccatgctgtgccttgcacaacccgatctcccagagaaggagaagtgcctggcgtggactataactttctgactgtgaaggagttcttggacctcgagcagagtgggactcttctggaagtcggcacctatgaaggaaactattatgggacacccaagcctcctagccagccagtcagtgggaaagtgatcacgacggatgccttgcacagccttcagtctggctctaagcagtcgaccccgaagcgaaccaagtcctacaatgatatgcaaaatgctggcatagtccacgcggagaatgaggaggaggatgacgttcctgaaatgaacagcagctttacagccgattctggtgaacaagaggagcacactctccaagaaacagcattaccacctgtgaatagtagcatcatcgctgctcccatcacggacccttctcagaagttccctcaatacctacctctttctgcagaggataatttaggtcctctacctgaaaactgggagatggcctatactgaaaatggagaagtctattttatagaccataacacgaaaacaacatcttggttagaccctcggtgcctaaacaagcagcagaagccactggaagagtgtgaagatgatgaaggggtacacaccgaggagctggacagtgaactagaactgcctgctggttgggaaaagattgaagaccctgtctatggtatctactatgtagaccacatcaacaggaagacacaatatgagaacccggttctagaagccaaacggaagaagcagcttgagcagcagcagcagcagcaacagcagcagcaacagcagcagcagcagcagcagcagcagcagacagaagaatggacagaagatcactcagcccttgtgcctcctgttattccaaaccaccctccaagcaatccagagccagccagagaagttccacttcagggcaaacccttttttacacgaaacccttctgagttgaaaggcaagttcattcacacaaagctgcggaaaagcagtcgtggctttggcttcacggtggttggaggggatgaacctgatgagtttctccagatcaagagcttggtcctagatggtcctgctgcattggatggcaagatggaaacaggggatgtgattgtaagtgtgaatgacacctgtgttttgggacacacacatgctcaagttgtgaagatcttccagtccatccccattggtgccagcgtggaccttgaactctgccgaggttatccattgccttttgatccagatgaccccaatacaagtttagtgacctcggtagccattttggataaagaaccaattattgtgaatgggcaagagacctatgattcaccagctagccacagtagtaaaacaggcaaagtcaatggcatgaaggatgccaggccaagcagcccagcggacgtggcttcaaatagttctcatggttatcctaatgacactgtttctttggcttcctccatagccactcagccagaactcataactgttcatattgtcaaagggccaatgggctttggttttactatcgcagacagtcctggtgggggtggccaaagagtgaaacagattgttgacagcccaaggtgccgaggcctgaaagaaggggatctcatagtggaagttaataagaagaacgtgcaggccctaactcacaaccaagtggtggatatgctggttgagtgtcctaagggaagtgaggtcacattgttggtgcaacgaggagggctgccagttcccaagaagagcccaaagtcgcaaccactggaaaggaaagacagccagaatagttctcagcacagtgtttccagccaccgaagcctgcacacagcatccccaagccacagcacacaggtgctccccgagttcccacctgcagaggcccaagctccagatcaaactgacagctctggccagaaaaaaccagatccttttaaaatctgggcccagtccaggagcatgtatgaaaaccgacttccagattaccaggaacaggacatcttcctctggagaaaagagactggatttggatttaggattctgggtggaaatgaaccaggggaacctatttatattggtcacatcgtaccactgggtgctgctgatactgacggccgcctgaggtctggagatgaattaatctgtgtggatgggacgccagtaattggaaaatcacaccagcttgtggtccagcttatgcaacaagctgccaagcaaggccacgtcaatctcacggtgcggcgtaaagtggtttttgcggtgcccaaaaccgagaacgaggtgccctcgccagcctcctctcatcacagtagcaaccagccggcctcgctgacagaagagaagcgcactccgcagggcagccagaactcgctgaacacggtgagctcgggcagcggcagcaccagcggcatcggcagtggcggcggcgggggcagcggcgtggtcagcaccgtggtgcagccctacgacgtggagatccggcgcggggagaacgagggcttcggcttcgtcatcgtgtcctcggtgagcaggcccgaagcaggcacgacctttggcaatgcatgtgtggctatgcctcacaaaataggtcggattattgaggggagccctgctgaccgctgtggcaagctgaaagtaggagaccggatcttggcagtaaatggatgttccatcaccaacaaatcccattcagacattgtgaacctaatcaaggaagcgggaaacacagttaccctccgcatcattcctggggatgagtcctcgaatgccaccttgctgaccaatgcagagaagattgccaccatcaccaccacacacaccccttctcagcaagggacccaggagacaaggaataccaccaaaccaaagcaggaatctcaatttgagttcaaagcaccccaagcaacacaggagcaagatttttacactgtggaactggaaagaggagccaagggatttggctttagccttcgaggaggccgagagtataacatggacctctatgttctgcgcttagcagaggacggtcctgcggagaggtgtggaaagatgaggattggtgatgaaattttagagatcaatggtgagaccaccaaaaacatgaagcattctcgagctatagaactgattaagaatggtggccgcagagttcgtctgtttctgaagcggggagacggctcagtaccagaatatgaccccagcagcgaccgccacggccccgccaccggtccacaaggtgttccggaagtgagggccgggcccgaccgccggcagcatccgtcattggagtccagttacccacccgatcttcacaaatcatcaccacatggggaaaagcgggcacacgcaagggatccgaaaggcagcagagagtatagcagacaacccaatgaacaccacacctggaatgggacttcgaggaaacccgacagcggggcatgccgacccaaggaccgggcgccggagggacggagggacgcgcaggccgagcgcgcggcagccgccaacggccccaagaggcggtccccagagaagcggagggagggcacccgcagcgccgacaacactttggagaggagggagaagcacgagaagagacgagacgtctctccggagcggaggcgagagcggtcacccacccgcaggagagacggctcccccagccggcggagacggtctctggagagactcctggagcagaggaggtcccccgagcgcaggagagggggctcgcccgagcgcagggccaagtccaccgaccggaggcgcgcacgctcccccgagcgcaggagagagcggtccctggacaaaaggaacagagaggacagagccagccaccgagaaagggaagaggcgaatctgaaacaggatgccggcagaagttccagacatcccccggagcagagaaggcgaccttacaaagaatgtagcaccgacctcagtatctgagacgctgagtcacattccaacctttaccgtgtcaaaggttctaagaggaaagtcacaaacctgaaattatttagtttcttacctaatgaagcatctgacacctgatgatcctatgaataacaacaaacattttatgcatttgaaatcttataagaaaaaatatatatgaaaagtattgtgcctgatgtatcatattaaagaaagtatttttaaatgcatacttttttggaaattatttgccaaatgctggcccaaagggatataaattttgtttctacgtaacctgtagaatcgtcaagaattgttcccgttttggggcaatctttttctctcctggttaaatggggctgttgatcattttctctacgtaagggaatttattgattaagtttaattaatttgatatagactgtcatgtagtgatgtagtgctatactgtagtcggaagtttttcttaaaagcaaagagcaaaaatgcaaagttttatttgtaaaagctgaggacccttggggatggattaggtttgccgatgatcctaaaagtaagcaaactgtatgacaagactactattgcaaatgaaggatatttatagctaaactgcgcagcacaaagaagttttatattgtgagttatagttggttcagaaaacagtttgtactctccctggcccaggaaggcacacagacaaaaatgtcggccacttttactcaaatacagcccaagcacagacagtcaggttcgtgatcatcaccaacatctgataaaatctcattgaaggcaatgccatcacagctttgctcaattactacgaggaagagacaacaagcatctttcgtgttgtctcgtctgattggaggctgaatagtagatggaatggggggacagtgtgcctggtgtgaggaagacgtaagatccccaatttggaaagcatgcccccctcccttttagtagaagcccatggttgccctttgccaaactggggaggaggcaatgagccttggtggaaggaacctctctgttgatatttaaagaagtgagggctgtgggtattcattgttagaaatgccaatttcactttgaaaccatagtccaagtctctaggttggtagaagggaaaggaaggaagtggtcccagtgattctaggtctggttgggaaacttctgcctcatgactctgtcctttgagtcctttggacagcagcacaaaacataacaatttttatttttaaacagacccattctttttgatcccacaggagctgtggttgggtcggccgtagccccgggatgtggtttaagtggattactgcctagctgagccaaaatgtttgcttgtacctgttggaccactacagcaaaccgctgcttacagtgcattgtgtatttctgtagtactgttttgcattttccatagagacagaaaactttgcaagtcaatcactgttgttcccatggtactgtaagaaaaaaaaaaaggaaaaagaaaaaaaaaaagaaaaccagccaatcattgcgtgtacagagctaaaaattgtaattaatagagcctgttgggaaaaaaaagaaaacaactgttgcctttttttcttgtataaaagagaatttatgacaaaatttagctgtgaggaatgtgatacgtgtttatatttctgaatatggaacaaattgattcatggggatatattttaatgtaaactaaatcaggtatgtaaagttgttttaaaatgggagactatataagtaattctctaaagctttagttggtttgaatatcatcatttcctccatggtgagcctgcttgtgaattattaagcacttgtttgcattctctgttcttcactcatttatttcttgcagtgtgctatggacttaatgctctttctgtattgatgaaaagcagtatgtgggccaatctttttataaaacactatgcatatataaatattacattgttcatagctttatttgacttatgggtttatacataacattagaatgagtagctgtagttgtgtggacatttataaaacaagttcctttcctggaacagacacaatatacattctgtagctaaaaaggagggaaaagtctgtgaatgctatttttattattaaagttttccatacaaagcatacattgagctgta

SEQ ID NO: 152654 - DNA, 6398 bp, Homo sapiens
  Payload ID: 10039
  Gene Symbol: MAGI1
  Gene Name: membrane associated guanylate kinase, WW and PDZ domain containing 1
  ENST ID: ENST00000611645
  CDS Start-End: 611-3553
aggaggaaggctgaacaaggacctgcgacattttctcaatcagcgattccagaaggggtctcctgatcatgagctccagcagaccataagggataacctttaccgccatgctgtgccttgcacaacccgatctcccagagaaggagaagtgcctggcgtggactataactttctgactgtgaaggagttcttggacctcgagcagagtgggactcttctggaagtcggcacctatgaaggaaactattatgggacacccaagcctcctagccagccagtcagtgggaaagtgatcacgacggatgccttgcacagccttcagtctggctctaagcagtcgaccccgaagcgaaccaagtcctacaatgatatgcaaaatgctggcatagtccacgcggagaatgaggaggaggatgacgttcctgaaatgaacagcagctttacagccgattctggtgaacaagaggagcacactctccaagaaacagcattaccacctgtgaatagtagcatcatcgctgctcccatcacggacccttctcagaagttccctcaatacctacctctttctgcagaggataatttaggtcctctacctgaaaactgggagatggcctatactgaaaatggagaagtctattttatagaccataacacgaaaacaacatcttggttagaccctcggtgcctaaacaagcagcagaagccactggaagagtgtgaagatgatgaaggggtacacaccgaggagctggacagtgaactagaactgcctgctggttgggaaaagattgaagaccctgtctatggtatctactatgtagaccacatcaacaggaagacacaatatgagaacccggttctagaagccaaacggaagaagcagcttgagcagcagcagcagcagcaacagcagcagcaacagcagcagcagcagcagcagcagcagcagacagaagaatggacagaagatcactcagcccttgtgcctcctgttattccaaaccaccctccaagcaatccagagccagccagagaagttccacttcagggcaaacccttttttacacgaaacccttctgagttgaaaggcaagttcattcacacaaagctgcggaaaagcagtcgtggctttggcttcacggtggttggaggggatgaacctgatgagtttctccagatcaagagcttggtcctagatggtcctgctgcattggatggcaagatggaaacaggggatgtgattgtaagtgtgaatgacacctgtgttttgggacacacacatgctcaagttgtgaagatcttccagtccatccccattggtgccagcgtggaccttgaactctgccgaggttatccattgccttttgatccagatgaccccaatacaagtttagtgacctcggtagccattttggataaagaaccaattattgtgaatgggcaagagacctatgattcaccagctagccacagtagtaaaacaggcaaagtcaatggcatgaaggatgccaggccaagcagcccagcggacgtggcttcaaatagttctcatggttatcctaatgacactgtttctttggcttcctccatagccactcagccagaactcataactgttcatattgtcaaagggccaatgggctttggttttactatcgcagacagtcctggtgggggtggccaaagagtgaaacagattgttgacagcccaaggtgccgaggcctgaaagaaggggatctcatagtggaagttaataagaagaacgtgcaggccctaactcacaaccaagtggtggatatgctggttgagtgtcctaagggaagtgaggtcacattgttggtgcaacgaggagggctgccagttcccaagaagagcccaaagtcgcaaccactggaaaggaaagacagccagaatagttctcagcacagtgtttccagccaccgaagcctgcacacagcatccccaagccacagcacacaggtgctccccgagttcccacctgcagaggcccaagctccagatcaaactgacagctctggccagaaaaaaccagatccttttaaaatctgggcccagtccaggagcatgtatgaaaaccgacctatgtcaccttcacctgcgtcgggattgagcaagggtgagagagagagagaaatcaattccacgaattttggagaatgtccgattccagattaccaggaacaggacatcttcctctggagaaaagagactggatttggatttaggattctgggtggaaatgaaccaggggaacctatttatattggtcacatcgtaccactgggtgctgctgatactgacggccgcctgaggtctggagatgaattaatctgtgtggatgggacgccagtaattggaaaatcacaccagcttgtggtccagcttatgcaacaagctgccaagcaaggccacgtcaatctcacggtgcggcgtaaagtggtttttgcggtgcccaaaaccgagaacgaggtgccctcgccagcctcctctcatcacagtagcaaccagccggcctcgctgacagaagagaagcgcactccgcagggcagccagaactcgctgaacacggtgagctcgggcagcggcagcaccagcggcatcggcagtggcggcggcgggggcagcggcgtggtcagcaccgtggtgcagccctacgacgtggagatccggcgcggggagaacgagggcttcggcttcgtcatcgtgtcctcggtgagcaggcccgaagcaggcacgacctttggcaatgcatgtgtggctatgcctcacaaaataggtcggattattgaggggagccctgctgaccgctgtggcaagctgaaagtaggagaccggatcttggcagtaaatggatgttccatcaccaacaaatcccattcagacattgtgaacctaatcaaggaagcgggaaacacagttaccctccgcatcattcctggggatgagtcctcgaatgccaccttgctgaccaatgcagagaagattgccaccatcaccaccacacacaccccttctcagcaagggacccaggagacaaggaataccaccaaaccaaagcaggaatctcaatttgagttcaaagcaccccaagcaacacaggagcaagatttttacactgtggaactggaaagaggagccaagggatttggctttagccttcgaggaggccgagagtataacatggacctctatgttctgcgcttagcagaggacggtcctgcggagaggtgtggaaagatgaggattggtgatgaaattttagagatcaatggtgagaccaccaaaaacatgaagcattctcgagctatagaactgattaagaatggtggccgcagagttcgtctgtttctgaagcggggagacggctcagtaccagaatatgcgatgatacctcctaatatcgctgcatgtatgagaaatgaaaagctcggggaggcttgcttctaccttatgggccataatcaaactacgaccccagcagcgaccgccacggccccgccaccggtccacaaggtgttccggaagtgagggccgggcccgaccgccggcagcatccgtcattggagtccagttacccacccgatcttcacaaatcatcaccacatggggaaaagcgggcacacgcaagggatccgaaaggcagcagagagtatagcagacaacccaatgaacaccacacctggaatgggacttcgaggaaacccgacagcggggcatgccgacccaaggaccgggcgccggagggacggagggacgcgcaggccgagcgcgcggcagccgccaacggccccaagaggcggtccccagagaagcggagggagggcacccgcagcgccgacaacactttggagaggagggagaagcacgagaagagacgagacgtctctccggagcggaggcgagagcggtcacccacccgcaggagagacggctcccccagccggcggagacggtctctggagagactcctggagcagaggaggtcccccgagcgcaggagagggggctcgcccgagcgcagggccaagtccaccgaccggaggcgcgcacgctcccccgagcgcaggagagagcggtccctggacaaaaggaacagagaggacagagccagccaccgagaaagggaagaggcgaatctgaaacaggatgccggcagaagttccagacatcccccggagcagagaaggcgaccttacaaagaatgtagcaccgacctcagtatctgagacgctgagtcacattccaacctttaccgtgtcaaaggttctaagaggaaagtcacaaacctgaaattatttagtttcttacctaatgaagcatctgacacctgatgatcctatgaataacaacaaacattttatgcatttgaaatcttataagaaaaaatatatatgaaaagtattgtgcctgatgtatcatattaaagaaagtatttttaaatgcatacttttttggaaattatttgccaaatgctggcccaaagggatataaattttgtttctacgtaacctgtagaatcgtcaagaattgttcccgttttggggcaatctttttctctcctggttaaatggggctgttgatcattttctctacgtaagggaatttattgattaagtttaattaatttgatatagactgtcatgtagtgatgtagtgctatactgtagtcggaagtttttcttaaaagcaaagagcaaaaatgcaaagttttatttgtaaaagctgaggacccttggggatggattaggtttgccgatgatcctaaaagtaagcaaactgtatgacaagactactattgcaaatgaaggatatttatagctaaactgcgcagcacaaagaagttttatattgtgagttatagttggttcagaaaacagtttgtactctccctggcccaggaaggcacacagacaaaaatgtcggccacttttactcaaatacagcccaagcacagacagtcaggttcgtgatcatcaccaacatctgataaaatctcattgaaggcaatgccatcacagctttgctcaattactacgaggaagagacaacaagcatctttcgtgttgtctcgtctgattggaggctgaatagtagatggaatggggggacagtgtgcctggtgtgaggaagacgtaagatccccaatttggaaagcatgcccccctcccttttagtagaagcccatggttgccctttgccaaactggggaggaggcaatgagccttggtggaaggaacctctctgttgatatttaaagaagtgagggctgtgggtattcattgttagaaatgccaatttcactttgaaaccatagtccaagtctctaggttggtagaagggaaaggaaggaagtggtcccagtgattctaggtctggttgggaaacttctgcctcatgactctgtcctttgagtcctttggacagcagcacaaaacataacaatttttatttttaaacagacccattctttttgatcccacaggagctgtggttgggtcggccgtagccccgggatgtggtttaagtggattactgcctagctgagccaaaatgtttgcttgtacctgttggaccactacagcaaaccgctgcttacagtgcattgtgtatttctgtagtactgttttgcattttccatagagacagaaaactttgcaagtcaatcactgttgttcccatggtactgtaagaaaaaaaaaaaggaaaaagaaaaaaaaaaagaaaaccagccaatcattgcgtgtacagagctaaaaattgtaattaatagagcctgttgggaaaaaaaagaaaacaactgttgcctttttttcttgtataaaagagaatttatgacaaaatttagctgtgaggaatgtgatacgtgtttatatttctgaatatggaacaaattgattcatggggatatattttaatgtaaactaaatcaggtatgtaaagttgttttaaaatgggagactatataagtaattctctaaagctttagttggtttgaatatcatcatttcctccatggtgagcctgcttgtgaattattaagcacttgtttgcattctctgttcttcactcatttatttcttgcagtgtgctatggacttaatgctctttctgtattgatgaaaagcagtatgtgggccaatctttttataaaacactatgcatatataaatattacattgttcatagctttatttgacttatgggtttatacataacattagaatgagtagctgtagttgtgtggacatttataaaacaagttcctttcctggaacagacacaatatacattctgtagctaaaaaggagggaaaagtctgtgaatgctatttttattattaaagttttccatacaaagcatacattgagctgta

SEQ ID NO: 152655 - DNA, 6225 bp, Homo sapiens; identical to SEQ ID NO: 152653
  Payload ID: 10039
  Gene Symbol: MAGI1
  Gene Name: membrane associated guanylate kinase, WW and PDZ domain containing 1
  ENST ID: ENST00000635672
  CDS Start-End: 611-4078

SEQ ID NO: 152656 - DNA, 3555 bp, Homo sapiens; identical to SEQ ID NO: 152652
  Payload ID: 10039
  Gene Symbol: MAGI1
  Gene Name: membrane associated guanylate kinase, WW and PDZ domain containing 1
  ENST ID: ENST00000635471
  CDS Start-End: 1-3483

SEQ ID NO: 152657 - DNA, 4193 bp, Homo sapiens; identical to SEQ ID NO: 152648
  Payload ID: 10039
  Gene Symbol: MAGI1
  Gene Name: membrane associated guanylate kinase, WW and PDZ domain containing 1
  ENST ID: ENST00000635181
  CDS Start-End: 1-3396

SEQ ID NO: 152658 - DNA, 4791 bp, Homo sapiens; identical to SEQ ID NO: 152650
  Payload ID: 10039
  Gene Symbol: MAGI1
  Gene Name: membrane associated guanylate kinase, WW and PDZ domain containing 1
  ENST ID: ENST00000635378
  CDS Start-End: 243-4013

SEQ ID NO: 152659 - DNA, 7415 bp, Homo sapiens; identical to SEQ ID NO: 152645
  Payload ID: 10039
  Gene Symbol: MAGI1
  Gene Name: membrane associated guanylate kinase, WW and PDZ domain containing 1
  ENST ID: ENST00000634774
  CDS Start-End: 1-3864

SEQ ID NO: 152660 - DNA, 4389 bp, Homo sapiens; identical to SEQ ID NO: 152646
  Payload ID: 10039
  Gene Symbol: MAGI1
  Gene Name: membrane associated guanylate kinase, WW and PDZ domain containing 1
  ENST ID: ENST00000634409
  CDS Start-End: 1-4389

SEQ ID NO: 152661 - DNA, 556 bp, Homo sapiens; identical to SEQ ID NO: 152647
  Payload ID: 10039
  Gene Symbol: MAGI1
  Gene Name: membrane associated guanylate kinase, WW and PDZ domain containing 1
  ENST ID: ENST00000634863
  CDS Start-End: 1-556

SEQ ID NO: 152662 - DNA, 3045 bp, Homo sapiens; identical to SEQ ID NO: 152651
  Payload ID: 10039
  Gene Symbol: MAGI1
  Gene Name: membrane associated guanylate kinase, WW and PDZ domain containing 1
  ENST ID: ENST00000634578
  CDS Start-End: 1-3045

SEQ ID NO: 152663 - DNA, 6398 bp, Homo sapiens; identical to SEQ ID NO: 152654
  Payload ID: 10039
  Gene Symbol: MAGI1
  Gene Name: membrane associated guanylate kinase, WW and PDZ domain containing 1
  ENST ID: ENST00000635039
  CDS Start-End: 611-3553

SEQ ID NO: 152664 - DNA, 3694 bp, Homo sapiens; identical to SEQ ID NO: 152649
  Payload ID: 10039
  Gene Symbol: MAGI1
  Gene Name: membrane associated guanylate kinase, WW and PDZ domain containing 1
  ENST ID: ENST00000634856
  CDS Start-End: 1-3410

SEQ ID NO: 152665 - DNA, 6880 bp, Homo sapiens
  Payload ID: 10040
  Gene Symbol: MAGI2
  Gene Name: membrane associated guanylate kinase, WW and PDZ domain containing 2
  Uniprot ID: Q86UL8
  ENST ID: ENST00000354212
  CDS Start-End: 255-4622
agccttgagtgtcattcaagggacagcacaacctcatccaagctctcctacctctgcccagccgtccctctcatcctccccattcctcgtccacactccatccaaagaagagggaaagcaccgaatagaggggggcgaaggcaaagtctgctgttcttccccctgggcccccttgctcctccatcctcattctctcaccaccagcccccctaaccccaaggagcccaggaactgaggcgactcgccccactgccatgtccaaaagcttgaaaaagaaaagccactggactagcaaagtccatgagagtgtcattggcaggaacccggagggccagctgggctttgaactgaaggggggcgccgagaatggacagttcccctacctgggggaggtgaagcccggcaaggtggcctatgagagcggcagcaaattggtgtcggaggagctgctgctggaggtgaacgagacccccgtggcggggctcaccatcagggacgtgctggccgtgatcaaacactgcaaggaccccctccggctcaagtgtgtcaagcaaggaggaattgttgataaagaccttcgtcactacctcaacttacgatttcaaaagggttctgtggaccatgagcttcagcaaatcattcgtgacaacctctacctccgcacggtgccatgcaccacaaggccacataaggagggtgaggtccctggagtggattatattttcatcactgttgaagattttatggaattggagaaaagtggtgctctcctagaaagtgggacttatgaagacaattactacggtaccccaaagccgccagcagaaccagcaccattattgttaaatgtaacagaccagatacttccaggagccactccaagtgctgaaggaaaacggaagaggaataaatcagtgagcaacatggagaaagccagtatagagcctcctgaggaggaagaggaagagaggcctgtggtcaatggaaatggagtagtagtaacaccagaatccagtgaacatgaagacaaaagtgcaggtgcctcaggggagatgccctcccagccttatcctgcaccagtgtacagtcagcctgaggagctgaaggagcagatggatgacacaaagccaactaaacctgaagacaatgaggaaccagacccattgcctgataactgggaaatggcctatacagagaagggcgaagtctacttcattgaccataacacaaagacaacatcatggctggatccacgacttgcgaaaaaggctaaacctccagaagagtgcaaagaaaatgagcttccatatggctgggaaaaaatcgatgatcccatttatggcacttattatgttgaccacataaatagaagaacacagtttgaaaatcctgtcctggaagcaaaaaggaagctacagcaacataacatgccccacacagaacttggaacaaagcccctgcaggccccaggtttccgagaaaaaccactcttcacccgggatgcatcccagttgaagggaacattcctcagcaccaccctaaaaaagagcaacatgggctttggatttaccatcattggtggagacgagcctgatgagtttctgcaggtgaaaagtgtgattccggatgggcctgcagcacaggatggaaaaatggaaacaggtgatgtcattgtctatattaatgaagtttgtgtccttggacacactcatgcagatgttgtcaaacttttccagtctgttcctattggtcagagtgtcaacctggtgttgtgtcgtggctaccctttgccctttgatcctgaagaccctgctaacagcatggtgccaccccttgcaataatggagaggccacctccagtgatggtcaatggaagacacaactatgaaacatatttggagtacatttctcggacctcacagtcagttccagatataacagatcggccgcctcattctctgcactccatgccaactgatggtcagctagacggcacgtatccaccgcccgtccatgatgacaatgtgtctatggcttcatctggggccacccaagctgaacttatgaccttaaccattgtgaaaggtgcccagggcttcggcttcactattgccgacagtcctacaggacagcgggtgaaacaaatacttgacattcagggatgccctggcctgtgtgaaggcgacctcattgttgagatcaaccagcagaatgtacagaacctgagccatacagaagtagtggatatacttaaggactgtcccattggaagtgaaacttctttgattatccatcgaggaggtttcttttctccatggaaaactccaaagcctataatggaccgatgggagaatcaaggcagtcctcaaacgagtttatctgctccggccataccgcagaacctgcccttcccacctgcccttcacaggagctcctttcctgactcaacagaggcctttgacccacggaagcctgatccatatgagctctacgagaaatctagggccatttatgaaagtaggcaacaagtgccacccaggaccagttttcgaatggattcctctggtccagattataaggaattggatgttcatcttcggaggatggagtctggatttggcttcagaatcctcgggggagatgagcctggacagcctattttgattggagctgtcattgccatgggctcagccgacagagatggccgccttcacccaggagatgagcttgtgtatgttgatgggattccagtagccggcaaaacccaccgctatgtcatcgacctcatgcaccacgcagcccgcaatgggcaggtcaacctcactgtgagaagaaaggtgctatgtggaggggagccctgcccagagaacgggagaagtccaggctctgtatccacccaccacagctctccacgcagtgactacgcaacctacaccaacagcaaccacgctgcccccagtagcaatgcctctccccctgaaggcttcgcctcccacagcctgcagaccagtgatgtggtcattcaccgcaaagagaatgagggcttcggctttgtcatcatcagctccctgaacaggcctgagtctggatccactataactgtgccccataaaatcggacgcatcattgatgggagtcctgcagatcgctgtgcaaaactaaaagtgggagaccggatcctagcagtgaatggccagtctatcatcaacatgcctcacgctgacatcgtgaagctcatcaaggatgcaggtcttagtgtcacccttcgcatcattcctcaggaggagctcaacagccccacctcggcacccagctcagagaagcagagtcccatggcgcagcagagtcccctggcacagcagagtcccctggcccagccaagcccagccacccccaacagccccatcgcccagccagcaccacctcaaccacttcagctgcaaggacacgaaaatagttacaggtcggaagtgaaagcaaggcaagatgtgaaaccagacatccgacagcctccattcacagactacaggcagcccccgctggattacaggcaacccccaggaggggactaccagcagcccccacccttggactacaggcagcctcccctactggactacaggcagcactcccccgacaccaggcagtaccctctgtcggactacagacaaccccaggattttgattatttcactgtggacatggagaaaggagccaaaggatttggattcagcattcgtggaggaagggaatacaaaatggatttgtatgtgttgagactggcagaagatggaccagcaataaggaatgggaggatgagggtaggagatcaaatcattgaaatcaatggggaaagcacaagggacatgacacatgccagagcaatagaactcatcaaatctggaggaagacgagtgaggctgctgctcaagagaggcacgggacaggtcccagaatatgacgaacccgccccctggagttctcccgctgccgccgccccaggtctgccggaagtaggcgtctccctggacgacggcctcgctccattctctccatcacatccagccccaccctccgacccttcccaccagataagcccaggcccaacttgggatatcaaacgggaacacgacgttaggaaaccaaaggagctttcagcctgcggccagaagaagcagcgcctcggggagcagagggagcgctcggcgagtccgcagagggccgcgcggccgaggctcgaggaggcgcccggcggccaggggcggcccgaggccggcaggcccgcctcggaggccagggcgcccgggctcgcggcggcagacgcggcggacgcggcgcgggcgggcgggaaggaggcgccccgtgcggcggcgggctccgagctctgccggcgcgaaggcccgggggctgcgccggcgtttgccggcccgggcggcggcggcagcggcgcgctggaggccgagggcagggcgggtgcgcgcgcgggtccccggccgggcccgcgacccccggggggcgccccggcgcgcaaggccgccgtcgcgccggggccctggaaggtgccgggttctgacaagctgcccagcgtcctcaaacccggcgcctcggccgccagcagatgagccgcgcggccacggccaacccgcccgccccggcgcaggcagttcttcttaggttccgtctcacggcgttttaatttattttcactgtcacacgcatagatccacgaggcaccaaggcctgggagcatcgacgtgaagtcccacgtgtccggtgtgcttgggcggcatcgcatcaacgcgcagacctaaactgatcctaaagcccccggttcccttgtgggggctttggcagctatggaagaaccaaaataacgtgaagaacatcacagagagacagtgcagtgtagctttagtttaagaaaaaaaaatattcctccccactgcatgaaggacttggatgtcatccaaactttatatcaagaaacaggacaaagttaagagcaatcacaaactggaatatcgccttaaaaatcaaactgcacggagcaagctgaaactgagacaagattatatcttttaattgatctaaagcgttgtaaataaattgttctcgacatatctagacaggggttaaagggtttctttgacacattcggaaccgttcacccatgacatgtttccatggctcacccttggcatccatcctcggtgttagcagcagcgttccctgcctcctgcaggatgacttagaaatctagtgagtttcttggtgtgatgccatttttattgccctttctgtgatcaaatcatatttctgtacattttcagtggtagaaaaaaaaggttttaaaaattgtatcctagggaacagtttgccataagtcagaattttgcagtttagctcatagatcttaattggtttttctctaaaatatgaattttataattgaaggaccacaatttgtttaatcaagataggcaacgctgcagttcctttatgaagaggcttttctgtcgtcccaggctagcagagatggatagcttctttgtcagcaatgtgatttcacttattttattgtcttattttaaaccctgtctccatgacttcatttgcactttgacagagcagaggcagagtatttgtcttatatttctcagattataatattaaaaaattacaatcaatttattttcattaaagaacgtgagtctttttagcattcctttctgcttatccttctttccttaccctttgtccttttgtttccattagttttctttcgtcttgtattccttgccactttattttgttagcaacttctagatgtttatcttcatggatctatgattgacctcctagtaaaattctaagtcttgcctttcttccctgctgttttagcatttctttgtaaaatgttagcttcaattaattagccattggtacttactgtagctacacatattaaaaggcaaagtgtttctgaaggcaatttctttttaatatgcccgaatgaatgaggcttcatcctttccatattcttactctttacaggagttcaaatgcaaataagctccacctccctgcacttgtagtctaaaaagtaaaaggggcgatcaggtccatctcaaaggtcacacgtaatagcctccctgggctgatcattccctctccttgtaattgcagtatcctgagtagcagtttaattttcatcaaacatcggagtagtttagttgtttgacaggaggagaataaggctgaaagcctcaagtgaaggatcttgcagcttgtaaaagcaatttccaaaaatgaaacccattcatcgtaaacaaaagcacaaacacttgtagcagtttataatgcttttggtttaatctcaattagtctttctcccctggactagaaatccagtatagtttgccattaatttattgaatctggttttggacaatgcttctgtagtgtagctgcacgtcctggtactgtatcctctgactttattttccatgtattacaaaaggaaaaaaaaattgagattacactggcataaactctagtttgcacagttcacagctactacttgtgcagtaattgctttatgcggctgtaatccataacctgtgaagacagcacatcatctaaatcccattccaaataatatttgtgtagtgttagctgtgaatttaccctgtacagctgtatctctataaatataattccatgtattaatagtcacagaaagactgtaagtgagcaactatttttatgaaacgtaccactatggataaattaacttttacagaaatcttgtttactgtatgatattctaaaacactgtcaaataaaatatatatccaaaaatcttttctttttccaacta

SEQ ID NO: 152666 - DNA, 6800 bp, Homo sapiens
  Payload ID: 10040
  Gene Symbol: MAGI2
  Gene Name: membrane associated guanylate kinase, WW and PDZ domain containing 2
  Uniprot ID: Q86UL8
  ENST ID: ENST00000419488
  CDS Start-End: 236-4561
gggacagcacaacctcatccaagctctcctacctctgcccagccgtccctctcatcctccccattcctcgtccacactccatccaaagaagagggaaagcaccgaatagaggggggcgaaggcaaagtctgctgttcttccccctgggcccccttgctcctccatcctcattctctcaccaccagcccccctaaccccaaggagcccaggaactgaggcgactcgccccactgccatgtccaaaagcttgaaaaagaaaagccactggactagcaaagtccatgagagtgtcattggcaggaacccggagggccagctgggctttgaactgaaggggggcgccgagaatggacagttcccctacctgggggaggtgaagcccggcaaggtggcctatgagagcggcagcaaattggtgtcggaggagctgctgctggaggtgaacgagacccccgtggcggggctcaccatcagggacgtgctggccgtgatcaaacactgcaaggaccccctccggctcaagtgtgtcaagcaaggaggaattgttgataaagaccttcgtcactacctcaacttacgatttcaaaagggttctgtggaccatgagcttcagcaaatcattcgtgacaacctctacctccgcacggtgccatgcaccacaaggccacataaggagggtgaggtccctggagtggattatattttcatcactgttgaagattttatggaattggagaaaagtggtgctctcctagaaagtgggacttatgaagacaattactacggtaccccaaagccgccagcagaaccagcaccattattgttaaatgtaacagaccagatacttccaggagccactccaagtgctgaaggaaaacggaagaggaataaatcagtgagcaacatggagaaagccagtatagagcctcctgaggaggaagaggaagagaggcctgtggtcaatggaaatggagtagtagtaacaccagaatccagtgaacatgaagacaaaagtgcaggtgcctcaggggagatgccctcccagccttatcctgcaccagtgtacagtcagcctgaggagctgaaggagcagatggatgacacaaagccaactaaacctgaagacaatgaggaaccagacccattgcctgataactgggaaatggcctatacagagaagggcgaagtctacttcattgaccataacacaaagacaacatcatggctggatccacgacttgcgaaaaaggctaaacctccagaagagtgcaaagaaaatgagcttccatatggctgggaaaaaatcgatgatcccatttatggcacttattatgttgaccacataaatagaagaacacagtttgaaaatcctgtcctggaagcaaaaaggaagctacagcaacataacatgccccacacagaacttggaacaaagcccctgcaggccccaggtttccgagaaaaaccactcttcacccgggatgcatcccagttgaagggaacattcctcagcaccaccctaaaaaagagcaacatgggctttggatttaccatcattggtggagacgagcctgatgagtttctgcaggtgaaaagtgtgattccggatgggcctgcagcacaggatggaaaaatggaaacaggtgatgtcattgtctatattaatgaagtttgtgtccttggacacactcatgcagatgttgtcaaacttttccagtctgttcctattggtcagagtgtcaacctggtgttgtgtcgtggctaccctttgccctttgatcctgaagaccctgctaacagcatggtgccaccccttgcaataatggagaggccacctccagtgatggtcaatggaagacacaactatgaaacatatttggagtacatttctcggacctcacagtcagttccagatataacagatcggccgcctcattctctgcactccatgccaactgatggtcagctagacggcacgtatccaccgcccgtccatgatgacaatgtgtctatggcttcatctggggccacccaagctgaacttatgaccttaaccattgtgaaaggtgcccagggcttcggcttcactattgccgacagtcctacaggacagcgggtgaaacaaatacttgacattcagggatgccctggcctgtgtgaaggcgacctcattgttgagatcaaccagcagaatgtacagaacctgagccatacagaagtagtggatatacttaaggactgtcccattggaagtgaaacttctttgattatccatcgaggaggtttcttttctccatggaaaactccaaagcctataatggaccgatgggagaatcaaggcagtcctcaaacgagtttatctgctccggccataccgcagaacctgcccttcccacctgcccttcacaggagctcctttcctgactcaacagaggcctttgacccacggaagcctgatccatatgagctctacgagaaatctagggccatttatgaaagtaggcgtccagattataaggaattggatgttcatcttcggaggatggagtctggatttggcttcagaatcctcgggggagatgagcctggacagcctattttgattggagctgtcattgccatgggctcagccgacagagatggccgccttcacccaggagatgagcttgtgtatgttgatgggattccagtagccggcaaaacccaccgctatgtcatcgacctcatgcaccacgcagcccgcaatgggcaggtcaacctcactgtgagaagaaaggtgctatgtggaggggagccctgcccagagaacgggagaagtccaggctctgtatccacccaccacagctctccacgcagtgactacgcaacctacaccaacagcaaccacgctgcccccagtagcaatgcctctccccctgaaggcttcgcctcccacagcctgcagaccagtgatgtggtcattcaccgcaaagagaatgagggcttcggctttgtcatcatcagctccctgaacaggcctgagtctggatccactataactgtgccccataaaatcggacgcatcattgatgggagtcctgcagatcgctgtgcaaaactaaaagtgggagaccggatcctagcagtgaatggccagtctatcatcaacatgcctcacgctgacatcgtgaagctcatcaaggatgcaggtcttagtgtcacccttcgcatcattcctcaggaggagctcaacagccccacctcggcacccagctcagagaagcagagtcccatggcgcagcagagtcccctggcacagcagagtcccctggcccagccaagcccagccacccccaacagccccatcgcccagccagcaccacctcaaccacttcagctgcaaggacacgaaaatagttacaggtcggaagtgaaagcaaggcaagatgtgaaaccagacatccgacagcctccattcacagactacaggcagcccccgctggattacaggcaacccccaggaggggactaccagcagcccccacccttggactacaggcagcctcccctactggactacaggcagcactcccccgacaccaggcagtaccctctgtcggactacagacaaccccaggattttgattatttcactgtggacatggagaaaggagccaaaggatttggattcagcattcgtggaggaagggaatacaaaatggatttgtatgtgttgagactggcagaagatggaccagcaataaggaatgggaggatgagggtaggagatcaaatcattgaaatcaatggggaaagcacaagggacatgacacatgccagagcaatagaactcatcaaatctggaggaagacgagtgaggctgctgctcaagagaggcacgggacaggtcccagaatatgacgaacccgccccctggagttctcccgctgccgccgccccaggtctgccggaagtaggcgtctccctggacgacggcctcgctccattctctccatcacatccagccccaccctccgacccttcccaccagataagcccaggcccaacttgggatatcaaacgggaacacgacgttaggaaaccaaaggagctttcagcctgcggccagaagaagcagcgcctcggggagcagagggagcgctcggcgagtccgcagagggccgcgcggccgaggctcgaggaggcgcccggcggccaggggcggcccgaggccggcaggcccgcctcggaggccagggcgcccgggctcgcggcggcagacgcggcggacgcggcgcgggcgggcgggaaggaggcgccccgtgcggcggcgggctccgagctctgccggcgcgaaggcccgggggctgcgccggcgtttgccggcccgggcggcggcggcagcggcgcgctggaggccgagggcagggcgggtgcgcgcgcgggtccccggccgggcccgcgacccccggggggcgccccggcgcgcaaggccgccgtcgcgccggggccctggaaggtgccgggttctgacaagctgcccagcgtcctcaaacccggcgcctcggccgccagcagatgagccgcgcggccacggccaacccgcccgccccggcgcaggcagttcttcttaggttccgtctcacggcgttttaatttattttcactgtcacacgcatagatccacgaggcaccaaggcctgggagcatcgacgtgaagtcccacgtgtccggtgtgcttgggcggcatcgcatcaacgcgcagacctaaactgatcctaaagcccccggttcccttgtgggggctttggcagctatggaagaaccaaaataacgtgaagaacatcacagagagacagtgcagtgtagctttagtttaagaaaaaaaaatattcctccccactgcatgaaggacttggatgtcatccaaactttatatcaagaaacaggacaaagttaagagcaatcacaaactggaatatcgccttaaaaatcaaactgcacggagcaagctgaaactgagacaagattatatcttttaattgatctaaagcgttgtaaataaattgttctcgacatatctagacaggggttaaagggtttctttgacacattcggaaccgttcacccatgacatgtttccatggctcacccttggcatccatcctcggtgttagcagcagcgttccctgcctcctgcaggatgacttagaaatctagtgagtttcttggtgtgatgccatttttattgccctttctgtgatcaaatcatatttctgtacattttcagtggtagaaaaaaaaggttttaaaaattgtatcctagggaacagtttgccataagtcagaattttgcagtttagctcatagatcttaattggtttttctctaaaatatgaattttataattgaaggaccacaatttgtttaatcaagataggcaacgctgcagttcctttatgaagaggcttttctgtcgtcccaggctagcagagatggatagcttctttgtcagcaatgtgatttcacttattttattgtcttattttaaaccctgtctccatgacttcatttgcactttgacagagcagaggcagagtatttgtcttatatttctcagattataatattaaaaaattacaatcaatttattttcattaaagaacgtgagtctttttagcattcctttctgcttatccttctttccttaccctttgtccttttgtttccattagttttctttcgtcttgtattccttgccactttattttgttagcaacttctagatgtttatcttcatggatctatgattgacctcctagtaaaattctaagtcttgcctttcttccctgctgttttagcatttctttgtaaaatgttagcttcaattaattagccattggtacttactgtagctacacatattaaaaggcaaagtgtttctgaaggcaatttctttttaatatgcccgaatgaatgaggcttcatcctttccatattcttactctttacaggagttcaaatgcaaataagctccacctccctgcacttgtagtctaaaaagtaaaaggggcgatcaggtccatctcaaaggtcacacgtaatagcctccctgggctgatcattccctctccttgtaattgcagtatcctgagtagcagtttaattttcatcaaacatcggagtagtttagttgtttgacaggaggagaataaggctgaaagcctcaagtgaaggatcttgcagcttgtaaaagcaatttccaaaaatgaaacccattcatcgtaaacaaaagcacaaacacttgtagcagtttataatgcttttggtttaatctcaattagtctttctcccctggactagaaatccagtatagtttgccattaatttattgaatctggttttggacaatgcttctgtagtgtagctgcacgtcctggtactgtatcctctgactttattttccatgtattacaaaaggaaaaaaaaattgagattacactggcataaactctagtttgcacagttcacagctactacttgtgcagtaattgctttatgcggctgtaatccataacctgtgaagacagcacatcatctaaatcccattccaaataatatttgtgtagtgttagctgtgaatttaccctgtacagctgtatctctataaatataattccatgtattaatagtcacagaaagactgtaagtgagcaactatttttatgaaacgtaccactatggataaattaacttttacagaaatcttgtttactgtatgatattctaaaacactgtcaaataaaatatatatccaaaaa

SEQ ID NO: 152667 - DNA, 4878 bp, Homo sapiens
  Payload ID: 10040
  Gene Symbol: MAGI2
  Gene Name: membrane associated guanylate kinase, WW and PDZ domain containing 2
  ENST ID: ENST00000522391
  CDS Start-End: 140-3991
aagcaccgaatagaggggggcgaaggcaaagtctgctgttcttccccctgggcccccttgctcctccatcctcattctctcaccaccagcccccctaaccccaaggagcccaggaactgaggcgactcgccccactgccatgtccaaaagcttgaaaaagaaaagccactggactagcaaagtccatgagagtgtcattggcaggaacccggagggccagctgggctttgaactgaaggggggcgccgagaatggacagttcccctacctgggggaggtgaagcccggcaaggtggcctatgagagcggcagcaaattggtgtcggaggagctgctgctggaggtgaacgagacccccgtggcggggctcaccatcagggacgtgctggccgtgatcaaacactgcaaggaccccctccggctcaagtgtgtcaagcaaggaggaattgttgataaagaccttcgtcactacctcaacttacgatttcaaaagggttctgtggaccatgagcttcagcaaatcattcgtgacaacctctacctccgcacggtgccatgcaccacaaggccacataaggagggtgaggtccctggagtggattatattttcatcactgttgaagattttatggaattggagaaaagtggtgctctcctagaaagtgggacttatgaagacaattactacggtaccccaaagccgccagcagaaccagcaccattattgttaaatgtaacagaccagatacttccaggagccactccaagtgctgaaggaaaacggaagaggaataaatcagtgagcaacatggagaaagccagtatagagcctcctgaggaggaagaggaagagaggcctgtggtcaatggaaatggagtagtagtaacaccagaatccagtgaacatgaagacaaaagtgcaggtgcctcaggggagatgccctcccagccttatcctgcaccagtgtacagtcagcctgaggagctgaaggagcagatggatgacacaaagccaactaaacctgaagacaatgaggaaccagacccattgcctgataactgggaaatggcctatacagagaagggcgaagtctacttcattgaccataacacaaagacaacatcatggctggatccacgacttgcgaaaaaggctaaacctccagaagagtgcaaagaaaatgagcttccatatggctgggaaaaaatcgatgatcccatttatggcacttattatgttgaccacataaatagaagaacacagtttgaaaatcctgtcctggaagcaaaaaggaagctacagcaacataacatgccccacacagaacttggaacaaagcccctgcaggccccaggtttccgagaaaaaccactcttcacccgggatgcatcccagttgaagggaacattcctcagcaccaccctaaaaaagagcaacatgggctttggatttaccatcattggtggagacgagcctgatgagtttctgcaggtgaaaagtgtgattccggatgggcctgcagcacaggatggaaaaatggaaacaggtgatgtcattgtctatattaatgaagtttgtgtccttggacacactcatgcagatgttgtcaaacttttccagtctgttcctattggtcagagtgtcaacctggtgttgtgtcgtggctaccctttgccctttgatcctgaagaccctgctaacagcatggtgccaccccttgcaataatggagaggccacctccagtgatggtcaatggaagacacaactatgaaacatatttggagtacatttctcggacctcacagtcagttccagatataacagatcggccgcctcattctctgcactccatgccaactgatggtcagctagacggcacgtatccaccgcccgtccatgatgacaatgtgtctatggcttcatctggggccacccaagctgaacttatgaccttaaccattgtgaaaggtgcccagggcttcggcttcactattgccgacagtcctacaggacagcgggtgaaacaaatacttgacattcagggatgccctggcctgtgtgaaggcgacctcattgttgagatcaaccagcagaatgtacagaacctgagccatacagaagtagtggatatacttaaggactgtcccattggaagtgaaacttctttgattatccatcgaggaggtttcttttctccatggaaaactccaaagcctataatggaccgatgggagaatcaaggcagtcctcaaacgagtttatctgctccggccataccgcagaacctgcccttcccacctgcccttcacaggagctcctttcctgactcaacagaggcctttgacccacggaagcctgatccatatgagctctacgagaaatctagggccatttatgaaagtaggcaacaagtgccacccaggaccagttttcgaatggattcctctggtccagattataaggaattggatgttcatcttcggaggatggagtctggatttggcttcagaatcctcgggggagatgagcctggacagcctattttgattggagctgtcattgccatgggctcagccgacagagatggccgccttcacccaggagatgagcttgtgtatgttgatgggattccagtagccggcaaaacccaccgctatgtcatcgacctcatgcaccacgcagcccgcaatgggcaggtcaacctcactgtgagaagaaaggtgctatgtggaggggagccctgcccagagaacgggagaagtccaggctctgtatccacccaccacagctctccacgcagtgactacgcaacctacaccaacagcaaccacgctgcccccagtagcaatgcctctccccctgaaggcttcgcctcccacagcctgcagaccagtgatgtggtcattcaccgcaaagagaatgagggcttcggctttgtcatcatcagctccctgaacaggcctgagtctggatccactataactgtgccccataaaatcggacgcatcattgatgggagtcctgcagatcgctgtgcaaaactaaaagtgggagaccggatcctagcagtgaatggccagtctatcatcaacatgcctcacgctgacatcgtgaagctcatcaaggatgcaggtcttagtgtcacccttcgcatcattcctcaggaggagctcaacagccccacctcggcacccagctcagagaagcagagtcccatggcgcagcagagtcccctggcacagcagagtcccctggcccagccaagcccagccacccccaacagccccatcgcccagccagcaccacctcaaccacttcagctgcaaggacacgaaaatagttacaggtcggaagtgaaagcaaggcaagatgtgaaaccagacatccgacagcctccattcacagactacaggcagcccccgctggattacaggcaacccccaggaggggactaccagcagcccccacccttggactacaggcagcctcccctactggactacaggcagcactcccccgacaccaggcagtaccctctgtcggactacagacaaccccaggattttgattatttcactgtggacatggagaaaggagccaaaggatttggattcagcattcgtggaggaagggaatacaaaatggatttgtatgtgttgagactggcagaagatggaccagcaataaggaatgggaggatgagggtaggagatcaaatcattgaaatcaatggggaaagcacaagggacatgacacatgccagagcaatagaactcatcaaatctggaggaagacgagtgaggctgctgctcaagagaggcacgggacaggtcccagaatatggaatggtaccttccagtctctccatgtgcatgaaaagtgacaagcatgggtccccatatttctacttattgggccaccctaaagacacgacgaacccgccccctggagttctcccgctgccgccgccccaggtctgccggaagtaggcgtctccctggacgacggcctcgctccattctctccatcacatccagccccaccctccgacccttcccaccagataagcccaggcccaacttgggatatcaaacgggaacacgacgttaggaaaccaaaggagctttcagcctgcggccagaagaagcagcgcctcggggagcagagggagcgctcggcgagtccgcagagggccgcgcggccgaggctcgaggaggcgcccggcggccaggggcggcccgaggccggcaggcccgcctcggaggccagggcgcccgggctcgcggcggcagacgcggcggacgcggcgcgggcgggcgggaaggaggcgccccgtgcggcggcgggctccgagctctgccggcgcgaaggcccgggggctgcgccggcgtttgccggcccgggcggcggcggcagcggcgcgctggaggccgagggcagggcgggtgcgcgcgcgggtccccggccgggcccgcgacccccggggggcgccccggcgcgcaaggccgccgtcgcgccggggccctggaaggtgccgggttctgacaagctgcccagcgtcctcaaacccggcgcctcggccgccagcagatgagccgcgcggccacggccaacccgcccgccccggcgcaggcagttcttcttaggttccgtctcacggcgttttaatttattttcactgtcacacgcatagatccacgaggcaccaaggcctgggagcatcgacgtgaagtcccacgtgtccggtgtgcttgggcggcatcgcatcaacgcgcagacctaaactgatcctaaagcccccggttcccttgtgggggctttggcagctatggaagaaccaaaataacgtgaagaacatcacagagagacagtgcag

SEQ ID NO: 152668 - DNA, 6146 bp, Homo sapiens
  Payload ID: 10040
  Gene Symbol: MAGI2
  Gene Name: membrane associated guanylate kinase, WW and PDZ domain containing 2
  ENST ID: ENST00000535697
  CDS Start-End: 1-3912
tcaggcaccacaaggccacataaggagggtgaggtccctggagtggattatattttcatcactgttgaagattttatggaattggagaaaagtggtgctctcctagaaagtgggacttatgaagacaattactacggtaccccaaagccgccagcagaaccagcaccattattgttaaatgtaacagaccagatacttccaggagccactccaagtgctgaaggaaaacggaagaggaataaatcagtgagcaacatggagaaagccagtatagagcctcctgaggaggaagaggaagagaggcctgtggtcaatggaaatggagtagtagtaacaccagaatccagtgaacatgaagacaaaagtgcaggtgcctcaggggagatgccctcccagccttatcctgcaccagtgtacagtcagcctgaggagctgaaggagcagatggatgacacaaagccaactaaacctgaagacaatgaggaaccagacccattgcctgataactgggaaatggcctatacagagaagggcgaagtctacttcattgaccataacacaaagacaacatcatggctggatccacgacttgcgaaaaaggctaaacctccagaagagtgcaaagaaaatgagcttccatatggctgggaaaaaatcgatgatcccatttatggcacttattatgttgaccacataaatagaagaacacagtttgaaaatcctgtcctggaagcaaaaaggaagctacagcaacataacatgccccacacagaacttggaacaaagcccctgcaggccccaggtttccgagaaaaaccactcttcacccgggatgcatcccagttgaagggaacattcctcagcaccaccctaaaaaagagcaacatgggctttggatttaccatcattggtggagacgagcctgatgagtttctgcaggtgaaaagtgtgattccggatgggcctgcagcacaggatggaaaaatggaaacaggtgatgtcattgtctatattaatgaagtttgtgtccttggacacactcatgcagatgttgtcaaacttttccagtctgttcctattggtcagagtgtcaacctggtgttgtgtcgtggctaccctttgccctttgatcctgaagaccctgctaacagcatggtgccaccccttgcaataatggagaggccacctccagtgatggtcaatggaagacacaactatgaaacatatttggagtacatttctcggacctcacagtcagttccagatataacagatcggccgcctcattctctgcactccatgccaactgatggtcagctagacggcacgtatccaccgcccgtccatgatgacaatgtgtctatggcttcatctggggccacccaagctgaacttatgaccttaaccattgtgaaaggtgcccagggcttcggcttcactattgccgacagtcctacaggacagcgggtgaaacaaatacttgacattcagggatgccctggcctgtgtgaaggcgacctcattgttgagatcaaccagcagaatgtacagaacctgagccatacagaagtagtggatatacttaaggactgtcccattggaagtgaaacttctttgattatccatcgaggaggtttcttttctccatggaaaactccaaagcctataatggaccgatgggagaatcaaggcagtcctcaaacgagtttatctgctccggccataccgcagaacctgcccttcccacctgcccttcacaggagctcctttcctgactcaacagaggcctttgacccacggaagcctgatccatatgagctctacgagaaatctagggccatttatgaaagtaggcgtccagattataaggaattggatgttcatcttcggaggatggagtctggatttggcttcagaatcctcgggggagatgagcctggacagcctattttgattggagctgtcattgccatgggctcagccgacagagatggccgccttcacccaggagatgagcttgtgtatgttgatgggattccagtagccggcaaaacccaccgctatgtcatcgacctcatgcaccacgcagcccgcaatgggcaggtcaacctcactgtgagaagaaaggtgctatgtggaggggagccctgcccagagaacgggagaagtccaggctctgtatccacccaccacagctctccacgcagtgactacgcaacctacaccaacagcaaccacgctgcccccagtagcaatgcctctccccctgaaggcttcgcctcccacagcctgcagaccagtgatgtggtcattcaccgcaaagagaatgagggcttcggctttgtcatcatcagctccctgaacaggcctgagtctggatccactataactgtgccccataaaatcggacgcatcattgatgggagtcctgcagatcgctgtgcaaaactaaaagtgggagaccggatcctagcagtgaatggccagtctatcatcaacatgcctcacgctgacatcgtgaagctcatcaaggatgcaggtcttagtgtcacccttcgcatcattcctcaggaggagctcaacagccccacctcggcacccagctcagagaagcagagtcccatggcgcagcagagtcccctggcacagcagagtcccctggcccagccaagcccagccacccccaacagccccatcgcccagccagcaccacctcaaccacttcagctgcaaggacacgaaaatagttacaggtcggaagtgaaagcaaggcaagatgtgaaaccagacatccgacagcctccattcacagactacaggcagcccccgctggattacaggcaacccccaggaggggactaccagcagcccccacccttggactacaggcagcctcccctactggactacaggcagcactcccccgacaccaggcagtaccctctgtcggactacagacaaccccaggattttgattatttcactgtggacatggagaaaggagccaaaggatttggattcagcattcgtggaggaagggaatacaaaatggatttgtatgtgttgagactggcagaagatggaccagcaataaggaatgggaggatgagggtaggagatcaaatcattgaaatcaatggggaaagcacaagggacatgacacatgccagagcaatagaactcatcaaatctggaggaagacgagtgaggctgctgctcaagagaggcacgggacaggtcccagaatatgacgaacccgccccctggagttctcccgctgccgccgccccaggtctgccggaagtaggcgtctccctggacgacggcctcgctccattctctccatcacatccagccccaccctccgacccttcccaccagataagcccaggcccaacttgggatatcaaacgggaacacgacgttaggaaaccaaaggagctttcagcctgcggccagaagaagcagcgcctcggggagcagagggagcgctcggcgagtccgcagagggccgcgcggccgaggctcgaggaggcgcccggcggccaggggcggcccgaggccggcaggcccgcctcggaggccagggcgcccgggctcgcggcggcagacgcggcggacgcggcgcgggcgggcgggaaggaggcgccccgtgcggcggcgggctccgagctctgccggcgcgaaggcccgggggctgcgccggcgtttgccggcccgggcggcggcggcagcggcgcgctggaggccgagggcagggcgggtgcgcgcgcgggtccccggccgggcccgcgacccccggggggcgccccggcgcgcaaggccgccgtcgcgccggggccctggaaggtgccgggttctgacaagctgcccagcgtcctcaaacccggcgcctcggccgccagcagatgagccgcgcggccacggccaacccgcccgccccggcgcaggcagttcttcttaggttccgtctcacggcgttttaatttattttcactgtcacacgcatagatccacgaggcaccaaggcctgggagcatcgacgtgaagtcccacgtgtccggtgtgcttgggcggcatcgcatcaacgcgcagacctaaactgatcctaaagcccccggttcccttgtgggggctttggcagctatggaagaaccaaaataacgtgaagaacatcacagagagacagtgcagtgtagctttagtttaagaaaaaaaaatattcctccccactgcatgaaggacttggatgtcatccaaactttatatcaagaaacaggacaaagttaagagcaatcacaaactggaatatcgccttaaaaatcaaactgcacggagcaagctgaaactgagacaagattatatcttttaattgatctaaagcgttgtaaataaattgttctcgacatatctagacaggggttaaagggtttctttgacacattcggaaccgttcacccatgacatgtttccatggctcacccttggcatccatcctcggtgttagcagcagcgttccctgcctcctgcaggatgacttagaaatctagtgagtttcttggtgtgatgccatttttattgccctttctgtgatcaaatcatatttctgtacattttcagtggtagaaaaaaaaggttttaaaaattgtatcctagggaacagtttgccataagtcagaattttgcagtttagctcatagatcttaattggtttttctctaaaatatgaattttataattgaaggaccacaatttgtttaatcaagataggcaacgctgcagttcctttatgaagaggcttttctgtcgtcccaggctagcagagatggatagcttctttgtcagcaatgtgatttcacttattttattgtcttattttaaaccctgtctccatgacttcatttgcactttgacagagcagaggcagagtatttgtcttatatttctcagattataatattaaaaaattacaatcaatttattttcattaaagaacgtgagtctttttagcattcctttctgcttatccttctttccttaccctttgtccttttgtttccattagttttctttcgtcttgtattccttgccactttattttgttagcaacttctagatgtttatcttcatggatctatgattgacctcctagtaaaattctaagtcttgcctttcttccctgctgttttagcatttctttgtaaaatgttagcttcaattaattagccattggtacttactgtagctacacatattaaaaggcaaagtgtttctgaaggcaatttctttttaatatgcccgaatgaatgaggcttcatcctttccatattcttactctttacaggagttcaaatgcaaataagctccacctccctgcacttgtagtctaaaaagtaaaaggggcgatcaggtccatctcaaaggtcacacgtaatagcctccctgggctgatcattccctctccttgtaattgcagtatcctgagtagcagtttaattttcatcaaacatcggagtagtttagttgtttgacaggaggagaataaggctgaaagcctcaagtgaaggatcttgcagcttgtaaaagcaatttccaaaaatgaaacccattcatcgtaaacaaaagcacaaacacttgtagcagtttataatgcttttggtttaatctcaattagtctttctcccctggactagaaatccagtatagtttgccattaatttattgaatctggttttggacaatgcttctgtagtgtagctgcacgtcctggtactgtatcctctgactttattttccatgtattacaaaaggaaaaaaaaattgagattacactggcataaactctagtttgcacagttcacagctactacttgtgcagtaattgctttatgcggctgtaatccataacctgtgaagacagcacatcatctaaatcccattccaaataatatttgtgtagtgttagctgtgaatttaccctgtacagctgtatctctataaatataattccatgtattaatagtcacagaaagactgtaagtgagcaactatttttatgaaacgtaccactatggataaattaacttttacagaaatcttgtttactgtatgatattctaaaacactgtcaaataaaatatatatcc

SEQ ID NO: 152669 - DNA, 2013 bp, Homo sapiens
  Payload ID: 10040
  Gene Symbol: MAGI2
  Gene Name: membrane associated guanylate kinase, WW and PDZ domain containing 2
  ENST ID: ENST00000628781
  CDS Start-End: 302-1969
aaaagagctcagcggcagttttgtgttgctgtgtctggcttaaagaggaaaattctagacatccatgttgaaaaatcaaagctcagctgagactacttctatcaagaaaattatttttatctgcgaatgggttggatcagtacaggtggtttgagaagacactgactgaggaccatggaaaggtgggagaggacgtgcggcttctctgcttcctttgaacagagctctaggcaccacaaggccacataaggagggtgaggtccctggagtggattatattttcatcactgttgaagattttatggaattggagaaaagtggtgctctcctagaaagtgggacttatgaagacaattactacggtaccccaaagccgccagcagaaccagcaccattattgttaaatgtaacagaccagatacttccaggagccactccaagtgctgaaggaaaacggaagaggaataaatcagtgagcaacatggagaaagccagtatagagcctcctgaggaggaagaggaagagaggcctgtggtcaatggaaatggagtagtagtaacaccagaatccagtgaacatgaagacaaaagtgcaggtgcctcaggggagatgccctcccagccttatcctgcaccagtgtacagtcagcctgaggagctgaaggagcagatggatgacacaaagccaactaaacctgaagacaatgaggaaccagacccattgcctgataactgggaaatggcctatacagagaagggcgaagtctacttcattgaccataacacaaagacaacatcatggctggatccacgacttgcgaaaaaggctaaacctccagaagagtgcaaagaaaatgagcttccatatggctgggaaaaaatcgatgatcccatttatggcacttattatgttgaccacataaatagaagaacacagtttgaaaatcctgtcctggaagcaaaaaggaagctacagcaacataacatgccccacacagaacttggaacaaagcccctgcaggccccaggtttccgagaaaaaccactcttcacccgggatgcatcccagttgaagggaacattcctcagcaccaccctaaaaaagagcaacatgggctttggatttaccatcattggtggagacgagcctgatgagtttctgcaggtgaaaagtgtgattccggatgggcctgcagcacaggatggaaaaatggaaacaggtgatgtcattgtctatattaatgaagtttgtgtccttggacacactcatgcagatgttgtcaaacttttccagtctgttcctattggtcagagtgtcaacctggtgttgtgtcgtggctaccctttgccctttgatcctgaagaccctgctaacagcatggtgccaccccttgcaataatggagaggccacctccagtgatggtcaatggaagacacaactatgaaacatatttggagtacatttctcggacctcacagtcagttccagatataacagatcggccgcctcattctctgcactccatgccaactgatggtcagctagacggcacgtatccaccgcccgtccatgatgacaatgtgtctatggcttcatctggggccacccaagctgaacttatgaccttaaccattgtgaaaggtgcccagggcttcggcttcactattgccgacagtcctacaggacagcgggtgaaacaaatacttgacattcagggatgccctggcctgtgtgaaggcgacctcattgttgagatcaaccagcagaatgtacagaacctgagccatacagaagtagtggatatacttaaggactgtcccattggaagtgaaacttctttgattatccatcgaggaggtaagacaaacactggctcagcaataaaatatgtgggtaaaatagtaggatcatttaataatattgttaaaatgcagatttccttggagttgaatgaaattatactttaaaaaataaagcttaaagagtgagagagaaaaacatgaattaaagg

SEQ ID NO: 152670 - DNA, 4599 bp, Homo sapiens
  Payload ID: 10040
  Gene Symbol: MAGI2
  Gene Name: membrane associated guanylate kinase, WW and PDZ domain containing 2
  ENST ID: ENST00000626691
  CDS Start-End: 334-3696
ctgcatgcttcatctttgagaggagggaaaacaaaagagctcagcggcagttttgtgttgctgtgtctggcttaaagaggaaaattctagacatccatgttgaaaaatcaaagctcagctgagactacttctatcaagaaaattatttttatctgcgaatgggttggatcagtacaggtggtttgagaagacactgactgaggaccatggaaaggtgggagaggacgtgcggcttctctgcttcctttgaacagagctctaggcaccacaaggccacataaggagggtgaggtccctggagtggattatattttcatcactgttgaagattttatggaattggagaaaagtggtgctctcctagaaagtgggacttatgaagacaattactacggtaccccaaagccgccagcagaaccagcaccattattgttaaatgtaacagaccagatacttccaggagccactccaagtgctgaaggaaaacggaagaggaataaatcagtgagcaacatggagaaagccagtatagagcctcctgaggaggaagaggaagagaggcctgtggtcaatggaaatggagtagtagtaacaccagaatccagtgaacatgaagacaaaagtgcaggtgcctcaggggagatgccctcccagccttatcctgcaccagtgtacagtcagcctgaggagctgaaggagcagatggatgacacaaagccaactaaacctgaagacaatgaggaaccagacccattgcctgataactgggaaatggcctatacagagaagggcgaagtctacttcattgaccataacacaaagacaacatcatggctggatccacgacttgcgaaaaaggctaaacctccagaagagtgcaaagaaaatgagcttccatatggctgggaaaaaatcgatgatcccatttatggcacttattatgttgaccacataaatagaagaacacagtttgaaaatcctgtcctggaagcaaaaaggaagctacagcaacataacatgccccacacagaacttggaacaaagcccctgcaggccccaggtttccgagaaaaaccactcttcacccgggatgcatcccagttgaagggaacattcctcagcaccaccctaaaaaagagcaacatgggctttggatttaccatcattggtggagacgagcctgatgagtttctgcaggtgaaaagtgtgattccggatgggcctgcagcacaggatggaaaaatggaaacaggtgatgtcattgtctatattaatgaagtttgtgtccttggacacactcatgcagatgttgtcaaacttttccagtctgttcctattggtcagagtgtcaacctggtgttgtgtcgtggctaccctttgccctttgatcctgaagaccctgctaacagcatggtgccaccccttgcaataatggagaggccacctccagtgatggtcaatggaagacacaactatgaaacatatttggagtacatttctcggacctcacagtcagttccagatataacagatcggccgcctcattctctgcactccatgccaactgatggtcagctagacggcacgtatccaccgcccgtccatgatgacaatgtgtctatggcttcatctggggccacccaagctgaacttatgaccttaaccattgtgaaaggtgcccagggcttcggcttcactattgccgacagtcctacaggacagcgggtgaaacaaatacttgacattcagggatgccctggcctgtgtgaaggcgacctcattgttgagatcaaccagcagaatgtacagaacctgagccatacagaagtagtggatatacttaaggactgtcccattggaagtgaaacttctttgattatccatcgaggaggtttcttttctccatggaaaactccaaagcctataatggaccgatgggagaatcaaggcagtcctcaaacgagtttatctgctccggccataccgcagaacctgcccttcccacctgcccttcacaggagctcctttcctgactcaacagaggcctttgacccacggaagcctgatccatatgagctctacgagaaatctagggccatttatgaaagtaggcaacaagtgccacccaggaccagttttcgaatggattcctctggtccagattataaggaattggatgttcatcttcggaggatggagtctggatttggcttcagaatcctcgggggagatgagcctggacagcctattttgattggagctgtcattgccatgggctcagccgacagagatggccgccttcacccaggagatgagcttgtgtatgttgatgggattccagtagccggcaaaacccaccgctatgtcatcgacctcatgcaccacgcagcccgcaatgggcaggtcaacctcactgtgagaagaaaggtgctatgtggaggggagccctgcccagagaacgggagaagtccaggctctgtatccacccaccacagctctccacgcagtgactacgcaacctacaccaacagcaaccacgctgcccccagtagcaatgcctctccccctgaaggcttcgcctcccacagcctgcagaccagtgatgtggtcattcaccgcaaagagaatgagggcttcggctttgtcatcatcagctccctgaacaggcctgagtctggatccactataactgtgccccataaaatcggacgcatcattgatgggagtcctgcagatcgctgtgcaaaactaaaagtgggagaccggatcctagcagtgaatggccagtctatcatcaacatgcctcacgctgacatcgtgaagctcatcaaggatgcaggtcttagtgtcacccttcgcatcattcctcaggaggagctcaacagccccacctcggcacccagctcagagaagcagagtcccatggcgcagcagagtcccctggcacagcagagtcccctggcccagccaagcccagccacccccaacagccccatcgcccagccagcaccacctcaaccacttcagctgcaaggacacgaaaatagttacaggtcggaagtgaaagcaaggcaagatgtgaaaccagacatccgacagcctccattcacagactacaggcagcccccgctggattacaggcaacccccaggaggggactaccagcagcccccacccttggactacaggcagcctcccctactggactacaggcagcactcccccgacaccaggcagtaccctctgtcggactacagacaaccccaggattttgattatttcactgtggacatggagaaaggagccaaaggatttggattcagcattcgtggaggaagggaatacaaaatggatttgtatgtgttgagactggcagaagatggaccagcaataaggaatgggaggatgagggtaggagatcaaatcattgaaatcaatggggaaagcacaagggacatgacacatgccagagcaatagaactcatcaaatctggaggaagacgagtgaggctgctgctcaagagaggcacgggacaggtcccagaatatggaatggtaccttccagtctctccatgtgcatgaaaagtgacaagcatgggtccccatatttctacttattgggccaccctaaagacacgacgaacccgccccctggagttctcccgctgccgccgccccaggtctgccggaagtaggcgtctccctggacgacggcctcgctccattctctccatcacatccagccccaccctccgacccttcccaccagataagcccaggcccaacttgggatatcaaacgggaacacgacgttaggaaaccaaaggagctttcagcctgcggccagaagaagcagcgcctcggggagcagagggagcgctcggcgagtccgcagagggccgcgcggccgaggctcgaggaggcgcccggcggccaggggcggcccgaggccggcaggcccgcctcggaggccagggcgcccgggctcgcggcggcagacgcggcggacgcggcgcgggcgggcgggaaggaggcgccccgtgcggcggcgggctccgagctctgccggcgcgaaggcccgggggctgcgccggcgtttgccggcccgggcggcggcggcagcggcgcgctggaggccgagggcagggcgggtgcgcgcgcgggtccccggccgggcccgcgacccccggggggcgccccggcgcgcaaggccgccgtcgcgccggggccctggaaggtgccgggttctgacaagctgcccagcgtcctcaaacccggcgcctcggccgccagcagatgagccgcgcggccacggccaacccgcccgccccggcgcaggcagttcttcttaggttccgtctcacggcgttttaatttattttcactgtcacacgcatagatccacgaggcaccaaggcctgggagcatcgacgtgaagtcccacgtgtccggtgtgcttgggcggcatcgcatcaacgcgcagacctaaactgatcctaaagcccccggttcccttgtgggggctttggcagctatggaagaaccaaaataacgtgaagaacatcacagagagacagtgcagtgtagctttagtttaa

SEQ ID NO: 152671 - DNA, 715 bp, Homo sapiens
  Payload ID: 10040
  Gene Symbol: MAGI2
  Gene Name: membrane associated guanylate kinase, WW and PDZ domain containing 2
  ENST ID: ENST00000628361
  CDS Start-End: 1-715
ataatggaccgatgggagaatcaaggcagtcctcaaacgagtttatctgctccggccataccgcagaacctgcccttcccacctgcccttcacaggagctcctttcctgactcaacagaggcctttgacccacggaagcctgatccatatgagctctacgagaaatctagggccatttatgaaaaacaagtgccacccaggaccagttttcgaatggattcctctggtccagattataaggaattggatgttcatcttcggaggatggagtctggatttggcttcagaatcctcgggggagatgagcctggacagcctattttgattggagctgtcattgccatgggctcagccgacagagatggccgccttcacccaggagatgagcttgtgtatgttgatgggattccagtagccggcaaaacccaccgctatgtcatcgacctcatgcaccacgcagcccgcaatgggcaggtcaacctcactgtgagaagaaaggtgctatgtggaggggagccctgcccagagaacgggagaagtccaggctctgtatccacccaccacagctctccacgcagtgactacgcaacctacaccaacagcaaccacgctgcccccagtagcaatgcctctccccctgaaggcttcgcctcccacagcctgcagaccagtgatgtggtcattcaccgcaaagagaatgagggcttcggctttg

SEQ ID NO: 152672 - DNA, 643 bp, Homo sapiens
  Payload ID: 10040
  Gene Symbol: MAGI2
  Gene Name: membrane associated guanylate kinase, WW and PDZ domain containing 2
  ENST ID: ENST00000522342
  CDS Start-End: 1-552
aggatggagtctggatttggcttcagaatcctcgggggagatgagcctggacagcctattttgattggagctgtcattgccatgggctcagccgacagagatggccgccttcacccaggagatgagcttgtgtatgttgatgggattccagtagccggcaaaacccaccgctatgtcatcgacctcatgcaccacgcagcccgcaatgggcaggtcaacctcactgtgagaagaaaggtgctatgtggaggggagccctgcccagagaacgggagaagtccaggctctgtatccacccaccacagctctccacgcagtgactacgcaacctacaccaacagcaaccacgctgcccccagtagcaatgcctctccccctgaaggcttcgcctcccacagcctgcagaccagtgatgtggtcattcaccgcaaagagaatgagggcttcggctttgtcatcatcagctccctgaacaggcctgagtctggatccactataatcttccagagctcattcagcagcctgcaagcagtagaacagaagagaggataggaaaatttgtgcatttttcatgttgaagtgatttggcccaaaatgttgggtatggaaacacgaaaataaaggagcactaagagaaagtaaa

SEQ ID NO: 152673 - DNA, 3316 bp, Homo sapiens
  Payload ID: 10040
  Gene Symbol: MAGI2
  Gene Name: membrane associated guanylate kinase, WW and PDZ domain containing 2
  ENST ID: ENST00000519748
  CDS Start-End: 268-2853
aaatttacagctgccttgcacaattactcttacacctccttcagggctacttagaaccaccataacacaaagacaacatcatggctggatccacgacttgcgaaaaaggctaaacctccagaagagtgcaaagaaaatgagcttccatatggctgggaaaaaatcgatgatcccatttatggcacttattatgttgaccacataaatagaagaacacagtttgaaaatcctgtcctggaagcaaaaaggaagctacagcaacataacatgccccacacagaacttggaacaaagcccctgcaggccccaggtttccgagaaaaaccactcttcacccgggatgcatcccagttgaagggaacattcctcagcaccaccctaaaaaagagcaacatgggctttggatttaccatcattggtggagacgagcctgatgagtttctgcaggtgaaaagtgtgattccggatgggcctgcagcacaggatggaaaaatggaaacaggtgatgtcattgtctatattaatgaagtttgtgtccttggacacactcatgcagatgttgtcaaacttttccagtctgttcctattggtcagagtgtcaacctggtgttgtgtcgtggctaccctttgccctttgatcctgaagaccctgctaacagcatggtgccaccccttgcaataatggagaggccacctccagtgatggtcaatggaagacacaactatgaaacatatttggagtacatttctcggacctcacagtcagttccagatataacagatcggccgcctcattctctgcactccatgccaactgatggtcagctagacggcacgtatccaccgcccgtccatgatgacaatgtgtctatggcttcatctggggccacccaagctgaacttatgaccttaaccattgtgaaaggtgcccagggcttcggcttcactattgccgacagtcctacaggacagcgggtgaaacaaatacttgacattcagggatgccctggcctgtgtgaaggcgacctcattgttgagatcaaccagcagaatgtacagaacctgagccatacagaagtagtggatatacttaaggactgtcccattggaagtgaaacttctttgattatccatcgaggaggtttcttttctccatggaaaactccaaagcctataatggaccgatgggagaatcaaggcagtcctcaaacgagtttatctgctccggccataccgcagaacctgcccttcccacctgcccttcacaggagctcctttcctgactcaacagaggcctttgacccacggaagcctgatccatatgagctctacgagaaatctagggccatttatgaaagtccagattataaggaattggatgttcatcttcggaggatggagtctggatttggcttcagaatcctcgggggagatgagcctggacagcctattttgattggagctgtcattgccatgggctcagccgacagagatggccgccttcacccaggagatgagcttgtgtatgttgatgggattccagtagccggcaaaacccaccgctatgtcatcgacctcatgcaccacgcagcccgcaatgggcaggtcaacctcactgtgagaagaaaggtgctatgtggaggggagccctgcccagagaacgggagaagtccaggctctgtatccacccaccacagctctccacgcagtgactacgcaacctacaccaacagcaaccacgctgcccccagtagcaatgcctctccccctgaaggcttcgcctcccacagcctgcagaccagtgatgtggtcattcaccgcaaagagaatgagggcttcggctttgtcatcatcagctccctgaacaggcctgagtctggatccactataactgtgccccataaaatcggacgcatcattgatgggagtcctgcagatcgctgtgcaaaactaaaagtgggagaccggatcctagcagtgaatggccagtctatcatcaacatgcctcacgctgacatcgtgaagctcatcaaggatgcaggtcttagtgtcacccttcgcatcattcctcaggaggagctcaacagccccacctcggcacccagctcagagaagcagagtcccatggcgcagcagagtcccctggcacagcagagtcccctggcccagccaagcccagccacccccaacagccccatcgcccagccagcaccacctcaaccacttcagctgcaaggacacgaaaatagttacaggtcggaagtgaaagcaaggcaagatgtgaaaccagacatccgacagcctccattcacagactacaggcagcccccgctggattacaggcaacccccaggaggggactaccagcagcccccacccttggactacaggcagcctcccctactggactacaggcagcactcccccgacaccaggcagtaccctctgtcggactacagacaaccccaggattttgattatttcactgtggacatggagaaaggagccaaaggatttggattcagcattcgtggaggaagggaatacaaaatggatttgtatgtgttgagactggcagaagatggaccagcaataaggaatgggaggatgagggtaggagatcaaatcattgaaatcaatggggaaagcacaagggacatgacacatgccagagcaatagaactcatcaaatctggaggaagacgagtgaggctgctgctcaagagaggcacgggacaggtcccagaatatggtacgtttcacgttttaattcacccttttgctcttccttctgtgaaccataaatgcttatggttatttataaaactacatcagttctccacttctacctaaatatatatttagctatcaataggtatatatatacacacacacacacacacacacacatacacacacacacgtatgtttatgcccaggaaataaatgtgtgtgaactctttcttttgctccctccattaaggaatgtttaaaatatgaaatgtaggacctttcagggcatctgtgagtgtgcgaggagatctagcaccacttaaatattagaactgttacaatttgactgatagtccactgttcatttgagtacacagtaatttatcaattatttcctaacattgtttatgcatcagactatctcaaaggatttgtaactggggccagagacaagcaacatatcttcagggtgtgaagtttaaaatgtaaacttcagttcacgcaatggttgcatttctttgacatttaggaattattctgaaaattcactcctgtgttgtgtttctgtatgcttttgaggaag

SEQ ID NO: 152674 - DNA, 533 bp, Homo sapiens
  Payload ID: 10040
  Gene Symbol: MAGI2
  Gene Name: membrane associated guanylate kinase, WW and PDZ domain containing 2
  ENST ID: ENST00000524268
  CDS Start-End: 1-318
cacgcagcccgcaatgggcaggtcaacctcactgtgagaagaaaggtgctatgtggaggggagccctgcccagagaacgggagaagtccaggctctgtatccacccaccacagctctccacgcagtgactacgcaacctacaccaacagcaaccacgctgcccccagtagcaatgcctctccccctgaaggcttcgcctcccacagcctgcagaccagtgatgtggtcattcaccgcaaagagaatgagggcttcggctttgtcatcatcagctccctgaacaggcctgagtctggatccactataagtaagtgctgaaatttgcctgcatttgaataaggggtcttgttttgatttgttccagtgatacagataccggacaagtatatcagaagactgtcacggacatactgtatagcctgaaagccacaggctgtgggcacaaataaggcatccataccactgactagcagacagttactgacctctggctcaagaagaaggcaagaacacaactaatgccctcaactcct

SEQ ID NO: 152675 - DNA, 2349 bp, Homo sapiens
  Payload ID: 10040
  Gene Symbol: MAGI2
  Gene Name: membrane associated guanylate kinase, WW and PDZ domain containing 2
  ENST ID: ENST00000630991
  CDS Start-End: 798-2285
aaaagtgagagacaggcgcgtagataacacaggttcttgtgctgagagatgtaaatgcccctgactgaccgggaagcgagcgaggttgctggtgggggttggggaaagggaaacggagggagagagcataagcgagagaggggagaaggagagagagggagagggagagagggagaggcagagggagacagagagagagagagagaagtgctgcatgcttcatctttgagaggagggaaaacaaaagagctcagcggcagttttgtgttgctgtgtctggcttaaagaggaaaattctagacatccatgttgaaaaatcaaagctcagctgagactacttctatcaagaaaattatttttatctgcgaatgggttggatcagtacaggtggtttgagaagacactgactgaggaccatggaaaggtgggagaggacgtgcggcttctctgcttcctttgaacagagctctaggcaccacaaggccacataaggagggtgaggtccctggagtggattatattttcatcactgttgaagattttatggaattggagaaaagtggtgctctcctagaaagtgggacttatgaagacggagtctcgctctgtcgcccaggctggagtgcagtggcatgatctcggctcaccgcaacctctgcctcccagacaattactacggtaccccaaagccgccagcagaaccagcaccattattgttaaatgtaacagaccagatacttccaggagccactccaagtgctgaaggaaaacggaagaggaataaatcagtgagcaacatggagaaagccagtatagagcctcctgaggaggaagaggaagagaggcctgtggtcaatggaaatggagtagtagtaacaccagaatccagtgaacatgaagacaaaagtgcaggtgcctcaggggagatgccctcccagccttatcctgcaccagtgtacagtcagcctgaggagctgaaggagcagatggatgacacaaagccaactaaacctgaagacaatgaggaaccagacccattgcctgataactgggaaatggcctatacagagaagggcgaagtctacttcattgaccataacacaaagacaacatcatggctggatccacgacttgcgaaaaaggctaaacctccagaagagtgcaaagaaaatgagcttccatatggctgggaaaaaatcgatgatcccatttatggcacttattatgttgaccacataaatagaagaacacagtttgaaaatcctgtcctggaagcaaaaaggaagctacagcaacataacatgccccacacagaacttggaacaaagcccctgcaggccccaggtttccgagaaaaaccactcttcacccgggatgcatcccagttgaagggaacattcctcagcaccaccctaaaaaagagcaacatgggctttggatttaccatcattggtggagacgagcctgatgagtttctgcaggtgaaaagtgtgattccggatgggcctgcagcacaggatggaaaaatggaaacaggtgatgtcattgtctatattaatgaagtttgtgtccttggacacactcatgcagatgttgtcaaacttttccagtctgttcctattggtcagagtgtcaacctggtgttgtgtcgtggctaccctttgccctttgatcctgaagaccctgctaacagcatggtgccaccccttgcaataatggagaggccacctccagtgatggtcaatggaagacacaactatgaaacatatttggagtacatttctcggacctcacagtcagttccagatataacagatcggccgcctcattctctgcactccatgccaactgatggtcagctagacggcacgtatccaccgcccgtccatgatgacaatgtgtctatggcttcatctggggccacccaagctgaacttatgaccttaaccattgtgaaaggtgcccagggcttcggcttcactattgccgacagtcctacaggacagcgggtgaaacaaatacttgacattcagggatgccctggcctgtgtgaaggcgacctcattgttgagatcaaccagcagaatgtacagaacctgagccatacagaagtagtggatatacttaaggactgtcccattggaagtgaaacttctttgattatccatcgaggaggtaagacaaacactggctcagcaataaaatatgtgggtaaaatagtaggatcatttaataatattgttaaaatgcagatttccttggagttgaatgaaattatactttaaaaaataaagcttaaagagtgagagagaaaaacatgaattaaaggaaactttgtttttgaattca

SEQ ID NO: 152676 - DNA, 6704 bp, Homo sapiens
  Payload ID: 10040
  Gene Symbol: MAGI2
  Gene Name: membrane associated guanylate kinase, WW and PDZ domain containing 2
  ENST ID: ENST00000629359
  CDS Start-End: 545-3865
caaaagtgagagacaggcgcgtagataacacaggttcttgtgctgagagatgtaaatgcccctgactgaccgggaagcgagcgaggttgctggtgggggttggggaaagggaaacggagggagagagcataagcgagagaggggagaaggagagagagggagagggagagagggagaggcagagggagacagagagagagagagagaagtgctgcatgcttcatctttgagaggagggaaaacaaaagagctcagcggcagttttgtgttgctgtgtctggcttaaagaggaaaattctagacatccatgttgaaaaatcaaagctcagctgagactacttctatcaagaaaattatttttatctgcgaatgggttggatcagtacaggtggtttgagaagacactgactgaggaccatggaaaggtgggagaggacgtgcggcttctctgcttcctttgaacagagctctaggcaccacaaggccacataaggagggtgaggtccctggagtggattatattttcatcactgttgaagattttatggaattggagaaaagtggtgctctcctagaaagtgggacttatgaagacaattactacggtaccccaaagccgccagcagaaccagcaccattattgttaaatgtaacagaccagatacttccaggagccactccaagtgctgaaggaaaacggaagaggaataaatcagtgagcaacatggagaaagccagtatagagcctcctgaggaggaagaggaagagaggcctgtggtcaatggaaatggagtagtagtaacaccagaatccagtgaacatgaagacaaaagtgcaggtgcctcaggggagatgccctcccagccttatcctgcaccagtgtacagtcagcctgaggagctgaaggagcagatggatgacacaaagccaactaaacctgaagacaatgaggaaccagacccattgcctgataactgggaaatggcctatacagagaagggcgaagtctacttcattgaccataacacaaagacaacatcatggctggatccacgacttgcgaaaaaggctaaacctccagaagagtgcaaagaaaatgagcttccatatggctgggaaaaaatcgatgatcccatttatggcacttattatgttgaccacataaatagaagaacacagtttgaaaatcctgtcctggaagcaaaaaggaagctacagcaacataacatgccccacacagaacttggaacaaagcccctgcaggccccaggtttccgagaaaaaccactcttcacccgggatgcatcccagttgaagggaacattcctcagcaccaccctaaaaaagagcaacatgggctttggatttaccatcattggtggagacgagcctgatgagtttctgcaggtgaaaagtgtgattccggatgggcctgcagcacaggatggaaaaatggaaacaggtgatgtcattgtctatattaatgaagtttgtgtccttggacacactcatgcagatgttgtcaaacttttccagtctgttcctattggtcagagtgtcaacctggtgttgtgtcgtggctaccctttgccctttgatcctgaagaccctgctaacagcatggtgccaccccttgcaataatggagaggccacctccagtgatggtcaatggaagacacaactatgaaacatatttggagtacatttctcggacctcacagtcagttccagatataacagatcggccgcctcattctctgcactccatgccaactgatggtcagctagacggcacgtatccaccgcccgtccatgatgacaatgtgtctatggcttcatctggggccacccaagctgaacttatgaccttaaccattgtgaaaggtgcccagggcttcggcttcactattgccgacagtcctacaggacagcgggtgaaacaaatacttgacattcagggatgccctggcctgtgtgaaggcgacctcattgttgagatcaaccagcagaatgtacagaacctgagccatacagaagtagtggatatacttaaggactgtcccattggaagtgaaacttctttgattatccatcgaggaggtttcttttctccatggaaaactccaaagcctataatggaccgatgggagaatcaaggcagtcctcaaacgagtttatctgctccggccataccgcagaacctgcccttcccacctgcccttcacaggagctcctttcctgactcaacagaggcctttgacccacggaagcctgatccatatgagctctacgagaaatctagggccatttatgaaagtaggcgtccagattataaggaattggatgttcatcttcggaggatggagtctggatttggcttcagaatcctcgggggagatgagcctggacagcctattttgattggagctgtcattgccatgggctcagccgacagagatggccgccttcacccaggagatgagcttgtgtatgttgatgggattccagtagccggcaaaacccaccgctatgtcatcgacctcatgcaccacgcagcccgcaatgggcaggtcaacctcactgtgagaagaaaggtgctatgtggaggggagccctgcccagagaacgggagaagtccaggctctgtatccacccaccacagctctccacgcagtgactacgcaacctacaccaacagcaaccacgctgcccccagtagcaatgcctctccccctgaaggcttcgcctcccacagcctgcagaccagtgatgtggtcattcaccgcaaagagaatgagggcttcggctttgtcatcatcagctccctgaacaggcctgagtctggatccactataactgtgccccataaaatcggacgcatcattgatgggagtcctgcagatcgctgtgcaaaactaaaagtgggagaccggatcctagcagtgaatggccagtctatcatcaacatgcctcacgctgacatcgtgaagctcatcaaggatgcaggtcttagtgtcacccttcgcatcattcctcaggaggagctcaacagccccacctcggcacccagctcagagaagcagagtcccatggcgcagcagagtcccctggcacagcagagtcccctggcccagccaagcccagccacccccaacagccccatcgcccagccagcaccacctcaaccacttcagctgcaaggacacgaaaatagttacaggtcggaagtgaaagcaaggcaagatgtgaaaccagacatccgacagcctccattcacagactacaggcagcccccgctggattacaggcaacccccaggaggggactaccagcagcccccacccttggactacaggcagcctcccctactggactacaggcagcactcccccgacaccaggcagtaccctctgtcggactacagacaaccccaggattttgattatttcactgtggacatggagaaaggagccaaaggatttggattcagcattcgtggaggaagggaatacaaaatggatttgtatgtgttgagactggcagaagatggaccagcaataaggaatgggaggatgagggtaggagatcaaatcattgaaatcaatggggaaagcacaagggacatgacacatgccagagcaatagaactcatcaaatctggaggaagacgagtgaggctgctgctcaagagaggcacgggacaggtcccagaatatggaatggtaccttccagtctctccatgtgcatgaaaagtgacaagcatgggtccccatatttctacttattgggccaccctaaagacacgacgaacccgccccctggagttctcccgctgccgccgccccaggtctgccggaagtaggcgtctccctggacgacggcctcgctccattctctccatcacatccagccccaccctccgacccttcccaccagataagcccaggcccaacttgggatatcaaacgggaacacgacgttaggaaaccaaaggagctttcagcctgcggccagaagaagcagcgcctcggggagcagagggagcgctcggcgagtccgcagagggccgcgcggccgaggctcgaggaggcgcccggcggccaggggcggcccgaggccggcaggcccgcctcggaggccagggcgcccgggctcgcggcggcagacgcggcggacgcggcgcgggcgggcgggaaggaggcgccccgtgcggcggcgggctccgagctctgccggcgcgaaggcccgggggctgcgccggcgtttgccggcccgggcggcggcggcagcggcgcgctggaggccgagggcagggcgggtgcgcgcgcgggtccccggccgggcccgcgacccccggggggcgccccggcgcgcaaggccgccgtcgcgccggggccctggaaggtgccgggttctgacaagctgcccagcgtcctcaaacccggcgcctcggccgccagcagatgagccgcgcggccacggccaacccgcccgccccggcgcaggcagttcttcttaggttccgtctcacggcgttttaatttattttcactgtcacacgcatagatccacgaggcaccaaggcctgggagcatcgacgtgaagtcccacgtgtccggtgtgcttgggcggcatcgcatcaacgcgcagacctaaactgatcctaaagcccccggttcccttgtgggggctttggcagctatggaagaaccaaaataacgtgaagaacatcacagagagacagtgcagtgtagctttagtttaagaaaaaaaaatattcctccccactgcatgaaggacttggatgtcatccaaactttatatcaagaaacaggacaaagttaagagcaatcacaaactggaatatcgccttaaaaatcaaactgcacggagcaagctgaaactgagacaagattatatcttttaattgatctaaagcgttgtaaataaattgttctcgacatatctagacaggggttaaagggtttctttgacacattcggaaccgttcacccatgacatgtttccatggctcacccttggcatccatcctcggtgttagcagcagcgttccctgcctcctgcaggatgacttagaaatctagtgagtttcttggtgtgatgccatttttattgccctttctgtgatcaaatcatatttctgtacattttcagtggtagaaaaaaaaggttttaaaaattgtatcctagggaacagtttgccataagtcagaattttgcagtttagctcatagatcttaattggtttttctctaaaatatgaattttataattgaaggaccacaatttgtttaatcaagataggcaacgctgcagttcctttatgaagaggcttttctgtcgtcccaggctagcagagatggatagcttctttgtcagcaatgtgatttcacttattttattgtcttattttaaaccctgtctccatgacttcatttgcactttgacagagcagaggcagagtatttgtcttatatttctcagattataatattaaaaaattacaatcaatttattttcattaaagaacgtgagtctttttagcattcctttctgcttatccttctttccttaccctttgtccttttgtttccattagttttctttcgtcttgtattccttgccactttattttgttagcaacttctagatgtttatcttcatggatctatgattgacctcctagtaaaattctaagtcttgcctttcttccctgctgttttagcatttctttgtaaaatgttagcttcaattaattagccattggtacttactgtagctacacatattaaaaggcaaagtgtttctgaaggcaatttctttttaatatgcccgaatgaatgaggcttcatcctttccatattcttactctttacaggagttcaaatgcaaataagctccacctccctgcacttgtagtctaaaaagtaaaaggggcgatcaggtccatctcaaaggtcacacgtaatagcctccctgggctgatcattccctctccttgtaattgcagtatcctgagtagcagtttaattttcatcaaacatcggagtagtttagttgtttgacaggaggagaataaggctgaaagcctcaagtgaaggatcttgcagcttgtaaaagcaatttccaaaaatgaaacccattcatcgtaaacaaaagcacaaacacttgtagcagtttataatgcttttggtttaatctcaattagtctttctcccctggactagaaatccagtatagtttgccattaatttattgaatctggttttggacaatgcttctgtagtgtagctgcacgtcctggtactgtatcctctgactttattttccatgtattacaaaaggaaaaaaaaattgagattacactggcataaactctagtttgcacagttcacagctactacttgtgcagtaattgctttatgcggctgtaatccataacctgtgaagacagcacatcatctaaatcccattccaaataatatttgtgtagtgttagctgtgaatttaccctgtacagctgtatctctataaatataattccatgtattaatagtcacagaaagactgtaagtgagcaactatttttatgaaacgtaccactatggataaattaacttttacagaaatcttgtttactgtatgatattctaaaacactgtcaaataaaatatatatcc

SEQ ID NO: 152677 - DNA, 6212 bp, Homo sapiens
  Payload ID: 10040
  Gene Symbol: MAGI2
  Gene Name: membrane associated guanylate kinase, WW and PDZ domain containing 2
  ENST ID: ENST00000628980
  CDS Start-End: 1-3954
tcaggcaccacaaggccacataaggagggtgaggtccctggagtggattatattttcatcactgttgaagattttatggaattggagaaaagtggtgctctcctagaaagtgggacttatgaagacaattactacggtaccccaaagccgccagcagaaccagcaccattattgttaaatgtaacagaccagatacttccaggagccactccaagtgctgaaggaaaacggaagaggaataaatcagtgagcaacatggagaaagccagtatagagcctcctgaggaggaagaggaagagaggcctgtggtcaatggaaatggagtagtagtaacaccagaatccagtgaacatgaagacaaaagtgcaggtgcctcaggggagatgccctcccagccttatcctgcaccagtgtacagtcagcctgaggagctgaaggagcagatggatgacacaaagccaactaaacctgaagacaatgaggaaccagacccattgcctgataactgggaaatggcctatacagagaagggcgaagtctacttcattgaccataacacaaagacaacatcatggctggatccacgacttgcgaaaaaggctaaacctccagaagagtgcaaagaaaatgagcttccatatggctgggaaaaaatcgatgatcccatttatggcacttattatgttgaccacataaatagaagaacacagtttgaaaatcctgtcctggaagcaaaaaggaagctacagcaacataacatgccccacacagaacttggaacaaagcccctgcaggccccaggtttccgagaaaaaccactcttcacccgggatgcatcccagttgaagggaacattcctcagcaccaccctaaaaaagagcaacatgggctttggatttaccatcattggtggagacgagcctgatgagtttctgcaggtgaaaagtgtgattccggatgggcctgcagcacaggatggaaaaatggaaacaggtgatgtcattgtctatattaatgaagtttgtgtccttggacacactcatgcagatgttgtcaaacttttccagtctgttcctattggtcagagtgtcaacctggtgttgtgtcgtggctaccctttgccctttgatcctgaagaccctgctaacagcatggtgccaccccttgcaataatggagaggccacctccagtgatggtcaatggaagacacaactatgaaacatatttggagtacatttctcggacctcacagtcagttccagatataacagatcggccgcctcattctctgcactccatgccaactgatggtcagctagacggcacgtatccaccgcccgtccatgatgacaatgtgtctatggcttcatctggggccacccaagctgaacttatgaccttaaccattgtgaaaggtgcccagggcttcggcttcactattgccgacagtcctacaggacagcgggtgaaacaaatacttgacattcagggatgccctggcctgtgtgaaggcgacctcattgttgagatcaaccagcagaatgtacagaacctgagccatacagaagtagtggatatacttaaggactgtcccattggaagtgaaacttctttgattatccatcgaggaggtttcttttctccatggaaaactccaaagcctataatggaccgatgggagaatcaaggcagtcctcaaacgagtttatctgctccggccataccgcagaacctgcccttcccacctgcccttcacaggagctcctttcctgactcaacagaggcctttgacccacggaagcctgatccatatgagctctacgagaaatctagggccatttatgaaagtaggcaacaagtgccacccaggaccagttttcgaatggattcctctggtccagattataaggaattggatgttcatcttcggaggatggagtctggatttggcttcagaatcctcgggggagatgagcctggacagcctattttgattggagctgtcattgccatgggctcagccgacagagatggccgccttcacccaggagatgagcttgtgtatgttgatgggattccagtagccggcaaaacccaccgctatgtcatcgacctcatgcaccacgcagcccgcaatgggcaggtcaacctcactgtgagaagaaaggtgctatgtggaggggagccctgcccagagaacgggagaagtccaggctctgtatccacccaccacagctctccacgcagtgactacgcaacctacaccaacagcaaccacgctgcccccagtagcaatgcctctccccctgaaggcttcgcctcccacagcctgcagaccagtgatgtggtcattcaccgcaaagagaatgagggcttcggctttgtcatcatcagctccctgaacaggcctgagtctggatccactataactgtgccccataaaatcggacgcatcattgatgggagtcctgcagatcgctgtgcaaaactaaaagtgggagaccggatcctagcagtgaatggccagtctatcatcaacatgcctcacgctgacatcgtgaagctcatcaaggatgcaggtcttagtgtcacccttcgcatcattcctcaggaggagctcaacagccccacctcggcacccagctcagagaagcagagtcccatggcgcagcagagtcccctggcacagcagagtcccctggcccagccaagcccagccacccccaacagccccatcgcccagccagcaccacctcaaccacttcagctgcaaggacacgaaaatagttacaggtcggaagtgaaagcaaggcaagatgtgaaaccagacatccgacagcctccattcacagactacaggcagcccccgctggattacaggcaacccccaggaggggactaccagcagcccccacccttggactacaggcagcctcccctactggactacaggcagcactcccccgacaccaggcagtaccctctgtcggactacagacaaccccaggattttgattatttcactgtggacatggagaaaggagccaaaggatttggattcagcattcgtggaggaagggaatacaaaatggatttgtatgtgttgagactggcagaagatggaccagcaataaggaatgggaggatgagggtaggagatcaaatcattgaaatcaatggggaaagcacaagggacatgacacatgccagagcaatagaactcatcaaatctggaggaagacgagtgaggctgctgctcaagagaggcacgggacaggtcccagaatatgacgaacccgccccctggagttctcccgctgccgccgccccaggtctgccggaagtaggcgtctccctggacgacggcctcgctccattctctccatcacatccagccccaccctccgacccttcccaccagataagcccaggcccaacttgggatatcaaacgggaacacgacgttaggaaaccaaaggagctttcagcctgcggccagaagaagcagcgcctcggggagcagagggagcgctcggcgagtccgcagagggccgcgcggccgaggctcgaggaggcgcccggcggccaggggcggcccgaggccggcaggcccgcctcggaggccagggcgcccgggctcgcggcggcagacgcggcggacgcggcgcgggcgggcgggaaggaggcgccccgtgcggcggcgggctccgagctctgccggcgcgaaggcccgggggctgcgccggcgtttgccggcccgggcggcggcggcagcggcgcgctggaggccgagggcagggcgggtgcgcgcgcgggtccccggccgggcccgcgacccccggggggcgccccggcgcgcaaggccgccgtcgcgccggggccctggaaggtgccgggttctgacaagctgcccagcgtcctcaaacccggcgcctcggccgccagcagatgagccgcgcggccacggccaacccgcccgccccggcgcaggcagttcttcttaggttccgtctcacggcgttttaatttattttcactgtcacacgcatagatccacgaggcaccaaggcctgggagcatcgacgtgaagtcccacgtgtccggtgtgcttgggcggcatcgcatcaacgcgcagacctaaactgatcctaaagcccccggttcccttgtgggggctttggcagctatggaagaaccaaaataacgtgaagaacatcacagagagacagtgcagtgtagctttagtttaagaaaaaaaaatattcctccccactgcatgaaggacttggatgtcatccaaactttatatcaagaaacaggacaaagttaagagcaatcacaaactggaatatcgccttaaaaatcaaactgcacggagcaagctgaaactgagacaagattatatcttttaattgatctaaagcgttgtaaataaattgttctcgacatatctagacaggggttaaagggtttctttgacacattcggaaccgttcacccatgacatgtttccatggctcacccttggcatccatcctcggtgttagcagcagcgttccctgcctcctgcaggatgacttagaaatctagtgagtttcttggtgtgatgccatttttattgccctttctgtgatcaaatcatatttctgtacattttcagtggtagaaaaaaaaggttttaaaaattgtatcctagggaacagtttgccataagtcagaattttgcagtttagctcatagatcttaattggtttttctctaaaatatgaattttataattgaaggaccacaatttgtttaatcaagataggcaacgctgcagttcctttatgaagaggcttttctgtcgtcccaggctagcagagatggatagcttctttgtcagcaatgtgatttcacttattttattgtcttattttaaaccctgtctccatgacttcatttgcactttgacagagcagaggcagagtatttgtcttatatttctcagattataatattaaaaaattacaatcaatttattttcattaaagaacgtgagtctttttagcattcctttctgcttatccttctttccttaccctttgtccttttgtttccattagttttctttcgtcttgtattccttgccactttattttgttagcaacttctagatgtttatcttcatggatctatgattgacctcctagtaaaattctaagtcttgcctttcttccctgctgttttagcatttctttgtaaaatgttagcttcaattaattagccattggtacttactgtagctacacatattaaaaggcaaagtgtttctgaaggcaatttctttttaatatgcccgaatgaatgaggcttcatcctttccatattcttactctttacaggagttcaaatgcaaataagctccacctccctgcacttgtagtctaaaaagtaaaaggggcgatcaggtccatctcaaaggtcacacgtaatagcctccctgggctgatcattccctctccttgtaattgcagtatcctgagtagcagtttaattttcatcaaacatcggagtagtttagttgtttgacaggaggagaataaggctgaaagcctcaagtgaaggatcttgcagcttgtaaaagcaatttccaaaaatgaaacccattcatcgtaaacaaaagcacaaacacttgtagcagtttataatgcttttggtttaatctcaattagtctttctcccctggactagaaatccagtatagtttgccattaatttattgaatctggttttggacaatgcttctgtagtgtagctgcacgtcctggtactgtatcctctgactttattttccatgtattacaaaaggaaaaaaaaattgagattacactggcataaactctagtttgcacagttcacagctactacttgtgcagtaattgctttatgcggctgtaatccataacctgtgaagacagcacatcatctaaatcccattccaaataatatttgtgtagtgttagctgtgaatttaccctgtacagctgtatctctataaatataattccatgtattaatagtcacagaaagactgtaagtgagcaactatttttatgaaacgtaccactatggataaattaacttttacagaaatcttgtttactgtatgatattctaaaacactgtcaaataaaatatatatccaaaaatcttttctttttccaacta

SEQ ID NO: 152678 - DNA, 492 bp, Homo sapiens
  Payload ID: 10040
  Gene Symbol: MAGI2
  Gene Name: membrane associated guanylate kinase, WW and PDZ domain containing 2
  ENST ID: ENST00000634996
  CDS Start-End: 268-492
aaatttacagctgccttgcacaattactcttacacctccttcagggctacttagaaccaccataacacaaagacaacatcatggctggatccacgacttgcgaaaaaggctaaacctccagaagagtgcaaagaaaatgagcttccatatggctgggaaaaaatcgatgatcccatttatggcacttattatgttgaccacataaatagaagaacacagtttgaaaatcctgtcctggaagcaaaaaggaagctacagcaacataacatgccccacacagaacttggaacaaagcccctgcaggccccaggtttccgagtagacagctcctcatggacattacctaggcccaaatccatccgcccccgtgctgccccggagaggtcgcgcagcgtgaatgacttgtcttactatcagcgcgacccagcagggaggccctggctgttcgaaaaaccactcttcacccgggatgcatcccagttgaagggaaca

SEQ ID NO: 152679 - DNA, 6430 bp, Homo sapiens
  Payload ID: 10041
  Gene Symbol: MAGI3
  Gene Name: membrane associated guanylate kinase, WW and PDZ domain containing 3
  Uniprot ID: Q5TCQ9
  ENST ID: ENST00000307546
  CDS Start-End: 76-4521
ccgggctgagacggggccggagcggcgccccggccgcccgcgcggggtctcccccatggtgcagcggggttcgggatgtcgaagacgctgaagaagaagaagcactggctcagcaaggtgcaggagtgcgccgtgtcctgggccgggcccccgggcgacttcggcgcggagatccgcggtggcgcggagcgtggcgagttcccctacctggggcggctccgcgaggagcccggcgggggcacctgctgcgtcgtctcgggcaaggcgcccagcccaggcgatgtgctgctggaggtaaacgggacgcctgtcagcgggctcaccaaccgggacaccctggctgtcatccgccacttccgcgagcccatccgtctcaagactgtgaaaccaggcaaagtcattaataaagatttgcggcattacctaagtcttcagtttcaaaaaggatcaattgaccacaaactgcagcaagtgatcagagataatctctacttgagaaccattccatgcactacaagggcccccagggatggagaagtaccaggagtggattataatttcatttccgttgaacagttcaaagcactggaagagagtggagcattgttagaaagtgggacatatgatggaaacttctatggaactcccaagcctccagcagaacccagcccttttcagccagatccagttgatcaagtcctctttgataatgagtttgatgcagaatctcaaagaaaacgaacgacatctgtcagcaagatggaaagaatggatagctctcttcctgaagaggaagaagatgaggacaaggaagctattaatggcagtggaaacgcagaaaacagagagaggcattctgagtcatctgactggatgaagactgttccaagttacaaccaaacaaatagctccatggactttagaaattatatgatgagagatgagactctggaaccactgcccaaaaactgggaaatggcctacactgacacagggatgatctacttcattgaccacaataccaagacaaccacctggttggatcctcgtctttgtaagaaagccaaagcccctgaagactgtgaagatggagagcttccttatggctgggagaaaatagaggaccctcagtatgggacatactatgttgatcaccttaaccagaaaacccagtttgaaaatccagtggaggaagccaaaaggaaaaagcagttaggacaggttgaaattgggtcttcaaaaccagatatggaaaaatcacacttcacaagagatccatcccagcttaaaggtgtccttgttcgagcatcactgaaaaaaagcacaatgggatttggttttactattattggtggagatagacctgatgagttcctacaagtgaaaaatgtgctgaaagatggtcccgcagctcaggatgggaaaattgcaccaggcgatgttattgtagacatcaatggcaactgtgtcctcggtcacactcatgcagatgttgtccagatgtttcaattggtacctgtcaatcagtatgtaaacctcactttatgtcgtggttatccacttcctgatgacagtgaagatcctgttgtggacattgttgctgctacccctgtcatcaatggacagtcattaaccaagggagagacttgcatgaatcctcaggattttaagccaggagcaatggttctggagcagaatggaaaatcgggacacactttgactggtgatggtctcaatggaccatcagatgcaagtgagcagagagtatccatggcatcgtcaggcagctcccagcctgaactagtgactatccctttgattaagggccctaaagggtttgggtttgcaattgctgacagccctactggacagaaggtgaaaatgatactggatagtcagtggtgtcaaggccttcagaaaggagatataattaaggaaatataccatcaaaatgtgcagaatttaacacatctccaagtggtagaggtgctaaagcagtttccagtaggtgctgatgtaccattgcttatcttaagaggaggtcctccttcaccaaccaaaactgccaaaatgaaaacagataaaaaggaaaatgcaggaagtttggaggccataaatgagcctattcctcagcctatgccttttccaccgagcattatcaggtcaggatccccaaaattggatccttctgaggtctacctgaaatctaagactttatatgaagataaaccaccaaacaccaaagatttggatgtttttcttcgaaaacaagagtcagggtttggcttcagggtgctaggaggagatggacctgaccagtctatatatattggggctattattcccctgggagcagctgagaaagatggtcggctccgcgcagctgatgaactaatgtgcattgatggaattcctgttaaagggaaatcacacaaacaagtcttggacctcatgacaactgctgctcgaaatggccatgtgttactaactgtcagacggaagatcttctatggagaaaaacaacccgaggacgacagctctcaggccttcatttcaacacagaatggatctccccgcctgaaccgggcagaggtcccagccaggcctgcaccccaggagccctatgatgttgtcttgcaacgaaaagaaaatgaaggatttggctttgtcatcctcacctccaaaaacaaaccacctccaggagttattcctcataaaattggccgagtcatagaaggaagtccggctgaccgctgtggaaaactgaaagttggagatcatatctctgcagtgaatgggcagtccattgttgaactgtctcatgataacattgttcagctgatcaaagatgctggtgtcaccgtcacactaacggtcattgctgaagaagagcatcatggtccaccatcaggaacaaactcagccaggcaaagcccagccctgcagcacaggcccatgggacagtcacaggccaaccacatacctggggacagaagtgccctagaaggtgaaattggaaaagatgtctccacttcttacagacattcttggtcagaccacaagcaccttgcacagcctgacaccgcagtaatttcagttgtaggcagtcggcacaatcagaaccttggttgttatccagtagagctggagagaggcccccggggctttggattcagcctccgaggggggaaggagtacaacatggggctgttcatccttcgtcttgctgaagatggtcctgccatcaaagatggcagaattcatgttggtgaccagattgttgaaatcaatggggaacctacacaaggaatcacacatactcgagcaattgagctcattcaggctggtggaaataaagttcttcttcttttgaggccaggaactggcttgatacctgaccatggtgattgggatattaataatccttcgtcttcaaatgtgatttatgatgaacagtcaccattacccccatcttcacattttgcttccatatttgaagagtctcacgtgccagtaattgaagaatctttgagagttcagatatgtgaaaaggcagaagaattaaaggacattgtgcctgaaaagaaaagcactttaaatgaaaatcagcctgagataaagcatcagtctcttctccagaaaaatgtgagtaagagggatccacccagcagtcatgggcacagtaacaagaaaaatctattaaaagtagaaaatggtgttacacgaagaggtagatcggttagtcccaaaaagccagccagtcaacattcagaggaacatttggataagattcctagtcctctaaaaaataaccccaaaagaagacccagagatcaatccctcagccccagcaaaggggaaaataaaagttgtcaggtcagcaccagggcaggctctggacaagatcagtgcagaaaaagcagaggtcggtcggccagcccaaaaaagcagcaaaaaattgaaggaagcaaagctccatcaaatgctgaggccaaattattagagggtaagagtcgaagaatagcaggctatacgggcagtaatgctgagcagatcccagatgggaaggaaaaatcagacgtcatcaggaaagatgcaaagcagaatcagttggaaaaaagcagaacaaggtctccagagaaaaaaatcaaaagaatggttgagaaatctcttccatccaaaatgactaataagactacaagtaaagaagtatctgaaaatgaaaaaggaaagaaagtaaccacaggagaaacaagttctagtaacgataaaataggagaaaatgtccagctatcagaaaagaggctgaagcaagaacctgaagagaaggtagtttcaaacaaaacagaagatcacaaagggaaagaactagaggcagctgacaaaaacaaagagactggaaggttcaaaccggaaagcagttctccagttaagaaaacactgataactccagggccctggaaggttccaagtggaaataaagtcacaggcactattggtatggctgagaaacggcagtaacctttagtataaaacaaagaaaaacaagttgtaatcttttcttacagcagcatttttccagaaaaagcctttttttttttttcagatattctgaaacagataagtacatgttaatgtgagcctcaagttacctaggctgcatgaagggcctttaggattgctaagaaccaactgtccccctggccggctgccctccctcgctctcaggaaggagctgcatccacatgctcatctgacccgccctgctcaggctgcccagctcgtcttcatgagtgtctgaacaaatgacatatgttgatattaacaatgtggtcacaactcactttgtatttgtgccaagttatctactgtatcatgtctgtttttatcctttttgttcagctgtttccacagtaatgaaaaagttaggtttggcttggaagttgatgatctcaatagcatgttgcatgtttacagagagaaatatgtgagtccttgcagaagaagagactgttaactcatcgttaaagatggccgttgtctcttctaacagctactgatgatgtcccactttaaaaataaaacccccaaacatcactactttaaggaaaaaaaaaatgtagtccaatattgatgctttcttatggctttttattttaatttggctggataagttgtttcaaataactgttaaagatattacttacaattgaatgtttgaaataagaaagtactttaagcaatagagttcatctcctgctgtgttatccaacctcgatgtatacttacagcatctcaggtcaccctttttatttcagttatttaattatgaaaccataaagaagcatgtggaaatagtgtttattgctctttgaagaaaaaccaccaactatttctggatattttggctgtacctactactaaagtcattagtctttaatacataatacatatttgaaaagtaaacatattatatagattatgtgagggacttaatcatgaaaccagtttcacagtccaagtaccaactcttctggtagcaggtgcacaagcttgggtgtttaaaaacaacctgtgtagggtatgcccagcaaatgaggacaaatgtgtagacagtacttactggatcttatttaacttttagctacattaactaactttcttatttaaaaacaagaaagggagactaaacatctgcttaacttgtacacattttcagaattctttttaaaagtctagttaaagatgtttcttagaagttggagactgttaacaacttccataaaatagatccaggtttttcagttccctgaagcagcattcagtagcatctatataaataaaggcaccttctgagaataaaactattttatggagtgtgtgaacacacttgttctgtcacctgggttcatcttgttgtgaagcacattaggtccaggtccttccctctgggagtctgactgtgaaactctttaacccaacaactcaattagcccctgtagataagacatgcttcccagagtgagatttttgaaatccccttttcatccagaactatatttacccacctattgtaactattcaaatagagcaaaattaggaggcttgataaatactaagaatttagtaccacagaaattatttattattttccctgtagtccacaattagtgataacgaatcctatttttgttaactgtgacataactttgatgtcatatgttgtcctatgtggttcttcctaagtaaactctgtactgattatatactgacttagcaatgtggccttggaatgctgagcaaaatgtggatgtactggttgtaaatgtttatatattgtacagtacctttatatatacacttgaggttctgattagagaaagatctgtaaattgctcattattttttatatagatatttaaaaaaaaca

SEQ ID NO: 152680 - DNA, 3596 bp, Homo sapiens
  Payload ID: 10041
  Gene Symbol: MAGI3
  Gene Name: membrane associated guanylate kinase, WW and PDZ domain containing 3
  Uniprot ID: Q5TCQ9
  ENST ID: ENST00000369611
  CDS Start-End: 46-3423
cggccgcccgcgcggggtctcccccatggtgcagcggggttcgggatgtcgaagacgctgaagaagaagaagcactggctcagcaaggtgcaggagtgcgccgtgtcctgggccgggcccccgggcgacttcggcgcggagatccgcggtggcgcggagcgtggcgagttcccctacctggggcggctccgcgaggagcccggcgggggcacctgctgcgtcgtctcgggcaaggcgcccagcccaggcgatgtgctgctggaggtaaacgggacgcctgtcagcgggctcaccaaccgggacaccctggctgtcatccgccacttccgcgagcccatccgtctcaagactgtgaaaccaggcaaagtcattaataaagatttgcggcattacctaagtcttcagtttcaaaaaggatcaattgaccacaaactgcagcaagtgatcagagataatctctacttgagaaccattccatgcactacaagggcccccagggatggagaagtaccaggagtggattataatttcatttccgttgaacagttcaaagcactggaagagagtggagcattgttagaaagtgggacatatgatggaaacttctatggaactcccaagcctccagcagaacccagcccttttcagccagatccagttgatcaagtcctctttgataatgagtttgatgcagaatctcaaagaaaacgaacgacatctgtcagcaagatggaaagaatggatagctctcttcctgaagaggaagaagatgaggacaaggaagctattaatggcagtggaaacgcagaaaacagagagaggcattctgagtcatctgactggatgaagactgttccaagttacaaccaaacaaatagctccatggactttagaaattatatgatgagagatgagactctggaaccactgcccaaaaactgggaaatggcctacactgacacagggatgatctacttcattgaccacaataccaagacaaccacctggttggatcctcgtctttgtaagaaagccaaagcccctgaagactgtgaagatggagagcttccttatggctgggagaaaatagaggaccctcagtatgggacatactatgttgatcaccttaaccagaaaacccagtttgaaaatccagtggaggaagccaaaaggaaaaagcagttaggacaggttgaaattgggtcttcaaaaccagatatggaaaaatcacacttcacaagagatccatcccagcttaaaggtgtccttgttcgagcatcactgaaaaaaagcacaatgggatttggttttactattattggtggagatagacctgatgagttcctacaagtgaaaaatgtgctgaaagatggtcccgcagctcaggatgggaaaattgcaccaggcgatgttattgtagacatcaatggcaactgtgtcctcggtcacactcatgcagatgttgtccagatgtttcaattggtacctgtcaatcagtatgtaaacctcactttatgtcgtggttatccacttcctgatgacagtgaagatcctgttgtggacattgttgctgctacccctgtcatcaatggacagtcattaaccaagggagagacttgcatgaatcctcaggattttaagccaggagcaatggttctggagcagaatggaaaatcgggacacactttgactggtgatggtctcaatggaccatcagatgcaagtgagcagagagtatccatggcatcgtcaggcagctcccagcctgaactagtgactatccctttgattaagggccctaaagggtttgggtttgcaattgctgacagccctactggacagaaggtgaaaatgatactggatagtcagtggtgtcaaggccttcagaaaggagatataattaaggaaatataccatcaaaatgtgcagaatttaacacatctccaagtggtagaggtgctaaagcagtttccagtaggtgctgatgtaccattgcttatcttaagaggaggtcctccttcaccaaccaaaactgccaaaatgaaaacagataaaaaggaaaatgcaggaagtttggaggccataaatgagcctattcctcagcctatgccttttccaccgagcattatcaggtcaggatccccaaaattggatccttctgaggtctacctgaaatctaagactttatatgaagataaaccaccaaacaccaaagatttggatgtttttcttcgaaaacaagagtcagggtttggcttcagggtgctaggaggagatggacctgaccagtctatatatattggggctattattcccctgggagcagctgagaaagatggtcggctccgcgcagctgatgaactaatgtgcattgatggaattcctgttaaagggaaatcacacaaacaagtcttggacctcatgacaactgctgctcgaaatggccatgtgttactaactgtcagacggaagatcttctatggagaaaaacaacccgaggacgacagctctcaggccttcatttcaacacagaatggatctccccgcctgaaccgggcagaggtcccagccaggcctgcaccccaggagccctatgatgttgtcttgcaacgaaaagaaaatgaaggatttggctttgtcatcctcacctccaaaaacaaaccacctccaggagttattcctcataaaattggccgagtcatagaaggaagtccggctgaccgctgtggaaaactgaaagttggagatcatatctctgcagtgaatgggcagtccattgttgaactgtctcatgataacattgttcagctgatcaaagatgctggtgtcaccgtcacactaacggtcattgctgaagaagagcatcatggtccaccatcaggaacaaactcagccaggcaaagcccagccctgcagcacaggcccatgggacagtcacaggccaaccacatacctggggacagaagtgccctagaaggtgaaattggaaaagatgtctccacttcttacagacattcttggtcagaccacaagcaccttgcacagcctgacaccgcagtaatttcagttgtaggcagtcggcacaatcagaaccttggttgttatccagtagagctggagagaggcccccggggctttggattcagcctccgaggggggaaggagtacaacatggggctgttcatccttcgtcttgctgaagatggtcctgccatcaaagatggcagaattcatgttggtgaccagattgttgaaatcaatggggaacctacacaaggaatcacacatactcgagcaattgagctcattcaggctggtggaaataaagttcttcttcttttgaggccaggaactggcttgatacctgaccatggtttggctccttccggtctgtgctcctacgtgaaacccgagcaacattaaggctttcagggcttttcttggtctttccttaaaaagacttggtaaatttgcatgtcttgtaaatcactttcttcttttgttttcttttaaattaaaaatgatgctattaaatacatctatttctatcttctgcacttttcagtcttcttttgacattaaatttgacagcttaa

SEQ ID NO: 152681 - DNA, 6508 bp, Homo sapiens
  Payload ID: 10041
  Gene Symbol: MAGI3
  Gene Name: membrane associated guanylate kinase, WW and PDZ domain containing 3
  Uniprot ID: Q5TCQ9
  ENST ID: ENST00000369615
  CDS Start-End: 63-3440
gggccggagcggcgccccggccgcccgcgcggggtctcccccatggtgcagcggggttcgggatgtcgaagacgctgaagaagaagaagcactggctcagcaaggtgcaggagtgcgccgtgtcctgggccgggcccccgggcgacttcggcgcggagatccgcggtggcgcggagcgtggcgagttcccctacctggggcggctccgcgaggagcccggcgggggcacctgctgcgtcgtctcgggcaaggcgcccagcccaggcgatgtgctgctggaggtaaacgggacgcctgtcagcgggctcaccaaccgggacaccctggctgtcatccgccacttccgcgagcccatccgtctcaagactgtgaaaccaggcaaagtcattaataaagatttgcggcattacctaagtcttcagtttcaaaaaggatcaattgaccacaaactgcagcaagtgatcagagataatctctacttgagaaccattccatgcactacaagggcccccagggatggagaagtaccaggagtggattataatttcatttccgttgaacagttcaaagcactggaagagagtggagcattgttagaaagtgggacatatgatggaaacttctatggaactcccaagcctccagcagaacccagcccttttcagccagatccagttgatcaagtcctctttgataatgagtttgatgcagaatctcaaagaaaacgaacgacatctgtcagcaagatggaaagaatggatagctctcttcctgaagaggaagaagatgaggacaaggaagctattaatggcagtggaaacgcagaaaacagagagaggcattctgagtcatctgactggatgaagactgttccaagttacaaccaaacaaatagctccatggactttagaaattatatgatgagagatgagactctggaaccactgcccaaaaactgggaaatggcctacactgacacagggatgatctacttcattgaccacaataccaagacaaccacctggttggatcctcgtctttgtaagaaagccaaagcccctgaagactgtgaagatggagagcttccttatggctgggagaaaatagaggaccctcagtatgggacatactatgttgatcaccttaaccagaaaacccagtttgaaaatccagtggaggaagccaaaaggaaaaagcagttaggacaggttgaaattgggtcttcaaaaccagatatggaaaaatcacacttcacaagagatccatcccagcttaaaggtgtccttgttcgagcatcactgaaaaaaagcacaatgggatttggttttactattattggtggagatagacctgatgagttcctacaagtgaaaaatgtgctgaaagatggtcccgcagctcaggatgggaaaattgcaccaggcgatgttattgtagacatcaatggcaactgtgtcctcggtcacactcatgcagatgttgtccagatgtttcaattggtacctgtcaatcagtatgtaaacctcactttatgtcgtggttatccacttcctgatgacagtgaagatcctgttgtggacattgttgctgctacccctgtcatcaatggacagtcattaaccaagggagagacttgcatgaatcctcaggattttaagccaggagcaatggttctggagcagaatggaaaatcgggacacactttgactggtgatggtctcaatggaccatcagatgcaagtgagcagagagtatccatggcatcgtcaggcagctcccagcctgaactagtgactatccctttgattaagggccctaaagggtttgggtttgcaattgctgacagccctactggacagaaggtgaaaatgatactggatagtcagtggtgtcaaggccttcagaaaggagatataattaaggaaatataccatcaaaatgtgcagaatttaacacatctccaagtggtagaggtgctaaagcagtttccagtaggtgctgatgtaccattgcttatcttaagaggaggtcctccttcaccaaccaaaactgccaaaatgaaaacagataaaaaggaaaatgcaggaagtttggaggccataaatgagcctattcctcagcctatgccttttccaccgagcattatcaggtcaggatccccaaaattggatccttctgaggtctacctgaaatctaagactttatatgaagataaaccaccaaacaccaaagatttggatgtttttcttcgaaaacaagagtcagggtttggcttcagggtgctaggaggagatggacctgaccagtctatatatattggggctattattcccctgggagcagctgagaaagatggtcggctccgcgcagctgatgaactaatgtgcattgatggaattcctgttaaagggaaatcacacaaacaagtcttggacctcatgacaactgctgctcgaaatggccatgtgttactaactgtcagacggaagatcttctatggagaaaaacaacccgaggacgacagctctcaggccttcatttcaacacagaatggatctccccgcctgaaccgggcagaggtcccagccaggcctgcaccccaggagccctatgatgttgtcttgcaacgaaaagaaaatgaaggatttggctttgtcatcctcacctccaaaaacaaaccacctccaggagttattcctcataaaattggccgagtcatagaaggaagtccggctgaccgctgtggaaaactgaaagttggagatcatatctctgcagtgaatgggcagtccattgttgaactgtctcatgataacattgttcagctgatcaaagatgctggtgtcaccgtcacactaacggtcattgctgaagaagagcatcatggtccaccatcaggaacaaactcagccaggcaaagcccagccctgcagcacaggcccatgggacagtcacaggccaaccacatacctggggacagaagtgccctagaaggtgaaattggaaaagatgtctccacttcttacagacattcttggtcagaccacaagcaccttgcacagcctgacaccgcagtaatttcagttgtaggcagtcggcacaatcagaaccttggttgttatccagtagagctggagagaggcccccggggctttggattcagcctccgaggggggaaggagtacaacatggggctgttcatccttcgtcttgctgaagatggtcctgccatcaaagatggcagaattcatgttggtgaccagattgttgaaatcaatggggaacctacacaaggaatcacacatactcgagcaattgagctcattcaggctggtggaaataaagttcttcttcttttgaggccaggaactggcttgatacctgaccatggtttggctccttccggtctgtgctcctacgtgaaacccgagcaacattaaggctttcagggcttttcttggtctttccttaaaaagacttggtgattgggatattaataatccttcgtcttcaaatgtgatttatgatgaacagtcaccattacccccatcttcacattttgcttccatatttgaagagtctcacgtgccagtaattgaagaatctttgagagttcagatatgtgaaaaggcagaagaattaaaggacattgtgcctgaaaagaaaagcactttaaatgaaaatcagcctgagataaagcatcagtctcttctccagaaaaatgtgagtaagagggatccacccagcagtcatgggcacagtaacaagaaaaatctattaaaagtagaaaatggtgttacacgaagaggtagatcggttagtcccaaaaagccagccagtcaacattcagaggaacatttggataagattcctagtcctctaaaaaataaccccaaaagaagacccagagatcaatccctcagccccagcaaaggggaaaataaaagttgtcaggtcagcaccagggcaggctctggacaagatcagtgcagaaaaagcagaggtcggtcggccagcccaaaaaagcagcaaaaaattgaaggaagcaaagctccatcaaatgctgaggccaaattattagagggtaagagtcgaagaatagcaggctatacgggcagtaatgctgagcagatcccagatgggaaggaaaaatcagacgtcatcaggaaagatgcaaagcagaatcagttggaaaaaagcagaacaaggtctccagagaaaaaaatcaaaagaatggttgagaaatctcttccatccaaaatgactaataagactacaagtaaagaagtatctgaaaatgaaaaaggaaagaaagtaaccacaggagaaacaagttctagtaacgataaaataggagaaaatgtccagctatcagaaaagaggctgaagcaagaacctgaagagaaggtagtttcaaacaaaacagaagatcacaaagggaaagaactagaggcagctgacaaaaacaaagagactggaaggttcaaaccggaaagcagttctccagttaagaaaacactgataactccagggccctggaaggttccaagtggaaataaagtcacaggcactattggtatggctgagaaacggcagtaacctttagtataaaacaaagaaaaacaagttgtaatcttttcttacagcagcatttttccagaaaaagcctttttttttttttcagatattctgaaacagataagtacatgttaatgtgagcctcaagttacctaggctgcatgaagggcctttaggattgctaagaaccaactgtccccctggccggctgccctccctcgctctcaggaaggagctgcatccacatgctcatctgacccgccctgctcaggctgcccagctcgtcttcatgagtgtctgaacaaatgacatatgttgatattaacaatgtggtcacaactcactttgtatttgtgccaagttatctactgtatcatgtctgtttttatcctttttgttcagctgtttccacagtaatgaaaaagttaggtttggcttggaagttgatgatctcaatagcatgttgcatgtttacagagagaaatatgtgagtccttgcagaagaagagactgttaactcatcgttaaagatggccgttgtctcttctaacagctactgatgatgtcccactttaaaaataaaacccccaaacatcactactttaaggaaaaaaaaaatgtagtccaatattgatgctttcttatggctttttattttaatttggctggataagttgtttcaaataactgttaaagatattacttacaattgaatgtttgaaataagaaagtactttaagcaatagagttcatctcctgctgtgttatccaacctcgatgtatacttacagcatctcaggtcaccctttttatttcagttatttaattatgaaaccataaagaagcatgtggaaatagtgtttattgctctttgaagaaaaaccaccaactatttctggatattttggctgtacctactactaaagtcattagtctttaatacataatacatatttgaaaagtaaacatattatatagattatgtgagggacttaatcatgaaaccagtttcacagtccaagtaccaactcttctggtagcaggtgcacaagcttgggtgtttaaaaacaacctgtgtagggtatgcccagcaaatgaggacaaatgtgtagacagtacttactggatcttatttaacttttagctacattaactaactttcttatttaaaaacaagaaagggagactaaacatctgcttaacttgtacacattttcagaattctttttaaaagtctagttaaagatgtttcttagaagttggagactgttaacaacttccataaaatagatccaggtttttcagttccctgaagcagcattcagtagcatctatataaataaaggcaccttctgagaataaaactattttatggagtgtgtgaacacacttgttctgtcacctgggttcatcttgttgtgaagcacattaggtccaggtccttccctctgggagtctgactgtgaaactctttaacccaacaactcaattagcccctgtagataagacatgcttcccagagtgagatttttgaaatccccttttcatccagaactatatttacccacctattgtaactattcaaatagagcaaaattaggaggcttgataaatactaagaatttagtaccacagaaattatttattattttccctgtagtccacaattagtgataacgaatcctatttttgttaactgtgacataactttgatgtcatatgttgtcctatgtggttcttcctaagtaaactctgtactgattatatactgacttagcaatgtggccttggaatgctgagcaaaatgtggatgtactggttgtaaatgtttatatattgtacagtacctttatatatacacttgaggttctgattagagaaagatctgtaaattgctcattattttttatatagatatttaaaaaaaaca

SEQ ID NO: 152682 - DNA, 3911 bp, Homo sapiens
  Payload ID: 10041
  Gene Symbol: MAGI3
  Gene Name: membrane associated guanylate kinase, WW and PDZ domain containing 3
  Uniprot ID: Q5TCQ9
  ENST ID: ENST00000369617
  CDS Start-End: 286-3738
ctcctggggacaattcccttttcctttcttcagcctaacccgcggtggccctcgcggagtccggtcagccccggggagcgcagccgggaggggcgtccaaggggcgtctcgcgtctgggaacggccgggcccccagcgggctgtggtcgcggggtgggggccggagcggcgaggccccccttaccgggctgcgcgggccgcccagggcccccgggctgagacggggccggagcggcgccccggccgcccgcgcggggtctcccccatggtgcagcggggttcgggatgtcgaagacgctgaagaagaagaagcactggctcagcaaggtgcaggagtgcgccgtgtcctgggccgggcccccgggcgacttcggcgcggagatccgcggtggcgcggagcgtggcgagttcccctacctggggcggctccgcgaggagcccggcgggggcacctgctgcgtcgtctcgggcaaggcgcccagcccaggcgatgtgctgctggaggtaaacgggacgcctgtcagcgggctcaccaaccgggacaccctggctgtcatccgccacttccgcgagcccatccgtctcaagactgtgaaaccaggcaaagtcattaataaagatttgcggcattacctaagtcttcagtttcaaaaaggatcaattgaccacaaactgcagcaagtgatcagagataatctctacttgagaaccattccatgcactacaagggcccccagggatggagaagtaccaggagtggattataatttcatttccgttgaacagttcaaagcactggaagagagtggagcattgttagaaagtgggacatatgatggaaacttctatggaactcccaagcctccagcagaacccagcccttttcagccagatccagttgatcaagtcctctttgataatgagtttgatgcagaatctcaaagaaaacgaacgacatctgtcagcaagatggaaagaatggatagctctcttcctgaagaggaagaagatgaggacaaggaagctattaatggcagtggaaacgcagaaaacagagagaggcattctgagtcatctgactggatgaagactgttccaagttacaaccaaacaaatagctccatggactttagaaattatatgatgagagatgagactctggaaccactgcccaaaaactgggaaatggcctacactgacacagggatgatctacttcattgaccacaataccaagacaaccacctggttggatcctcgtctttgtaagaaagccaaagcccctgaagactgtgaagatggagagcttccttatggctgggagaaaatagaggaccctcagtatgggacatactatgttgatttcactcttgtcgcccaagctggagtgcaatggcatgatctcggctcactgcaacctccgcctcctgggttcaatcaccttaaccagaaaacccagtttgaaaatccagtggaggaagccaaaaggaaaaagcagttaggacaggttgaaattgggtcttcaaaaccagatatggaaaaatcacacttcacaagagatccatcccagcttaaaggtgtccttgttcgagcatcactgaaaaaaagcacaatgggatttggttttactattattggtggagatagacctgatgagttcctacaagtgaaaaatgtgctgaaagatggtcccgcagctcaggatgggaaaattgcaccaggcgatgttattgtagacatcaatggcaactgtgtcctcggtcacactcatgcagatgttgtccagatgtttcaattggtacctgtcaatcagtatgtaaacctcactttatgtcgtggttatccacttcctgatgacagtgaagatcctgttgtggacattgttgctgctacccctgtcatcaatggacagtcattaaccaagggagagacttgcatgaatcctcaggattttaagccaggagcaatggttctggagcagaatggaaaatcgggacacactttgactggtgatggtctcaatggaccatcagatgcaagtgagcagagagtatccatggcatcgtcaggcagctcccagcctgaactagtgactatccctttgattaagggccctaaagggtttgggtttgcaattgctgacagccctactggacagaaggtgaaaatgatactggatagtcagtggtgtcaaggccttcagaaaggagatataattaaggaaatataccatcaaaatgtgcagaatttaacacatctccaagtggtagaggtgctaaagcagtttccagtaggtgctgatgtaccattgcttatcttaagaggaggtcctccttcaccaaccaaaactgccaaaatgaaaacagataaaaaggaaaatgcaggaagtttggaggccataaatgagcctattcctcagcctatgccttttccaccgagcattatcaggtcaggatccccaaaattggatccttctgaggtctacctgaaatctaagactttatatgaagataaaccaccaaacaccaaagatttggatgtttttcttcgaaaacaagagtcagggtttggcttcagggtgctaggaggagatggacctgaccagtctatatatattggggctattattcccctgggagcagctgagaaagatggtcggctccgcgcagctgatgaactaatgtgcattgatggaattcctgttaaagggaaatcacacaaacaagtcttggacctcatgacaactgctgctcgaaatggccatgtgttactaactgtcagacggaagatcttctatggagaaaaacaacccgaggacgacagctctcaggccttcatttcaacacagaatggatctccccgcctgaaccgggcagaggtcccagccaggcctgcaccccaggagccctatgatgttgtcttgcaacgaaaagaaaatgaaggatttggctttgtcatcctcacctccaaaaacaaaccacctccaggagttattcctcataaaattggccgagtcatagaaggaagtccggctgaccgctgtggaaaactgaaagttggagatcatatctctgcagtgaatgggcagtccattgttgaactgtctcatgataacattgttcagctgatcaaagatgctggtgtcaccgtcacactaacggtcattgctgaagaagagcatcatggtccaccatcaggaacaaactcagccaggcaaagcccagccctgcagcacaggcccatgggacagtcacaggccaaccacatacctggggacagaagtgccctagaaggtgaaattggaaaagatgtctccacttcttacagacattcttggtcagaccacaagcaccttgcacagcctgacaccgcagtaatttcagttgtaggcagtcggcacaatcagaaccttggttgttatccagtagagctggagagaggcccccggggctttggattcagcctccgaggggggaaggagtacaacatggggctgttcatccttcgtcttgctgaagatggtcctgccatcaaagatggcagaattcatgttggtgaccagattgttgaaatcaatggggaacctacacaaggaatcacacatactcgagcaattgagctcattcaggctggtggaaataaagttcttcttcttttgaggccaggaactggcttgatacctgaccatggtttggctccttccggtctgtgctcctacgtgaaacccgagcaacattaaggctttcagggcttttcttggtctttccttaaaaagacttggtaaatttgcatgtcttgtaaatcactttcttcttttgttttcttttaaattaaaaatgatgctattaaatacatctatttctatcttctgcacttttcagtcttcttttgacattaaatttgacagcttaa

SEQ ID NO: 152683 - DNA, 1794 bp, Homo sapiens
  Payload ID: 10042
  Gene Symbol: MBOAT1
  Gene Name: membrane bound O-acyltransferase domain containing 1
  Uniprot ID: Q6ZNC8
  ENST ID: ENST00000324607
  CDS Start-End: 166-1653
gagagtttgcgccggttcgcattccccggcctcccgttcgctcccccgcgaaccaggcggccgtgcgcctctcggggcaaccacccaagagcacccgggcgggaggacgccgagcagggggtgttgcgggctgggacaggggcagccacctcccgaagatgcaggatggcagcagagccgcagccgtccagcctttcctaccgcaccacgggctccacctacctgcacccgctcagcgagctcctgggcatcccgctggaccaggtgaattttgtggtatgccagcttgttgctctgtttgctgctttctggtttcgcatctacttacgtcctggtacaaccagctctgatgtccggcatgcggttgccaccatttttggcatctattttgtcatcttttgtttcggctggtactctgtgcatctttttgtgctggtgttaatgtgctatgcaatcatggtcactgctagtgtatccaatattcacagatattccttttttgtagcaatgggatatcttacaatatgccacatcagccgaatatacatcttccactatggaattctcactacggatttttctgggcctctgatgattgtcactcagaagatcacaaccttggcattccaggttcatgatggattaggtcgaagagctgaagacctttctgctgaacaacatcgacttgctatcaaagtgaaaccctcttttttggaatacttaagttaccttctcaatttcatgagtgtcatagctggtccttgtaacaatttcaaggactacatagccttcattgaggggaagcatatacacatgaagttgctggaggtgaactggaagcgaaaaggtttccacagcttgccagaaccttctcccacaggagctgtgatacacaagttgggcatcaccttggtgtctctccttttgtttttgacgctaacgaagacctttcctgtcacctgccttgtggatgactggtttgtccataaagcaagctttccggctcgactctgctacttatatgttgtcatgcaagcctcaaagcccaagtattactttgcatggacattagctgatgcagtgaataacgcagctggctttgggttcagcggagtggataagaatgggaatttctgttgggatctgctttcgaacctaaacatctggaaaattgagactgccacaagtttcaaaatgtacttggaaaactggaatattcagacagctacttggctaaagtgtgtgtgctatcagcgggttccatggtaccccacggtgctaaccttcatcctgtctgctttgtggcatggtgtctaccctggatactattttaccttcttaactggaattcttgtcacattagcagctagagcggtcaggaacaactacagacattacttcctttcttcaagagctctcaaggctgtgtatgatgcaggcacctgggccgtcactcagctggctgtctcttacacggtagcaccctttgtgatgttggcagttgaaccgaccatcagcttatacaagtccatgtacttttatttgcacatcataagtctcctgataatactatttctgccaatgaaaccacaagctcatacgcaaaggcggcctcagactctgaactctattaataagagaaaaacagattgatacctccaagagaagcggaacaagcaaaactgcagaacgttcgaaagatgagatgacaaggcttcaagggctcctccggtggcttagaggcgatgtttacatgcatctttattttgttcttttttaaagtgcagggagtat

SEQ ID NO: 152684 - DNA, 7751 bp, Homo sapiens
  Payload ID: 10043
  Gene Symbol: MBOAT2
  Gene Name: membrane bound O-acyltransferase domain containing 2
  Uniprot ID: Q6ZWT7
  ENST ID: ENST00000305997
  CDS Start-End: 200-1762
cgggcgcgggaggaggtggcggcggagggggaggtgcgagccgggcaccgcccccggcccctccccggccttccccgcgcagagctccgaccgcgggcggcccaggggcgggcgcgccgctgcatccccatcctcgtcgtcgcccggcacagcgcgagcgggcgagcggcgcgggcggccggagcgccgaggcccggccatggccaccaccagcaccacgggctccaccctgctgcagcccctcagcaacgccgtgcagctgcccatcgaccaggtcaactttgtagtgtgccaactctttgccttgctagcagccatttggtttcgaacttatctacattcaagcaaaactagctcttttataagacatgtagttgctacccttttgggcctttatcttgcacttttttgctttggatggtatgccttacactttcttgtacaaagtggaatttcctactgtatcatgatcatcataggagtggagaacatgcacaattactgctttgtgtttgctctgggatacctcacagtgtgccaagttactcgagtctatatctttgactatggacaatattctgctgatttttcaggcccaatgatgatcattactcagaagatcactagtttggcttgcgaaattcatgatgggatgtttcggaaggatgaagaactgacttcctcacagagggatttagctgtaaggcgcatgccaagcttactggagtatttgagttacaactgtaacttcatggggatcctggcaggcccactttgctcttacaaagactacattactttcattgaaggcagatcataccatatcacacaatctggtgaaaatggaaaagaagagacacagtatgaaagaacagagccatctccaaatactgcggttgttcagaagctcttagtttgtgggctgtccttgttatttcacttgaccatctgtacaacattacctgtggagtacaacattgatgagcattttcaagctacagcttcgtggccaacaaagattatctatctgtatatctctcttttggctgccagacccaaatactattttgcatggacgctagctgatgccattaataatgctgcaggctttggtttcagagggtatgacgaaaatggagcagctcgctgggacttaatttccaatttgagaattcaacaaatagagatgtcaacaagtttcaagatgtttcttgataattggaatattcagacagctctttggctcaaaagggtgtgttatgaacgaacctccttcagtccaactatccagacgttcattctctctgccatttggcacggggtatacccaggatattatctaacgtttctaacaggggtgttaatgacattagcagcaagagctatgagaaataactttagacattatttcattgaaccttcccaactgaaattattttatgatgttataacatggatagtaactcaagtagcaataagttacacagttgtgccatttgtgcttctttctataaaaccatcactcacgttttacagctcctggtattattgcctgcacattcttggtatcttagtattattgttgttgccagtgaaaaaaactcaaagaagaaagaatacacatgaaaacattcagctctcacaatccaaaaagtttgatgaaggagaaaattctttgggacagaacagtttttctacaacaaacaatgtttgcaatcagaatcaagaaatagcctcgagacattcatcactaaagcagtgatcgggaaggctctgagggctgttttttttttttgatgttaacagaaaccaatcttagcaccttttcaaggggtttgagtttgttggaaaagcagttaactggggggaaatggacagttatagataaggaatttcctgtacaccagattggaaatggagtgaaacaagccctcccatgccatgtctccgtgggccacgccttatgtaagaatatttccatatttcagtgggcactcccaacctcagcacttgtccgtagggtcacacgcgtgccctgttgctgaatgtatgttgcgtatcccaaggcactgaagaggtggaaaaataatcgtgtcaatctggatgatagagagaaattaacttttccaaatgaatgtcttgccttaaaccctctatttcctaaaatattgttcctaaatggtattttcaagtgtaatattgtgagaacgctactgcagtagttgatgttgtgtgctgtaaaggattttaggaggaatttgaaacaggatatttaagagtgtggatatttttaaaatgcaataaacatctcagtatttgaagggttttcttaaagtatgtcaaatgactacaatccatagtgaaactgtaaacagtaatggacgccaaattataggtagctgattttgctggagagtttaattaccttgtgcagtcaaagagcgcttccagaaggaatctcttaaaacataatgagaggtttggtaatgtgatattttaagcttattctttttcttaaaagagagaggtgacgaaggaaggcaggaatgaagaagcactgcgtggcctccggtggaatgcacggggcacagccgcgactctgcaggcagcttcccccccatgccagggctctgcgccgtcatgtgagacttaaaaaaaaagttgaatgacttcgtgatactttggacttctaaattaaatttatcaggcataaattatgtagaattagaggctttgaaaataatactggtaggttgctcaaaggttttgaaagagaaatcgctaggtaggttactatctggctaatccatttcttatccttgacaatttaattcatatttgggaaacttttagggaaatgaaaaataaaagtcactgagtctgggtgacattttttaagaataatataaattcagtttcaaactcttctcacattaaaattttgctgtgaactcttactaaaatgagttttaggttctgtaagtggaaaaatgtgcttttattttatgggccatttttaccacaactaatcttgccttggattactaagcatctcctgcgatcccacagaggactgtggtggccacaggagctgaaagcagaagagtgggatttgatgccaggcagtggagtggcctcagccccagattgtacctcctgccctgtaggaggggagggggcaaagccttctgacttcacctttgtttgacctatgtatggaacttacttttactttttgccttaaatttttaatgaaatgcaaattttctgtgatggggttctctctctctttttttcggggggtggagtcactaataaatttgcaaatgaagttaaagacaaggcaaccatctggcttatgctatataatacttcatttaaagaagaaaggaaaagcaaatgcacttgcagcttttgaggtctcagcaaaaatgggcatgtgtcttttttgaagtttagaaatatcctaatctatttttatttatctaaaagtaagtgttttccggctgataaggctaaccctacccaggaaaggattgataactaaataaatttcctctgttttcccatgcattgaaattatgttggctgagcatggtggctcacacctgtaatcctagcactttgggaggccgaggtgggcggatcacttgaggtcaggagttggagaccagcctggccaacgtggtgaatccccgtctctactgaaaacacaaaaattagacgggcatggtggcgcacacctgtaatcccagctacttgggaggctgaggcaggagaattgcttgaacctgggaggtggaggttgcagtgagctaaaattgtgccactgcactccagcctgggtgacagaggaagactccgtctcacaaaaaaaaaaaaagaaaaaagaaattatgccagctgtttaatgtgagagaatagaaagaatgttcatggaatgtacctgccctgtaaaatgtttgatcattttcattaatgttgcagagaatccgactgctattaagagaaagtgaacaaattaagaatttaaaagacaggttcaggcatgtcataagtgaaaacaagaaggcttaatacaaacttgttgggttttgttcgtgtgtgtgtgtgtgtgtgtgtgtgtgtttttttttggttcagcctatctagccacctacaaataatcacatttctgttacctgaatttatttctcagcctgtaaaccttagtcactgttacctgtttcttgctcagtgaatatgatcttggcactgtcatctagaaagcaagatatttgattggttttctggttccttcgaagataataattccatatccagtttgactgattttcatacccctgaatcaactagttattttcatgaaatggtttttggatatctctcctctagtttggagaagtaataatcacaaagattaatattttgcttctagtacttacagtagaagaattttaaactggtacgtctactcctgttaaatagaaaggggattcgttgtattatgtgcttgcttttttttaatcaatagaataagattcaatgcatatttatgttttatattttccactattcaggtatcatgaaatcactctagagatgatcaatcaacatcatatttatacttttggttaattatatactactcagggaaaaaatgaacaaaaataactactcatccttcaatttcattttcttgaaacagtaagagtataatttggtatgcctcagctgtcaccattttataagtggctcattctgttcttaaagtaagtatttttattggaactcagggtaattgggggaatttatttagcttctaaaatatccggcaggatagagaagatttatttggcttcaaaaatgtctggtgaccacttctcttattagccactactgcccatttgcttcaaaaatatatttattggtctccaccatgtgtgacacacacaggatttccaaacataccacttttgagaaaaatgtgcagtaaaaaggaggtttctagaaagtgacagtaactcacatttaagcactagctgacctaggaggagacctggatcttcattctggttctgcctttcatgagacttaagacttggaggagccacctgtcctgtagaccccaagttcctcagccataagcaaacgggttaatcctaagagttcaggaccagttgggtgtcgtgaacggagccattagcaaggtctgtaggattcaaggacttgggcacattcacagtccacactattgtcatggtcattgacttactacttgagctcaaagccctgacatttcaaaaggttgtcatgataacagtgaaacctctgaatcccttaaatcagaaggcatggcaacatactttttctactggcaatagctcttacaatgagtgtttcataatgaaatagtctctgctgaagaaaacatgttttccttttgctctctctgctttgttggtttctgtgctgtgtggaattggagaagatatatgctctgaaatattttatacagattactgactactggacagggtttaccactatataacatctcaaagttattcaaggatatttaaagcatatttagtttagttacaccttattttaaaccgcagaaaacaatagctttaaaatttttgccattaaaataattataaatttatacttttactcaaggactagatcacagttttaggacaaaaatctctcctatttaaagttcataccttgtaagtatttagtttgtatattcatgaacaaatctggacatttatactttttttgtttccttatcaactgttcacaattattagttaattggtcttaacagttctacattataattgaaagaaaaattacttgagaaaataattgtttcagaatagtgcctactatatctgtgtcagctaaaaatttgtccagagttttagatataagctagtattttgtggagttttatccaggcgttaatagttcttcctggctgaaatttaatataggtgcagaatcctaaataacactgtgagatgtaatcttaactgccctcaataccttataaaactgctgcatttaacccagtgtgcatttaatgagtggctggtcgttgatacactcatcttagatgctgaaatttctgttttctccagcccttgtaaaagtgggtttcttgatgaacgcgtgctcccaatgctgaagcaaaagatttgcatttaaggagagaaatacaccctgaaatttgagtttgaaagattagaacatagagggtctctacagtgtttttctgcaacaccaagtagtcaaatctatttatagaaactctgattacaacagaaattttaaaatgaaattttccacatcggtattttgtaggaaagctcttataatcaatgcttaagctgctttttgaggcttttcttgtacagaggttgcagccaattacattttaattggtaggctgctgaataatgtttttgtatgttttaaaataatatttattttaataggttttttaacattatgcaaatcccaataaagaactgacacgttccataggccattgactgggaaattttgtgaaacacagcctaaatacacagtttttacaccaactaatttgtcttgcctttaaaactgattataactcttctttaagtacaacttttataaagaaaaaatacaacactaagactgtatgttctgtaaattatagtgtgatgacccatgcagaaccgctgtctgaagcttactcagcgattcatagccatctccagccatgttttatcaaatcacacactaaaaataaatggaaatgctacagtgaaaaaccaaaagttacagagcaacataagtaaaatgactaggcagtttcttagtaacatgtttgaaatgggaaaggtgactgactgcctttcaccagagtcttagctgtttcacgttcactattttaggttaattttcttgggaaatcaatttgaatattcccccctgtccttttgcattaaaggacgaaaatatatgttgagagtttgacagactttttaaatatgcctctttcccaattttatgtatttttggttctgcgcacacagatttatcaatgaagtacatttgcctctggctttatcacaaggaaaaaggaatcaaacattgaacacaaatgtgttccaaaccagtcttgtccatcttgtcacttttatgtgactgctcctctgaaccagaaggggcacgatagaaggccataggaatgaaagtaaatcattcaggtgaagtgagaaattcttccatatacagagtgaaaatgtgtgatttcattcctgccttcctttaaacgttgtcttgatctctgcctagtagtagttgagccctcagtcgcccaaacatgaggagagacccaactccagcagccagaatttagtatttacatttgccttcccaagttgagaatagaatgtggtgttctgtgctttctgtttttattattccaaaatatttttttaaagaagtgttatttttcaacagattcataaattagttcctgatgtacggtaaattaaaactcccactgtgtcagtcaaactgagatgtgctcatttcataaccactcatttctagtctgtcagagctgcactggtggcttattgctggtttttaaaggtgtttttaacttacatgtaacatgtttaggacatgttttttttttctaatttgtgtgtctttacaactgattaaacagtagtttaaaaata

SEQ ID NO: 152685 - DNA, 580 bp, Homo sapiens
  Payload ID: 10043
  Gene Symbol: MBOAT2
  Gene Name: membrane bound O-acyltransferase domain containing 2
  ENST ID: ENST00000462696
  CDS Start-End: 52-580
acagcgcgagcgggcgagcggcgcgggcggccggagcgccgaggcccggccatggccaccaccagcaccacgggctccaccctgctgcagcccctcagcaacgccgtgcagctgcccatcgaccaggctgcccgccacatgattcccgggtgtctttccccttccgtgtgtctcacgtacctggcagagtccacaggcgaaaagtatgccttacactttcttgtacaaagtggaatttcctactgtatcatgatcatcataggagtggagaacatgcacaattactgctttgtgtttgctctgggatacctcacagtgtgccaagttactcgagtctatatctttgactatggacaatattctgctgatttttcaggcccaatgatgatcattactcagaagatcactagtttggcttgcgaaattcatgatgggatgtttcggaaggatgaagaactgacttcctcacagagggatttagctgtaaggcgcatgccaagcttactggagtatttgagttacaactgtaacttcatggggatcctggcaggcccactttgctcttacaaagactacatta

SEQ ID NO: 152686 - DNA, 1227 bp, Homo sapiens
  Payload ID: 10043
  Gene Symbol: MBOAT2
  Gene Name: membrane bound O-acyltransferase domain containing 2
  ENST ID: ENST00000471753
  CDS Start-End: 1-477
aaagactacattactttcattgaaggcagatcataccatatcacacaatctggtgaaaatggaaaagaagagacacagtatgaaagaacagagccatctccaaatactgcggttgttcagaagctcttagtttgtgggctgtccttgttatttcacttgaccatctgtacaacattacctgtggagtacaacattgatgagcattttcaagctacagcttcgtggccaacaaagattatctatctgtatatctctcttttggctgccagacccaaatactattttgcatggacgctagctgatgccattaataatgctgcaggctttggtttcagagggtatgacgaaaatggagcagctcgctgggacttaatttccaatttgagaattcaacaaatagagatgtcaacaagtttcaagatgtttcttgataattggaatattcagacagctctttggctcaaaagaattttctgaaggagagataaaaactgagttaaataaagatgatcagaatggatgagaaataactttagacattatttcattgaaccttcccaactgaaattattttatgatgttataacatggatagtaactcaagtagcaataagttacacagttgtgccatttgtgcttctttctataaaaccatcactcacgttttacagctcctggtattattgcctgcacattcttggtatcttagtattattgttgttgccagtgaaaaaaactcaaagaagaaagaatacacatgaaaacattcagctctcacaatccaaaaagtttgatgaaggagaaaattctttgggacagaacagtttttctacaacaaacaatgtttgcaatcagaatcaagaaatagcctcgagacattcatcactaaagcagtgatcgggaaggctctgagggctgttttttttttttgatgttaacagaaaccaatcttagcaccttttcaaggggtttgagtttgttggaaaagcagttaactggggggaaatggacagttatagataaggaatttcctgtacaccagattggaaatggagtgaaacaagccctcccatgccatgtctccgtgggccacgccttatgtaagaatatttccatatttcagtgggcactcccaacctcagcacttgtccgtagggtcacacgcgtgccctgttgctgaatgtatgttgcgtatcccaaggcactgaagaggtggaaaaataatcg

SEQ ID NO: 152687 - DNA, 754 bp, Homo sapiens
  Payload ID: 10043
  Gene Symbol: MBOAT2
  Gene Name: membrane bound O-acyltransferase domain containing 2
  ENST ID: ENST00000477073
  CDS Start-End: 96-236
ggggcgggcgcgccgctgcatccccatcctcgtcgtcgcccggcacagcgcgagcgggcgagcggcgcgggcggccggagcgccgaggcccggccatggccaccaccagcaccacgggctccaccctgctgcagcccctcagcaacgccgtgcagctgcccatcgaccagttactgctttgtgtttgctctgggatacctcacagtgtgccaagttactcgagtctatatctttgactatggacaatattctgctgatttttcaggcccaatgatgatcattactcagaagatcactagtttggcttgcgaaattcatgatgggatgtttcggaaggatgaagaactgacttcctcacagagggatttagctgtaaggcgcatgccaagcttactggagtatttgagttacaactgtaacttcatggggatcctggcaggcccactttgctcttacaaagactacattactttcattgaaggcagatcataccatatcacacaatctggtgaaaatggaaaagaagagacacagtatgaaagaacagagccatctccaaatactgcggttgttcagaagctcttagtttgtgggctgtccttgttatttcacttgaccatctgtacaacattacctgtggagtacaacattgatgagcattttcaagctacagcttcgtggccaacaaagattatctatctgtatatctctcttttggctgccagacccaaatactattttgcatggacgctag

SEQ ID NO: 152688 - DNA, 1512 bp, Homo sapiens
  Payload ID: 10044
  Gene Symbol: MBOAT4
  Gene Name: membrane bound O-acyltransferase domain containing 4
  Uniprot ID: Q96T53
  ENST ID: ENST00000320542
  CDS Start-End: 86-1393
agagacagcctggttgagattactcttggaggaaggcatcagttaaggacactggaaaagacaggctcttttgttctggttcctaatggagtggctttggctgttctttctccatcctatatcgttttaccagggggctgcatttccctttgcacttctcttcaattatctctgcatcatggattcattctccactcgtgccaggtacctctttctcctgactggaggaggtgccctggccgtggctgccatgggttcctacgccgtgctcgtcttcacccctgctgtctgcgctgtggctctcctctgttccctggctcctcagcaagtccacaggtggaccttctgctttcagatgagctggcagaccttgtgtcacctaggtctgcactacactgagtattatctgcatgagcctccttctgtgaggttctgcatcactctttcttctctcatgctcttgacccagagggtcacgtccctctctctggacatttgtgaggggaaagtgaaggcagcatctggaggcttcaggagcaggagctctttgtctgagcatgtgtgtaaggcactgccctatttcagctacttgctctttttccctgctctcctgggaggctctctgtgctccttccagcgatttcaggctcgtgttcaagggtccagtgctttgcatcccagacactctttctgggctctgagctggaggggtctgcagattcttggactagaatgcctaaacgtggcagtgagcagggtggtggatgcaggagcgggactgactgattgccagcaattcgagtgcatctatgtcgtgtggaccacagctgggcttttcaagctcacctactactcccactggatcctggacgactccctcctccacgcagcgggctttgggcctgagcttggtcagagccctggagaggagggatatgtccccgatgcagacatctggaccctggaaagaacccacaggatatctgtgttctcaagaaagtggaaccaaagcacagctcgatggctccgacggcttgtattccagcacagcagggcttggccgttgttgcagacatttgccttctctgcctggtggcatggactccatccaggacaggtgtttggtttcgtttgctgggccgtgatggtggaagctgactacctgattcactcctttgccaatgagtttatcagatcctggccgatgaggctgttctatagaaccctcacctgggcccacacccagttgatcattgcctacatcatgctggctgtggaggtcaggagtctctcctctctctggttgctctgtaattcgtacaacagtgtctttcccatggtgtactgtattctgcttttgctattggcgaagagaaagcacaaatgtaactgacatctttccctggctttcaccttaaacacccaggaaacattttagaaagtgccagatgacgcatcgataatgcatacatttgaacttttccataataaaattttttctaaagttttgga

SEQ ID NO: 152689 - DNA, 2529 bp, Homo sapiens
  Payload ID: 10045
  Gene Symbol: MBOAT7
  Gene Name: membrane bound O-acyltransferase domain containing 7
  Uniprot ID: Q96N66
  ENST ID: ENST00000245615
  CDS Start-End: 482-1900
gttctcgactattgccgaagtgagccgaagtttgtggccccgcttccggagaactcaagctcccgattgtgcccgaaggaacccgaagggagaccccgcctcattcctcacgccgagctccagaccccgcctcctttccagagcccgtctgttccccttcgggtccaaagcttttggctcctccttgttccgagcccgaaggcccgccccttcacgtactcggagctcggatcccagtgtggacctggactcgaatcccgttgccgactcgcgctctcggcttctgctccggggcttcttccctgcccgcccggggccctgaccgtggcttcttccccggcctgatctgcgcagcccggcgggcgcccagaaggagcaggcggcgcgggggcgcgctgggcgggggaggcgtggccggagctgcggcggcaagcgggctgggactgctcggccgcctcctgcccggcgagcagctcagaccatgtcgcctgaagaatggacgtatctagtggttcttcttatctccatccccatcggcttcctctttaagaaagccggtcctgggctgaagagatggggagcagccgctgtgggcctggggctcaccctgttcacctgtggcccccacactttgcattctctggtcaccatcctcgggacctgggccctcattcaggcccagccctgctcctgccacgccctggctctggcctggactttctcctatctcctgttcttccgagccctcagcctcctgggcctgcccactcccacgcccttcaccaatgccgtccagctgctgctgacgctgaagctggtgagcctggccagtgaagtccaggacctgcatctggcccagaggaaggaaatggcctcaggcttcagcaaggggcccaccctggggctgctgcccgacgtgccctccctgatggagacactcagctacagctactgctacgtgggaatcatgacaggcccgttcttccgctaccgcacctacctggactggctggagcagcccttccccggggcagtgcccagcctgcggcccctgctgcgccgcgcctggccggccccgctcttcggcctgctgttcctgctctcctctcacctcttcccgctggaggccgtgcgcgaggacgccttctacgcccgcccgctgcccgcccgcctcttctacatgatccccgtcttcttcgccttccgcatgcgcttctacgtggcctggattgccgccgagtgcggctgcattgccgccggctttggggcctaccccgtggccgccaaagcccgggccggaggcggccccaccctccaatgcccaccccccagcagtccggagaaggcggcttccttggagtatgactatgagaccatccgcaacatcgactgctacagcacagatttctgcgtgcgggtgcgcgatggcatgcggtactggaacatgacggtgcagtggtggctggcgcagtatatctacaagagcgcacctgcccgttcctatgtcctgcggagcgcctggaccatgctgctgagcgcctactggcacggcctccacccgggctactacctgagcttcctgaccatcccgctgtgcctggctgccgagggccggctggagtcagccctgcgggggcggctgagcccagggggccagaaggcctgggactgggtgcactggttcctgaagatgcgcgcctatgactacatgtgcatgggcttcgtgctgctctccttggccgacacccttcggtactgggcctccatctacttctgtatccacttcctggccctggcagccctggggctggggctggctttaggtgggggcagccccagccggcggaaggcagcatcccagcccaccagccttgccccggagaagctccgggaggagtaagctgtcacgacgctccctctgccagctggtcccgggaattctgtgaaccaggctgctgtctcctccccagaaagagtccttaccttggagagggtcctggagagaatttcctcttccccagctaaataccctgcctgcaactgaagcagacccgggggtgtcctccctgccctctgcccagaggccacctccactcctacaaaatcaaagtattgtccagacaagagtcactggcccctgctccagcttctgggtatccagagagcactgcacttccccaaaacggaaggggcccctgggcagtgggttttgggcaaattccctttctttgcatccacaatgtggggtcggagcttgggggcaggtcctgggagtgggaagcctcttccttgtgtctttcgctccacttttagctcatcgcaccaatattgcagacttggaaggaagcataagcttcccatttcacaaaggggaaactgaggtgcgggtgcgcgggcctggggacggccgtcccatggcttccatctgagccacctcgggaccccagcactcctggcgccctcttctcatcgcttggcctatgacaggtcaccgtgtgtaaatctttcccaataaagtgttgcacaaag

SEQ ID NO: 152690 - DNA, 2076 bp, Homo sapiens
  Payload ID: 10045
  Gene Symbol: MBOAT7
  Gene Name: membrane bound O-acyltransferase domain containing 7
  Uniprot ID: Q96N66
  ENST ID: ENST00000338624
  CDS Start-End: 248-1447
gactcgaatcccgttgccgactcgcgctctcggcttctgctccggggcttcttccctgcccgcccggggccctgaccgtggcttcttccccggcctgatctgcgcagcccggcgggcgcccagaaggagcaggcggcgcgggggcgcgctgggcgggggaggcgtggccggagctgcggcggcaagcgggctgggactgctcggccgcctcctgcccggcgagcagctcaggtcctgggctgaagagatggggagcagccgctgtgggcctggggctcaccctgttcacctgtggcccccacactttgcattctctggtcaccatcctcgggacctgggccctcattcaggcccagccctgctggtgagcctggccagtgaagtccaggacctgcatctggcccagaggaaggaaatggcctcaggcttcagcaaggggcccaccctggggctgctgcccgacgtgccctccctgatggagacactcagctacagctactgctacgtgggaatcatgacaggcccgttcttccgctaccgcacctacctggactggctggagcagcccttccccggggcagtgcccagcctgcggcccctgctgcgccgcgcctggccggccccgctcttcggcctgctgttcctgctctcctctcacctcttcccgctggaggccgtgcgcgaggacgccttctacgcccgcccgctgcccgcccgcctcttctacatgatccccgtcttcttcgccttccgcatgcgcttctacgtggcctggattgccgccgagtgcggctgcattgccgccggctttggggcctaccccgtggccgccaaagcccgggccggaggcggccccaccctccaatgcccaccccccagcagtccggagaaggcggcttccttggagtatgactatgagaccatccgcaacatcgactgctacagcacagatttctgcgtgcgggtgcgcgatggcatgcggtactggaacatgacggtgcagtggtggctggcgcagtatatctacaagagcgcacctgcccgttcctatgtcctgcggagcgcctggaccatgctgctgagcgcctactggcacggcctccacccgggctactacctgagcttcctgaccatcccgctgtgcctggctgccgagggccggctggagtcagccctgcgggggcggctgagcccagggggccagaaggcctgggactgggtgcactggttcctgaagatgcgcgcctatgactacatgtgcatgggcttcgtgctgctctccttggccgacacccttcggtactgggcctccatctacttctgtatccacttcctggccctggcagccctggggctggggctggctttaggtgggggcagccccagccggcggaaggcagcatcccagcccaccagccttgccccggagaagctccgggaggagtaagctgtcacgacgctccctctgccagctggtcccgggaattctgtgaaccaggctgctgtctcctccccagaaagagtccttaccttggagagggtcctggagagaatttcctcttccccagctaaataccctgcctgcaactgaagcagacccgggggtgtcctccctgccctctgcccagaggccacctccactcctacaaaatcaaagtattgtccagacaagagtcactggcccctgctccagcttctgggtatccagagagcactgcacttccccaaaacggaaggggcccctgggcagtgggttttgggcaaattccctttctttgcatccacaatgtggggtcggagcttgggggcaggtcctgggagtgggaagcctcttccttgtgtctttcgctccacttttagctcatcgcaccaatattgcagacttggaaggaagcataagcttcccatttcacaaaggggaaactgaggtgcgggtgcgcgggcctggggacggccgtcccatggcttccatctgagccacctcgggaccccagcactcctggcgccctcttctcatcgcttggcctatgacaggtcaccgtgtgtaaatctttcccaataaagtgttgcacaaag

SEQ ID NO: 152691 - DNA, 1797 bp, Homo sapiens
  Payload ID: 10045
  Gene Symbol: MBOAT7
  Gene Name: membrane bound O-acyltransferase domain containing 7
  Uniprot ID: Q96N66
  ENST ID: ENST00000391754
  CDS Start-End: 339-1373
cccgtctgttccccttcgggtccaaagcttttggctcctccttgttccgagcccgaaggcccgccccttcacgtactcggagctcggatcccagtgtggacctggactcgaatcccgttgccgactcgcgctctcggcttctgctccggggcttcttccctgcccgcccggggccctgaccgtggcttcttccccggcctgatctgcgcagcccggcgggcgcccagaaggagcaggcggcgcgggggcgcgctgggcgggggaggcgtggccggagctgcggcggcaagcgggctgggactgctcggccgcctcctgcccggcgagcagctcagaccatgtcgcctgaagaatggacgtatctagtggttcttcttatctccatccccatcggcttcctctttaagaaagccggtcctgggctgaagagatggggagcagccgctgtgggcctggggctcaccctgttcacctgtggcccccacactttgcattctctggtcaccatcctcgggacctgggccctcattcaggcccagccctgctcctgccacgccctggctctggcctggactttctcctatctcctgttcttccgagccctcagcctcctgggcctgcccactcccacgcccttcaccaatgccgtccagctgctgctgacgctgaagctggtgagcctggccagtgaagtccaggacctgcatctggcccagaggaaggaaatggcctcaggcttcagcaaggggcccaccctggggctgctgcccgacgtgccctccctgatggagacactcagctacagctactgctacgtgggaatcatgacaggcccgttcttccgctaccgcacctacctggactggctggagcagcccttccccggggcagtgcccagcctgcggcccctgctgcgccgcgcctggccggccccgctcttcggcctgctgttcctgctctcctctcacctcttcccgctggaggccgtgcgcgaggacgccttctacgcccgcccgctgcccgcccgcctcttctacatgatccccgtcttcttcgccttccgcatgcgcttctacgtggcctggattgccgccgagtgcggctgcattgccgccggctttggggcctaccccgtggccgccaaagcccgggccggaggcggccccaccctccaatgcccaccccccagcagtccggagaaggcggcttccttggagtatgactatgagaccatccgcaacatcgactgctacagcacagatttctgcgtgcgggtgcgcgatggcatgcggtactggaacatgacggtgcagtggtggctggcgcagtatatctacaagagcgcacctgcccgttcctatgtcctgcggtgagtgagcccgcccagtctcaggtgacactgcagaactacatctcccagcaggccccagggtagcctgcagcgtccctggctgggcccctgcccccggaggctcatgggaattgtagtttgtttagcctggttttgccctgcctctaattatagtggcagcatgccggtgtaaaatcgttccccctctcggggcctcagttgctacttctgtaaagtcagcctcactcagcagaagcaatgtactgagtcctgtggactcaatagccagccttcctggaatcttggccgtccaggttatggagaaaccttgaggagttagttgacctcttagttgcctcaagtgttgaatggagtgaatgctatttattactggtttcataggtagatagaaggactaaatgtgataaaatgtgaaatgtatttaa

SEQ ID NO: 152692 - DNA, 876 bp, Homo sapiens
  Payload ID: 10045
  Gene Symbol: MBOAT7
  Gene Name: membrane bound O-acyltransferase domain containing 7
  ENST ID: ENST00000414665
  CDS Start-End: 109-876
cggcggcagggtctctgcgggctggcgggtgcggggcggccccggaggcgcgttggaactcggggctggcgcaaccgcctgtggctctgccggggatgcgctgggaccatgtcgcctgaagaatggacgtatctagtggttcttcttatctccatccccatcggcttcctctttaagaaagccggtcctgggctgaagagatggggagcagccgctgtgggcctggggctcaccctgttcacctgtggcccccacactttgcattctctggtcaccatcctcgggacctgggccctcattcaggcccagccctgctcctgccacgccctggctctggcctggactttctcctatctcctgttcttccgagccctcagcctcctgggcctgcccactcccacgcccttcaccaatgccgtccagctgctgctgacgctgaagctggtgagcctggccagtgaagtccaggacctgcatctggcccagaggaaggaaatggcctcaggcttcagcaaggggcccaccctggggctgctgcccgacgtgccctccctgatggagacactcagctacagctactgctacgtgggaatcatgacaggcccgttcttccgctaccgcacctacctggactggctggagcagcccttccccggggcagtgcccagcctgcggcccctgctgcgccgcgcctggccggccccgctcttcggcctgctgttcctgctctcctctcacctcttcccgctggaggccgtgcgcgaggacgccttctacgcccgcccgctgcccgcccgcctcttctacatgatccccgtcttcttcgccttccgcatgcgcttctacgtggcctggattgccgccgagtgcggctgc

SEQ ID NO: 152693 - DNA, 2033 bp, Homo sapiens
  Payload ID: 10045
  Gene Symbol: MBOAT7
  Gene Name: membrane bound O-acyltransferase domain containing 7
  ENST ID: ENST00000437868
  CDS Start-End: 110-322
ggagcaggcggcgcgggggcgcgctgggcgggggaggcgtggccggagctgcggcggcaagcgggctgggactgctcggccgcctcctgcccggcgagcagctcagaccatgtcgcctgaagaatggacgtatctagtggttcttcttatctccatccccatcggcttcctctttaagaaagccggtcctgggctgaagagatggggagcagccgctgtgggcctggggctcaccctgttcacctgtggcccccacactttgcattctctggtcaccatcctcgggacctgggccctcattcaggcccagccctgctggtgagcctggccagtgaagtccaggacctgcatctggcccagaggaaggaaatggcctcaggcttcagcaaggggcccaccctggggctgctgcccgacgtgccctccctgatggagacactcagctacagctactgctacgtgggaatcatgacaggcccgttcttccgctaccgcacctacctggactggctggagcagcccttccccggggcagtgcccagcctgcggcccctgctgcgccgcgcctggccggccccgctcttcggcctgctgttcctgctctcctctcacctcttcccgctggaggccgtgcgcgaggacgccttctacgcccgcccgctgcccgcccgcctcttctacatgatccccgtcttcttcgccttccgcatgcgcttctacgtggcctggattgccgccgagtgcggctgcattgccgccggctttggggcctaccccgtggccgccaaagcccgggccggaggcggccccaccctccaatgcccaccccccagcagtccggagaaggcggcttccttggagtatgactatgagaccatccgcaacatcgactgctacagcacagatttctgcgtgcgggtgcgcgatggcatgcggtactggaacatgacggtgcagtggtggctggcgcagtatatctacaagagcgcacctgcccgttcctatgtcctgcggagcgcctggaccatgctgctgagcgcctactggcacggcctccacccgggctactacctgagcttcctgaccatcccgctgtgcctggctgccgagggccggctggagtcagccctgcgggggcggctgagcccagggggccagaaggcctgggactgggtgcactggttcctgaagatgcgcgcctatgactacatgtgcatgggcttcgtgctgctctccttggccgacacccttcggtactgggcctccatctacttctgtatccacttcctggccctggcagccctggggctggggctggctttaggtgggggcagccccagccggcggaaggcagcatcccagcccaccagccttgccccggagaagctccgggaggagtaagctgtcacgacgctccctctgccagctggtcccgggaattctgtgaaccaggctgctgtctcctccccagaaagagtccttaccttggagagggtcctggagagaatttcctcttccccagctaaataccctgcctgcaactgaagcagacccgggggtgtcctccctgccctctgcccagaggccacctccactcctacaaaatcaaagtattgtccagacaagagtcactggcccctgctccagcttctgggtatccagagagcactgcacttccccaaaacggaaggggcccctgggcagtgggttttgggcaaattccctttctttgcatccacaatgtggggtcggagcttgggggcaggtcctgggagtgggaagcctcttccttgtgtctttcgctccacttttagctcatcgcaccaatattgcagacttggaaggaagcataagcttcccatttcacaaaggggaaactgaggtgcgggtgcgcgggcctggggacggccgtcccatggcttccatctgagccacctcgggaccccagcactcctggcgccctcttctcatcgcttggcctatgacaggtcaccgtgtgtaaatctttcccaataaagtgttgcacaaaggca

SEQ ID NO: 152694 - DNA, 707 bp, Homo sapiens
  Payload ID: 10045
  Gene Symbol: MBOAT7
  Gene Name: membrane bound O-acyltransferase domain containing 7
  ENST ID: ENST00000449249
  CDS Start-End: 1-372
cacactttgcattctctggtcaccatcctcgggacctgggccctcattcaggcccagccctgctcctgccacgccctggctctggcctggactttctcctatctcctgttcttccgagccctcagcctcctgggcctgcccactcccacgcccttcaccaatgccgtccagctgctgctgacgctgaagctggtgagcctggccagtgaagtccaggacctgcatctggcccagaggaaggaaatggcctcaggcttcagcaaggggcccaccctggggctgctgcccgacgtgccctccctgatggagacactcagctacagctactgctacgtgggaatcatgacaggagcgcctggaccatgctgctgagcgcctactggcacggcctccacccgggctactacctgagcttcctgaccatcccgctgtgcctggctgccgagggccggctggagtcagccctgcgggggcggctgagcccagggggccagaaggcctgggactgggtgcactggttcctgaagatgcgcgcctatgactacatgtgcatgggcttcgtgctgctctccttggccgacacccttcggtactgggcctccatctacttctgtatccacttcctggccctggcagccctggggctggggctggctttaggtgggggcagccccagccggcggaaggcagcatcccagcccaccagc

SEQ ID NO: 152695 - DNA, 557 bp, Homo sapiens
  Payload ID: 10045
  Gene Symbol: MBOAT7
  Gene Name: membrane bound O-acyltransferase domain containing 7
  ENST ID: ENST00000453320
  CDS Start-End: 47-557
agctcaggtgggccagggtggcggcgcccagtggcgaggcgagaccatgtcgcctgaagaatggacgtatctagtggttcttcttatctccatccccatcggcttcctctttaagaaagccggtcctgggctgaagagatggggagcagccgctgtgggcctggggctcaccctgttcacctgtggcccccacactttgcattctctggtcaccatcctcgggacctgggccctcattcaggcccagccctgctcctgccacgccctggctctggcctggactttctcctatctcctgttcttccgagccctcagcctcctgggcctgcccactcccacgcccttcaccaatgccgtccagctgctgctgacgctgaagctggtgagcctggccagtgaagtccaggacctgcatctggcccagaggaaggaaatggcctcaggcttcagcaaggggcccaccctggggctgctgcccgacgtgccctccctgatggagacactcagctacagctactgctacgtgggaatcatgacaggcccgttcttccgctacc

SEQ ID NO: 152696 - DNA, 2471 bp, Homo sapiens
  Payload ID: 10045
  Gene Symbol: MBOAT7
  Gene Name: membrane bound O-acyltransferase domain containing 7
  Uniprot ID: Q96N66
  ENST ID: ENST00000431666
  CDS Start-End: 641-1840
taaggactcgactacctccgaagaaagccgaaacatgtggctccgcccacagtggcctcagctctccgttctcgactattgccgaagtgagccgaagtttgtggccccgcttccggagaactcaagctcccgattgtgcccgaaggaacccgaagggagaccccgcctcattcctcacgccgagctccagaccccgcctcctttccagagcccgtctgttccccttcgggtccaaagcttttggctcctccttgttccgagcccgaaggcccgccccttcacgtactcggagctcggatcccagtgtggacctggactcgaatcccgttgccgactcgcgctctcggcttctgctccggggcttcttccctgcccgcccggggccctgaccgtggcttcttccccggcctgatctgcgcagcccggcgggcgcccagaaggagcaggcggcgcgggggcgcgctgggcgggggaggcgtggccggagctgcggcggcaagcgggctgggactgctcggccgcctcctgcccggcgagcagctcagaccatgtcgcctgaagaatggacgtatctagtggttcttcttatctccatccccatcggcttcctctttaagaaagccggtcctgggctgaagagatggggagcagccgctgtgggcctggggctcaccctgttcacctgtggcccccacactttgcattctctggtcaccatcctcgggacctgggccctcattcaggcccagccctgctggtgagcctggccagtgaagtccaggacctgcatctggcccagaggaaggaaatggcctcaggcttcagcaaggggcccaccctggggctgctgcccgacgtgccctccctgatggagacactcagctacagctactgctacgtgggaatcatgacaggcccgttcttccgctaccgcacctacctggactggctggagcagcccttccccggggcagtgcccagcctgcggcccctgctgcgccgcgcctggccggccccgctcttcggcctgctgttcctgctctcctctcacctcttcccgctggaggccgtgcgcgaggacgccttctacgcccgcccgctgcccgcccgcctcttctacatgatccccgtcttcttcgccttccgcatgcgcttctacgtggcctggattgccgccgagtgcggctgcattgccgccggctttggggcctaccccgtggccgccaaagcccgggccggaggcggccccaccctccaatgcccaccccccagcagtccggagaaggcggcttccttggagtatgactatgagaccatccgcaacatcgactgctacagcacagatttctgcgtgcgggtgcgcgatggcatgcggtactggaacatgacggtgcagtggtggctggcgcagtatatctacaagagcgcacctgcccgttcctatgtcctgcggagcgcctggaccatgctgctgagcgcctactggcacggcctccacccgggctactacctgagcttcctgaccatcccgctgtgcctggctgccgagggccggctggagtcagccctgcgggggcggctgagcccagggggccagaaggcctgggactgggtgcactggttcctgaagatgcgcgcctatgactacatgtgcatgggcttcgtgctgctctccttggccgacacccttcggtactgggcctccatctacttctgtatccacttcctggccctggcagccctggggctggggctggctttaggtgggggcagccccagccggcggaaggcagcatcccagcccaccagccttgccccggagaagctccgggaggagtaagctgtcacgacgctccctctgccagctggtcccgggaattctgtgaaccaggctgctgtctcctccccagaaagagtccttaccttggagagggtcctggagagaatttcctcttccccagctaaataccctgcctgcaactgaagcagacccgggggtgtcctccctgccctctgcccagaggccacctccactcctacaaaatcaaagtattgtccagacaagagtcactggcccctgctccagcttctgggtatccagagagcactgcacttccccaaaacggaaggggcccctgggcagtgggttttgggcaaattccctttctttgcatccacaatgtggggtcggagcttgggggcaggtcctgggagtgggaagcctcttccttgtgtctttcgctccacttttagctcatcgcaccaatattgcagacttggaaggaagcataagcttcccatttcacaaaggggaaactgaggtgcgggtgcgcgggcctggggacggccgtcccatggcttccatctgagccacctcgggaccccagcactcctggcgccctcttctcatcgcttggcctatgacaggtcaccgtgtgtaaatctttcccaataaagtgttgcacaaaggc

SEQ ID NO: 152697 - DNA, 1585 bp, Homo sapiens
  Payload ID: 10045
  Gene Symbol: MBOAT7
  Gene Name: membrane bound O-acyltransferase domain containing 7
  ENST ID: ENST00000495279
  CDS Start-End: 1-545
ggaaggaaatggcctcaggcttcagcaaggggcccaccctggggctgctgcccgacgtgccctccctgatggagacactcagctacagctactgctacgtgggaatcatgacaggcccgttcttccgctaccgcacctacctggactggctggagcagcccttccccggggcagtgcccagcctgcggcccctgctgcgccgcgcctggccggccccgctcttcggcctgctgttcctgctctcctctcacctcttcccgctggaggccgtgcgcgaggacgccttctacgcccgcccgctgcccgcccgcctcttctacatgatccccgtcttcttcgccttccgcatgcgcttctacgtggcctggattgccgccgagtgcggctgcattgccgccggctttggggcctaccccgtggccgccaaagcccgggccggaggcggccccaccctccaatgcccaccccccagcaggtcaggcggcgcgagggaggcttcccaagacccagcagcccccacctccaagggctggctctgcccctagccgggaggagagcggggagcaaggggccagggccaccacctttttgagcagagtgtcgccccctcggcaaccatggcctgccagcccctgtcggtagggaaaagatccctggtactgacagatgccccttgttgctagcgcttgtcaccccgcagtgtggtgaactgccccctgtcgctaggaaaaggtggtaacttagcaaccctgtgccacccctctgttgccacagaagtgtcaccccccagaaccagattgttcctgcttgctggggatgccatcctttgctagtggtgggtcaccctctgttgctagggaaacggttccctagcaacagaacgccactatttgctagggaagcaggatccctagcaacagtagctcacctcctttttaccagaagttttgctctgttgctgcagatacggcactccctgcactgcccctttgttgctaggagctagcactgctccaccccgtgggatgtcctcacatagcagccctcagcagccctctgcaaggaaatagcaatttccaatccctgaccagtgctgttccccagcagagggcacgccattcctaccaactacagttacactgttgctaaggaagccaaacctccccctggaaactatgggttgacccttgttgccagagaggctccaccccccggcacctgcattgctaggcaagtcgcacggccatagctgtggactctcttgtggctgaggaagtattgcccccgtgttgctagggagatggcacccccggcaaccaggagtagactgcccttgtgttcctgacagctgcagtcagccttcccccaggggcttggactgcggctgggggaacagcctgttgatgtaaatgatgaactactactccctgctagggttgtcccctagtcgtcacaaactgccattctgttgtgggggtagtgacacccccacgggaatttgttaccactgccctaataaccgtgccctgacctccagctgctagagagaggatgtccccctagtaaagccaagcaggaattgaag

SEQ ID NO: 152698 - DNA, 911 bp, Homo sapiens
  Payload ID: 10045
  Gene Symbol: MBOAT7
  Gene Name: membrane bound O-acyltransferase domain containing 7
  ENST ID: ENST00000620231
  CDS Start-End: 144-911
agggtggcggcgcccagtggcgaggcgaggttacacggcggcagggtctctgcgggctggcgggtgcggggcggccccggaggcgcgttggaactcggggctggcgcaaccgcctgtggctctgccggggatgcgctgggaccatgtcgcctgaagaatggacgtatctagtggttcttcttatctccatccccatcggcttcctctttaagaaagccggtcctgggctgaagagatggggagcagccgctgtgggcctggggctcaccctgttcacctgtggcccccacactttgcattctctggtcaccatcctcgggacctgggccctcattcaggcccagccctgctcctgccacgccctggctctggcctggactttctcctatctcctgttcttccgagccctcagcctcctgggcctgcccactcccacgcccttcaccaatgccgtccagctgctgctgacgctgaagctggtgagcctggccagtgaagtccaggacctgcatctggcccagaggaaggaaatggcctcaggcttcagcaaggggcccaccctggggctgctgcccgacgtgccctccctgatggagacactcagctacagctactgctacgtgggaatcatgacaggcccgttcttccgctaccgcacctacctggactggctggagcagcccttccccggggcagtgcccagcctgcggcccctgctgcgccgcgcctggccggccccgctcttcggcctgctgttcctgctctcctctcacctcttcccgctggaggccgtgcgcgaggacgccttctacgcccgcccgctgcccgcccgcctcttctacatgatccccgtcttcttcgccttccgcatgcgcttctacgtggcctggattgccgccgagtgcggctgc

SEQ ID NO: 152699 - DNA, 2471 bp, Homo sapiens
  Payload ID: 10045
  Gene Symbol: MBOAT7
  Gene Name: membrane bound O-acyltransferase domain containing 7
  ENST ID: ENST00000621455
  CDS Start-End: 641-1840
taaggactcgactacctccgaagaaagccgaaacatgtggctccgcccacactggcctcagctctccgttctcgactattgccgaagtgagccgaagtttgtggccccgcttccggagaactcaagctcccgattgtgcccgaaggaacccgaagggagaccccgcctcattcctcacggcgagctccagaccccgcctcctttccggagcccgtctgttccccttcgggtccaaagcttttggctcctccttgttccgagcccgaaggcccgccccttcacgtactcggagctcggatcccagtgtggacctggactcgaatcccgttgccgactcgcgctctcggcttctgctccggggcttcttccctgcccgcccggggccctgaccgtggcttcttccccggcctgatctgcgcagcccggcgggcgcccagaaggagcaggcggcgcgggggcgcgctgggcgggggaggcgtggccggagctgcggcggcaagcgggctgggactgctcggccgcctcctgcccggcgagcagctcagaccatgtcgcctgaagaatggacgtatctagtggttcttcttatctccatccccatcggcttcctctttaagaaagccggtcctgggctgaagagatggggagcagccgctgtgggcctggggctcaccctgttcacctgtggcccccacactttgcattctctggtcaccatcctcgggacctgggccctcattcaggcccagccctgctggtgagcctggccagtgaagtccaggacctgcatctggcccagaggaaggaaatggcctcaggcttcagcaaggggcccaccctggggctgctgcccgacgtgccctccctgatggagacactcagctacagctactgctacgtgggaatcatgacaggcccgttcttccgctaccgcacctacctggactggctggagcagcccttccccggggcagtgcccagcctgcggcccctgctgcgccgcgcctggccggccccgctcttcggcctgctgttcctgctctcctctcacctcttcccgctggaggccgtgcgcgaggacgccttctacgcccgcccgctgcccgcccgcctcttctacatgatccccgtcttcttcgccttccgcatgcgcttctacgtggcctggattgccgccgagtgcggctgcattgccgccggctttggggcctaccccgtggccgccaaagcccgggccggaggcggccccaccctccaatgcccaccccccagcagtccggagaaggcggcttccttggagtatgactatgagaccatccgcaacatcgactgctacagcacagatttctgcgtgcgggtgcgcgatggcatgcggtactggaacatgacggtgcagtggtggctggcgcagtatatctacaagagcgcacctgcccgttcctatgtcctgcggagcgcctggaccatgctgctgagcgcctactggcacggcctccacccgggctactacctgagcttcctgaccatcccgctgtgcctggctgccgagggccggctggagtcagccctgcgggggcggctgagcccagggggccagaaggcctgggactgggtgcactggttcctgaagatgcgcgcctatgactacatgtgcatgggcttcgtgctgctctccttggccgacacccttcggtactgggcctccatctacttctgtatccacttcctggccctggcagccctggggctggggctggctttaggtgggggcagccccagccggcggaaggcagcatcccagcccaccagccttgccccagagaagctccgggaggagtaagctgtcacgacgctccctctgccagctggtcccgggaattctgtgaaccaggctgctgtctcctccccagaaagagtccttaccttggagagggtcctggagagaatttcctcttccccagctaaataccctgcctgcaactgaagcagacccgggggtgtcctccctgccctctgcccagaggccacctccactcctacaaaatcaaagtattgtccagacaagagtcactggcccctgctccagcttctgggtatccagagagcactgcacttccccaaaacggaaggggcccctgggcagtgggttttgggcaaattccctttctttgcatccacaatgtggggtcggagcttgggggcaggtcctgggagtgggaagcctcttccttgtgtctttcgctccacttttagctcatcgcaccaatattgcagacttggaaggaagcataagcttcccatttcacaaaggggaaactgaggtgcgggtgcgcgggcctggggacggccgtcccatggcttccatctgagccacctcgggaccccagcgctcctggcgccctcttctcatcgcttggcctatgacaggtcaccgtgtgtaaatctttcccaataaagtgttgcacaaaggc

SEQ ID NO: 152700 - DNA, 2598 bp, Homo sapiens
  Payload ID: 10045
  Gene Symbol: MBOAT7
  Gene Name: membrane bound O-acyltransferase domain containing 7
  ENST ID: ENST00000621875
  CDS Start-End: 549-1967
taaggactcgactacctccgaagaaagccgaaacatgtggctccgcccacactggcctcagctctccgttctcgactattgccgaagtgagccgaagtttgtggccccgcttccggagaactcaagctcccgattgtgcccgaaggaacccgaagggagaccccgcctcattcctcacggcgagctccagaccccgcctcctttccggagcccgtctgttccccttcgggtccaaagcttttggctcctccttgttccgagcccgaaggcccgccccttcacgtactcggagctcggatcccagtgtggacctggactcgaatcccgttgccgactcgcgctctcggcttctgctccggggcttcttccctgcccgcccggggccctgaccgtggcttcttccccggcctgatctgcgcagcccggcgggcgcccagaaggagcaggcggcgcgggggcgcgctgggcgggggaggcgtggccggagctgcggcggcaagcgggctgggactgctcggccgcctcctgcccggcgagcagctcagaccatgtcgcctgaagaatggacgtatctagtggttcttcttatctccatccccatcggcttcctctttaagaaagccggtcctgggctgaagagatggggagcagccgctgtgggcctggggctcaccctgttcacctgtggcccccacactttgcattctctggtcaccatcctcgggacctgggccctcattcaggcccagccctgctcctgccacgccctggctctggcctggactttctcctatctcctgttcttccgagccctcagcctcctgggcctgcccactcccacgcccttcaccaatgccgtccagctgctgctgacgctgaagctggtgagcctggccagtgaagtccaggacctgcatctggcccagaggaaggaaatggcctcaggcttcagcaaggggcccaccctggggctgctgcccgacgtgccctccctgatggagacactcagctacagctactgctacgtgggaatcatgacaggcccgttcttccgctaccgcacctacctggactggctggagcagcccttccccggggcagtgcccagcctgcggcccctgctgcgccgcgcctggccggccccgctcttcggcctgctgttcctgctctcctctcacctcttcccgctggaggccgtgcgcgaggacgccttctacgcccgcccgctgcccgcccgcctcttctacatgatccccgtcttcttcgccttccgcatgcgcttctacgtggcctggattgccgccgagtgcggctgcattgccgccggctttggggcctaccccgtggccgccaaagcccgggccggaggcggccccaccctccaatgcccaccccccagcagtccggagaaggcggcttccttggagtatgactatgagaccatccgcaacatcgactgctacagcacagatttctgcgtgcgggtgcgcgatggcatgcggtactggaacatgacggtgcagtggtggctggcgcagtatatctacaagagcgcacctgcccgttcctatgtcctgcggagcgcctggaccatgctgctgagcgcctactggcacggcctccacccgggctactacctgagcttcctgaccatcccgctgtgcctggctgccgagggccggctggagtcagccctgcgggggcggctgagcccagggggccagaaggcctgggactgggtgcactggttcctgaagatgcgcgcctatgactacatgtgcatgggcttcgtgctgctctccttggccgacacccttcggtactgggcctccatctacttctgtatccacttcctggccctggcagccctggggctggggctggctttaggtgggggcagccccagccggcggaaggcagcatcccagcccaccagccttgccccagagaagctccgggaggagtaagctgtcacgacgctccctctgccagctggtcccgggaattctgtgaaccaggctgctgtctcctccccagaaagagtccttaccttggagagggtcctggagagaatttcctcttccccagctaaataccctgcctgcaactgaagcagacccgggggtgtcctccctgccctctgcccagaggccacctccactcctacaaaatcaaagtattgtccagacaagagtcactggcccctgctccagcttctgggtatccagagagcactgcacttccccaaaacggaaggggcccctgggcagtgggttttgggcaaattccctttctttgcatccacaatgtggggtcggagcttgggggcaggtcctgggagtgggaagcctcttccttgtgtctttcgctccacttttagctcatcgcaccaatattgcagacttggaaggaagcataagcttcccatttcacaaaggggaaactgaggtgcgggtgcgcgggcctggggacggccgtcccatggcttccatctgagccacctcgggaccccagcgctcctggcgccctcttctcatcgcttggcctatgacaggtcaccgtgtgtaaatctttcccaataaagtgttgcacaaaggc

SEQ ID NO: 152701 - DNA, 2598 bp, Homo sapiens; identical to SEQ ID NO: 152700
  Payload ID: 10045
  Gene Symbol: MBOAT7
  Gene Name: membrane bound O-acyltransferase domain containing 7
  ENST ID: ENST00000621612
  CDS Start-End: 549-1967

SEQ ID NO: 152702 - DNA, 2392 bp, Homo sapiens
  Payload ID: 10045
  Gene Symbol: MBOAT7
  Gene Name: membrane bound O-acyltransferase domain containing 7
  Uniprot ID: Q96N66
  ENST ID: ENST00000620311
  CDS Start-End: 562-1761
taaggactcgactacctccgaagaaagccgaaacatgtggctccgcccacactggcctcagctctccgttctcgactattgccgaagtgagccgaagtttgtggccccgcttccggagaactcaagctcccgattgtgcccgaaggaacccgaagggagaccccgcctcattcctcacggcgagctccagaccccgcctcctttccggagcccgtctgttccccttcgggtccaaagcttttggctcctccttgttccgagcccgaaggcccgccccttcacgtactcggagctcggatcccagtgtggacctggactcgaatcccgttgccgactcgcgctctcggcttctgctccggggcttcttccctgcccgcccggggccctgaccgtggcttcttccccggcctgatctgcgcagcccggcgggcgcccagaaggagcaggcggcgcgggggcgcgctgggcgggggaggcgtggccggagctgcggcggcaagcgggctgggactgctcggccgcctcctgcccggcgagcagctcaggtcctgggctgaagagatggggagcagccgctgtgggcctggggctcaccctgttcacctgtggcccccacactttgcattctctggtcaccatcctcgggacctgggccctcattcaggcccagccctgctggtgagcctggccagtgaagtccaggacctgcatctggcccagaggaaggaaatggcctcaggcttcagcaaggggcccaccctggggctgctgcccgacgtgccctccctgatggagacactcagctacagctactgctacgtgggaatcatgacaggcccgttcttccgctaccgcacctacctggactggctggagcagcccttccccggggcagtgcccagcctgcggcccctgctgcgccgcgcctggccggccccgctcttcggcctgctgttcctgctctcctctcacctcttcccgctggaggccgtgcgcgaggacgccttctacgcccgcccgctgcccgcccgcctcttctacatgatccccgtcttcttcgccttccgcatgcgcttctacgtggcctggattgccgccgagtgcggctgcattgccgccggctttggggcctaccccgtggccgccaaagcccgggccggaggcggccccaccctccaatgcccaccccccagcagtccggagaaggcggcttccttggagtatgactatgagaccatccgcaacatcgactgctacagcacagatttctgcgtgcgggtgcgcgatggcatgcggtactggaacatgacggtgcagtggtggctggcgcagtatatctacaagagcgcacctgcccgttcctatgtcctgcggagcgcctggaccatgctgctgagcgcctactggcacggcctccacccgggctactacctgagcttcctgaccatcccgctgtgcctggctgccgagggccggctggagtcagccctgcgggggcggctgagcccagggggccagaaggcctgggactgggtgcactggttcctgaagatgcgcgcctatgactacatgtgcatgggcttcgtgctgctctccttggccgacacccttcggtactgggcctccatctacttctgtatccacttcctggccctggcagccctggggctggggctggctttaggtgggggcagccccagccggcggaaggcagcatcccagcccaccagccttgccccagagaagctccgggaggagtaagctgtcacgacgctccctctgccagctggtcccgggaattctgtgaaccaggctgctgtctcctccccagaaagagtccttaccttggagagggtcctggagagaatttcctcttccccagctaaataccctgcctgcaactgaagcagacccgggggtgtcctccctgccctctgcccagaggccacctccactcctacaaaatcaaagtattgtccagacaagagtcactggcccctgctccagcttctgggtatccagagagcactgcacttccccaaaacggaaggggcccctgggcagtgggttttgggcaaattccctttctttgcatccacaatgtggggtcggagcttgggggcaggtcctgggagtgggaagcctcttccttgtgtctttcgctccacttttagctcatcgcaccaatattgcagacttggaaggaagcataagcttcccatttcacaaaggggaaactgaggtgcgggtgcgcgggcctggggacggccgtcccatggcttccatctgagccacctcgggaccccagcgctcctggcgccctcttctcatcgcttggcctatgacaggtcaccgtgtgtaaatctttcccaataaagtgttgcacaaaggc

SEQ ID NO: 152703 - DNA, 911 bp, Homo sapiens; identical to SEQ ID NO: 152698
  Payload ID: 10045
  Gene Symbol: MBOAT7
  Gene Name: membrane bound O-acyltransferase domain containing 7
  ENST ID: ENST00000617324
  CDS Start-End: 144-911

SEQ ID NO: 152704 - DNA, 2598 bp, Homo sapiens; identical to SEQ ID NO: 152700
  Payload ID: 10045
  Gene Symbol: MBOAT7
  Gene Name: membrane bound O-acyltransferase domain containing 7
  ENST ID: ENST00000613506
  CDS Start-End: 549-1967

SEQ ID NO: 152705 - DNA, 557 bp, Homo sapiens; identical to SEQ ID NO: 152695
  Payload ID: 10045
  Gene Symbol: MBOAT7
  Gene Name: membrane bound O-acyltransferase domain containing 7
  ENST ID: ENST00000612519
  CDS Start-End: 47-557

SEQ ID NO: 152706 - DNA, 1797 bp, Homo sapiens; identical to SEQ ID NO: 152691
  Payload ID: 10045
  Gene Symbol: MBOAT7
  Gene Name: membrane bound O-acyltransferase domain containing 7
  Uniprot ID: Q96N66
  ENST ID: ENST00000619670
  CDS Start-End: 339-1373

SEQ ID NO: 152707 - DNA, 2392 bp, Homo sapiens
  Payload ID: 10045
  Gene Symbol: MBOAT7
  Gene Name: membrane bound O-acyltransferase domain containing 7
  ENST ID: ENST00000620371
  CDS Start-End: 562-1761
taaggactcgactacctccgaagaaagccgaaacatgtggctccgcccacagtggcctcagctctccgttctcgactattgccgaagtgagccgaagtttgtggccccgcttccggagaactcaagctcccgattgtgcccgaaggaacccgaagggagaccccgcctcattcctcacgccgagctccagaccccgcctcctttccagagcccgtctgttccccttcgggtccaaagcttttggctcctccttgttccgagcccgaaggcccgccccttcacgtactcggagctcggatcccagtgtggacctggactcgaatcccgttgccgactcgcgctctcggcttctgctccggggcttcttccctgcccgcccggggccctgaccgtggcttcttccccggcctgatctgcgcagcccggcgggcgcccagaaggagcaggcggcgcgggggcgcgctgggcgggggaggcgtggccggagctgcggcggcaagcgggctgggactgctcggccgcctcctgcccggcgagcagctcaggtcctgggctgaagagatggggagcagccgctgtgggcctggggctcaccctgttcacctgtggcccccacactttgcattctctggtcaccatcctcgggacctgggccctcattcaggcccagccctgctggtgagcctggccagtgaagtccaggacctgcatctggcccagaggaaggaaatggcctcaggcttcagcaaggggcccaccctggggctgctgcccgacgtgccctccctgatggagacactcagctacagctactgctacgtgggaatcatgacaggcccgttcttccgctaccgcacctacctggactggctggagcagcccttccccggggcagtgcccagcctgcggcccctgctgcgccgcgcctggccggccccgctcttcggcctgctgttcctgctctcctctcacctcttcccgctggaggccgtgcgcgaggacgccttctacgcccgcccgctgcccgcccgcctcttctacatgatccccgtcttcttcgccttccgcatgcgcttctacgtggcctggattgccgccgagtgcggctgcattgccgccggctttggggcctaccccgtggccgccaaagcccgggccggaggcggccccaccctccaatgcccaccccccagcagtccggagaaggcggcttccttggagtatgactatgagaccatccgcaacatcgactgctacagcacagatttctgcgtgcgggtgcgcgatggcatgcggtactggaacatgacggtgcagtggtggctggcgcagtatatctacaagagcgcacctgcccgttcctatgtcctgcggagcgcctggaccatgctgctgagcgcctactggcacggcctccacccgggctactacctgagcttcctgaccatcccgctgtgcctggctgccgagggccggctggagtcagccctgcgggggcggctgagcccagggggccagaaggcctgggactgggtgcactggttcctgaagatgcgcgcctatgactacatgtgcatgggcttcgtgctgctctccttggctgacacccttcggtactgggcctccatctacttctgtatccacttcctggccctggcagccctggggctggggctggctttaggtgggggcagccccagccggcggaaggcagcatcccagcccaccagccttgccccggagaagctccgggaggagtaagctgtcacgacgctccctctgccagctggtcccgggaattctgtgaaccaggctgctgtctcctccccagaaagagtccttaccttggagagggtcctggagagaatttcctcttccccagctaaataccctgcctgcaactgaagcagacccgggggtgtcctccctgccctctgcccagaggccacctccactcctacaaaatcaaagtattgtccagacaagagtcactggcccctgctccagcttctgggtatccagagagcactgcacttccccaaaacggaaggggcccctgggcagtgggttttgggcaaattccctttctttgcatccacaatgtggggtcggagcttgggggcaggtcctgggagtgggaagcctcttccttgtgtctttcgctccacttttagctcatcgcaccaatattgcagacttggaaggaagcataagcttcccatttcacaaaggggaaactgaggtgcgggtgcgcgggcctggggacggccgtcccatggcttccatctgagccacctcgggaccccagcactcctggcgccctcttctcatagcttggcctatgacaggtcaccgtgtgtaaatctttcccaataaagtgttgcacaaaggc

SEQ ID NO: 152708 - DNA, 876 bp, Homo sapiens; identical to SEQ ID NO: 152692
  Payload ID: 10045
  Gene Symbol: MBOAT7
  Gene Name: membrane bound O-acyltransferase domain containing 7
  ENST ID: ENST00000619844
  CDS Start-End: 109-876

SEQ ID NO: 152709 - DNA, 1797 bp, Homo sapiens; identical to SEQ ID NO: 152691
  Payload ID: 10045
  Gene Symbol: MBOAT7
  Gene Name: membrane bound O-acyltransferase domain containing 7
  ENST ID: ENST00000618899
  CDS Start-End: 339-1373

SEQ ID NO: 152710 - DNA, 2392 bp, Homo sapiens; identical to SEQ ID NO: 152702
  Payload ID: 10045
  Gene Symbol: MBOAT7
  Gene Name: membrane bound O-acyltransferase domain containing 7
  ENST ID: ENST00000617772
  CDS Start-End: 562-1761

SEQ ID NO: 152711 - DNA, 2392 bp, Homo sapiens; identical to SEQ ID NO: 152707
  Payload ID: 10045
  Gene Symbol: MBOAT7
  Gene Name: membrane bound O-acyltransferase domain containing 7
  ENST ID: ENST00000614279
  CDS Start-End: 562-1761

SEQ ID NO: 152712 - DNA, 1811 bp, Homo sapiens
  Payload ID: 10045
  Gene Symbol: MBOAT7
  Gene Name: membrane bound O-acyltransferase domain containing 7
  ENST ID: ENST00000610862
  CDS Start-End: 339-1373
cccgtctgttccccttcgggtccaaagcttttggctcctccttgttccgagcccgaaggcccgccccttcacgtactcggagctcggatcccagtgtggacctggactcgaatcccgttgccgactcgcgctctcggcttctgctccggggcttcttccctgcccgcccggggccctgaccgtggcttcttccccggcctgatctgcgcagcccggcgggcgcccagaaggagcaggcggcgcgggggcgcgctgggcgggggaggcgtggccggagctgcggcggcaagcgggctgggactgctcggccgcctcctgcccggcgagcagctcagaccatgtcgcctgaagaatggacgtatctagtggttcttcttatctccatccccatcggcttcctctttaagaaagccggtcctgggctgaagagatggggagcagccgctgtgggcctggggctcaccctgttcacctgtggcccccacactttgcattctctggtcaccatcctcgggacctgggccctcattcaggcccagccctgctcctgccacgccctggctctggcctggactttctcctatctcctgttcttccgagccctcagcctcctgggcctgcccactcccacgcccttcaccaatgccgtccagctgctgctgacgctgaagctggtgagcctggccagtgaagtccaggacctgcatctggcccagaggaaggaaatggcctcaggcttcagcaaggggcccaccctggggctgctgcccgacgtgccctccctgatggagacactcagctacagctactgctacgtgggaatcatgacaggcccgttcttccgctaccgcacctacctggactggctggagcagcccttccccggggcagtgcccagcctgcggcccctgctgcgccgcgcctggccggccccgctcttcggcctgctgttcctgctctcctctcacctcttcccgctggaggccgtgcgcgaggacgccttctacgcccgcccgctgcccgcccgcctcttctacatgatccccgtcttcttcgccttccgcatgcgcttctacgtggcctggattgccgccgagtgcggctgcattgccgccggctttggggcctaccccgtggccgccaaagcccgggccggaggcggccccaccctccaatgcccaccccccagcagtccggagaaggcggcttccttggagtatgactatgagaccatccgcaacatcgactgctacagcacagatttctgcgtgcgggtgcgcgatggcatgcggtactggaacatgacggtgcagtggtggctggcgcagtatatctacaagagcgcacctgcccgttcctatgtcctgcggtgagtgagcccgcccagtctcaggtgacactgcagaactacatctcccagcaggccccagggtagcctgcagcgtccctggctgggcccctgcccccggaggctcatgggaattgtagtttgtttagcctggttttgccctgcctctaattatagtggcagcatgccggtgtaaaatcgttccccctctcggggcctcagttgctacttctgtaaagtcagcctcactcagcagaagcaatgtactgagtcctgtggactcaatagccagccttcctggaatcttggccgtccaggttatggagaaaccttgaggagttagttgacctcttagttgcctcaagtgttgaatggagtgaatgctatttattactggtttcataggtagatagaaggactaaatgtgataaaatgtgaaatgtatttaatgtgaggcctgaca

SEQ ID NO: 152713 - DNA, 2033 bp, Homo sapiens
  Payload ID: 10045
  Gene Symbol: MBOAT7
  Gene Name: membrane bound O-acyltransferase domain containing 7
  ENST ID: ENST00000615872
  CDS Start-End: 110-322
ggagcaggcggcgcgggggcgcgctgggcgggggaggcgtggccggagctgcggcggcaagcgggctgggactgctcggccgcctcctgcccggcgagcagctcagaccatgtcgcctgaagaatggacgtatctagtggttcttcttatctccatccccatcggcttcctctttaagaaagccggtcctgggctgaagagatggggagcagccgctgtgggcctggggctcaccctgttcacctgtggcccccacactttgcattctctggtcaccatcctcgggacctgggccctcattcaggcccagccctgctggtgagcctggccagtgaagtccaggacctgcatctggcccagaggaaggaaatggcctcaggcttcagcaaggggcccaccctggggctgctgcccgacgtgccctccctgatggagacactcagctacagctactgctacgtgggaatcatgacaggcccgttcttccgctaccgcacctacctggactggctggagcagcccttccccggggcagtgcccagcctgcggcccctgctgcgccgcgcctggccggccccgctcttcggcctgctgttcctgctctcctctcacctcttcccgctggaggccgtgcgcgaggacgccttctacgcccgcccgctgcccgcccgcctcttctacatgatccccgtcttcttcgccttccgcatgcgcttctacgtggcctggattgccgccgagtgcggctgcattgccgccggctttggggcctaccccgtggccgccaaagcccgggccggaggcggccccaccctccaatgcccaccccccagcagtccggagaaggcggcttccttggagtatgactatgagaccatccgcaacatcgactgctacagcacagatttctgcgtgcgggtgcgcgatggcatgcggtactggaacatgacggtgcagtggtggctggcgcagtatatctacaagagcgcacctgcccgttcctatgtcctgcggagcgcctggaccatgctgctgagcgcctactggcacggcctccacccgggctactacctgagcttcctgaccatcccgctgtgcctggctgccgagggccggctggagtcagccctgcgggggcggctgagcccagggggccagaaggcctgggactgggtgcactggttcctgaagatgcgcgcctatgactacatgtgcatgggcttcgtgctgctctccttggccgacacccttcggtactgggcctccatctacttctgtatccacttcctggccctggcagccctggggctggggctggctttaggtgggggcagccccagccggcggaaggcagcatcccagcccaccagccttgccccagagaagctccgggaggagtaagctgtcacgacgctccctctgccagctggtcccgggaattctgtgaaccaggctgctgtctcctccccagaaagagtccttaccttggagagggtcctggagagaatttcctcttccccagctaaataccctgcctgcaactgaagcagacccgggggtgtcctccctgccctctgcccagaggccacctccactcctacaaaatcaaagtattgtccagacaagagtcactggcccctgctccagcttctgggtatccagagagcactgcacttccccaaaacggaaggggcccctgggcagtgggttttgggcaaattccctttctttgcatccacaatgtggggtcggagcttgggggcaggtcctgggagtgggaagcctcttccttgtgtctttcgctccacttttagctcatcgcaccaatattgcagacttggaaggaagcataagcttcccatttcacaaaggggaaactgaggtgcgggtgcgcgggcctggggacggccgtcccatggcttccatctgagccacctcgggaccccagcgctcctggcgccctcttctcatcgcttggcctatgacaggtcaccgtgtgtaaatctttcccaataaagtgttgcacaaaggca

SEQ ID NO: 152714 - DNA, 2598 bp, Homo sapiens; identical to SEQ ID NO: 152700
  Payload ID: 10045
  Gene Symbol: MBOAT7
  Gene Name: membrane bound O-acyltransferase domain containing 7
  Uniprot ID: Q96N66
  ENST ID: ENST00000619842
  CDS Start-End: 549-1967

SEQ ID NO: 152715 - DNA, 2471 bp, Homo sapiens; identical to SEQ ID NO: 152699
  Payload ID: 10045
  Gene Symbol: MBOAT7
  Gene Name: membrane bound O-acyltransferase domain containing 7
  ENST ID: ENST00000619745
  CDS Start-End: 641-1840

SEQ ID NO: 152716 - DNA, 2471 bp, Homo sapiens; identical to SEQ ID NO: 152699
  Payload ID: 10045
  Gene Symbol: MBOAT7
  Gene Name: membrane bound O-acyltransferase domain containing 7
  ENST ID: ENST00000621146
  CDS Start-End: 641-1840

SEQ ID NO: 152717 - DNA, 2471 bp, Homo sapiens; identical to SEQ ID NO: 152699
  Payload ID: 10045
  Gene Symbol: MBOAT7
  Gene Name: membrane bound O-acyltransferase domain containing 7
  ENST ID: ENST00000617656
  CDS Start-End: 641-1840

SEQ ID NO: 152718 - DNA, 2392 bp, Homo sapiens; identical to SEQ ID NO: 152702
  Payload ID: 10045
  Gene Symbol: MBOAT7
  Gene Name: membrane bound O-acyltransferase domain containing 7
  ENST ID: ENST00000611239
  CDS Start-End: 562-1761

SEQ ID NO: 152719 - DNA, 2598 bp, Homo sapiens; identical to SEQ ID NO: 152700
  Payload ID: 10045
  Gene Symbol: MBOAT7
  Gene Name: membrane bound O-acyltransferase domain containing 7
  ENST ID: ENST00000618378
  CDS Start-End: 549-1967

SEQ ID NO: 152720 - DNA, 564 bp, Homo sapiens
  Payload ID: 10045
  Gene Symbol: MBOAT7
  Gene Name: membrane bound O-acyltransferase domain containing 7
  ENST ID: ENST00000617095
  CDS Start-End: 47-564
agctcaggtgggccagggtggcggcgcccagtggcgaggcgagaccatgtcgcctgaagaatggacgtatctagtggttcttcttatctccatccccatcggcttcctctttaagaaagccggtcctgggctgaagagatggggagcagccgctgtgggcctggggctcaccctgttcacctgtggcccccacactttgcattctctggtcaccatcctcgggacctgggccctcattcaggcccagccctgctcctgccacgccctggctctggcctggactttctcctatctcctgttcttccgagccctcagcctcctgggcctgcccactcccacgcccttcaccaatgccgtccagctgctgctgacgctgaagctggtgagcctggccagtgaagtccaggacctgcatctggcccagaggaaggaaatggcctcaggcttcagcaaggggcccaccctggggctgctgcccgacgtgccctccctgatggagacactcagctacagctactgctacgtgggaatcatgacaggcccgttcttccgctaccgcaccta

SEQ ID NO: 152721 - DNA, 1585 bp, Homo sapiens; identical to SEQ ID NO: 152697
  Payload ID: 10045
  Gene Symbol: MBOAT7
  Gene Name: membrane bound O-acyltransferase domain containing 7
  ENST ID: ENST00000612092
  CDS Start-End: 1-545

SEQ ID NO: 152722 - DNA, 2471 bp, Homo sapiens; identical to SEQ ID NO: 152699
  Payload ID: 10045
  Gene Symbol: MBOAT7
  Gene Name: membrane bound O-acyltransferase domain containing 7
  ENST ID: ENST00000611602
  CDS Start-End: 641-1840

SEQ ID NO: 152723 - DNA, 2598 bp, Homo sapiens; identical to SEQ ID NO: 152700
  Payload ID: 10045
  Gene Symbol: MBOAT7
  Gene Name: membrane bound O-acyltransferase domain containing 7
  ENST ID: ENST00000615453
  CDS Start-End: 549-1967

SEQ ID NO: 152724 - DNA, 2392 bp, Homo sapiens; identical to SEQ ID NO: 152702
  Payload ID: 10045
  Gene Symbol: MBOAT7
  Gene Name: membrane bound O-acyltransferase domain containing 7
  ENST ID: ENST00000620636
  CDS Start-End: 562-1761

SEQ ID NO: 152725 - DNA, 2392 bp, Homo sapiens; identical to SEQ ID NO: 152702
  Payload ID: 10045
  Gene Symbol: MBOAT7
  Gene Name: membrane bound O-acyltransferase domain containing 7
  ENST ID: ENST00000612053
  CDS Start-End: 562-1761

SEQ ID NO: 152726 - DNA, 2392 bp, Homo sapiens; identical to SEQ ID NO: 152702
  Payload ID: 10045
  Gene Symbol: MBOAT7
  Gene Name: membrane bound O-acyltransferase domain containing 7
  ENST ID: ENST00000612567
  CDS Start-End: 562-1761

SEQ ID NO: 152727 - DNA, 707 bp, Homo sapiens; identical to SEQ ID NO: 152694
  Payload ID: 10045
  Gene Symbol: MBOAT7
  Gene Name: membrane bound O-acyltransferase domain containing 7
  ENST ID: ENST00000621334
  CDS Start-End: 1-372

SEQ ID NO: 152728 - DNA, 2471 bp, Homo sapiens; identical to SEQ ID NO: 152699
  Payload ID: 10045
  Gene Symbol: MBOAT7
  Gene Name: membrane bound O-acyltransferase domain containing 7
  Uniprot ID: Q96N66
  ENST ID: ENST00000618826
  CDS Start-End: 641-1840

SEQ ID NO: 152729 - DNA, 2076 bp, Homo sapiens
  Payload ID: 10045
  Gene Symbol: MBOAT7
  Gene Name: membrane bound O-acyltransferase domain containing 7
  Uniprot ID: Q96N66
  ENST ID: ENST00000615282
  CDS Start-End: 248-1447
gactcgaatcccgttgccgactcgcgctctcggcttctgctccggggcttcttccctgcccgcccggggccctgaccgtggcttcttccccggcctgatctgcgcagcccggcgggcgcccagaaggagcaggcggcgcgggggcgcgctgggcgggggaggcgtggccggagctgcggcggcaagcgggctgggactgctcggccgcctcctgcccggcgagcagctcaggtcctgggctgaagagatggggagcagccgctgtgggcctggggctcaccctgttcacctgtggcccccacactttgcattctctggtcaccatcctcgggacctgggccctcattcaggcccagccctgctggtgagcctggccagtgaagtccaggacctgcatctggcccagaggaaggaaatggcctcaggcttcagcaaggggcccaccctggggctgctgcccgacgtgccctccctgatggagacactcagctacagctactgctacgtgggaatcatgacaggcccgttcttccgctaccgcacctacctggactggctggagcagcccttccccggggcagtgcccagcctgcggcccctgctgcgccgcgcctggccggccccgctcttcggcctgctgttcctgctctcctctcacctcttcccgctggaggccgtgcgcgaggacgccttctacgcccgcccgctgcccgcccgcctcttctacatgatccccgtcttcttcgccttccgcatgcgcttctacgtggcctggattgccgccgagtgcggctgcattgccgccggctttggggcctaccccgtggccgccaaagcccgggccggaggcggccccaccctccaatgcccaccccccagcagtccggagaaggcggcttccttggagtatgactatgagaccatccgcaacatcgactgctacagcacagatttctgcgtgcgggtgcgcgatggcatgcggtactggaacatgacggtgcagtggtggctggcgcagtatatctacaagagcgcacctgcccgttcctatgtcctgcggagcgcctggaccatgctgctgagcgcctactggcacggcctccacccgggctactacctgagcttcctgaccatcccgctgtgcctggctgccgagggccggctggagtcagccctgcgggggcggctgagcccagggggccagaaggcctgggactgggtgcactggttcctgaagatgcgcgcctatgactacatgtgcatgggcttcgtgctgctctccttggccgacacccttcggtactgggcctccatctacttctgtatccacttcctggccctggcagccctggggctggggctggctttaggtgggggcagccccagccggcggaaggcagcatcccagcccaccagccttgccccagagaagctccgggaggagtaagctgtcacgacgctccctctgccagctggtcccgggaattctgtgaaccaggctgctgtctcctccccagaaagagtccttaccttggagagggtcctggagagaatttcctcttccccagctaaataccctgcctgcaactgaagcagacccgggggtgtcctccctgccctctgcccagaggccacctccactcctacaaaatcaaagtattgtccagacaagagtcactggcccctgctccagcttctgggtatccagagagcactgcacttccccaaaacggaaggggcccctgggcagtgggttttgggcaaattccctttctttgcatccacaatgtggggtcggagcttgggggcaggtcctgggagtgggaagcctcttccttgtgtctttcgctccacttttagctcatcgcaccaatattgcagacttggaaggaagcataagcttcccatttcacaaaggggaaactgaggtgcgggtgcgcgggcctggggacggccgtcccatggcttccatctgagccacctcgggaccccagcgctcctggcgccctcttctcatcgcttggcctatgacaggtcaccgtgtgtaaatctttcccaataaagtgttgcacaaag

SEQ ID NO: 152730 - DNA, 564 bp, Homo sapiens; identical to SEQ ID NO: 152720
  Payload ID: 10045
  Gene Symbol: MBOAT7
  Gene Name: membrane bound O-acyltransferase domain containing 7
  ENST ID: ENST00000616849
  CDS Start-End: 47-564

SEQ ID NO: 152731 - DNA, 2596 bp, Homo sapiens
  Payload ID: 10045
  Gene Symbol: MBOAT7
  Gene Name: membrane bound O-acyltransferase domain containing 7
  ENST ID: ENST00000617012
  CDS Start-End: 549-1967
taaggactcgactacctccgaagaaagccgaaacatgtggctccgcccacagtggcctcagctctccgttctcgactattgccgaagtgagccgaagtttgtggccccgcttccggagaactcaagctcccgattgtgcccgaaggaacccgaagggagaccccgcctcattcctcacgccgagctccagaccccgcctcctttccagagcccgtctgttccccttcgggtccaaagcttttggctcctccttgttccgagcccgaaggcccgccccttcacgtactcggagctcggatcccagtgtggacctggactcgaatcccgttgccgactcgcgctctcggcttctgctccggggcttcttccctgcccgcccggggccctgaccgtggcttcttccccggcctgatctgcgcagcccggcgggcgcccagaaggagcaggcggcgcgggggcgcgctgggcgggggaggcgtggccggagctgcggcggcaagcgggctgggactgctcggccgcctcctgcccggcgagcagctcagaccatgtcgcctgaagaatggacgtatctagtggttcttcttatctccatccccatcggcttcctctttaagaaagccggtcctgggctgaagagatggggagcagccgctgtgggcctggggctcaccctgttcacctgtggcccccacactttgcattctctggtcaccatcctcgggacctgggccctcattcaggcccagccctgctcctgccacgccctggctctggcctggactttctcctatctcctgttcttccgagccctcagcctcctgggcctgcccactcccacgcccttcaccaatgccgtccagctgctgctgacgctgaagctggtgagcctggccagtgaagtccaggacctgcatctggcccagaggaaggaaatggcctcaggcttcagcaaggggcccaccctggggctgctgcccgacgtgccctccctgatggagacactcagctacagctactgctacgtgggaatcatgacaggcccgttcttccgctaccgcacctacctggactggctggagcagcccttccccggggcagtgcccagcctgcggcccctgctgcgccgcgcctggccggccccgctcttcggcctgctgttcctgctctcctctcacctcttcccgctggaggccgtgcgcgaggacgccttctacgcccgcccgctgcccgcccgcctcttctacatgatccccgtcttcttcgccttccgcatgcgcttctacgtggcctggattgccgccgagtgcggctgcattgccgccggctttggggcctaccccgtggccgccaaagcccgggccggaggcggccccaccctccaatgcccaccccccagcagtccggagaaggcggcttccttggagtatgactatgagaccatccgcaacatcgactgctacagcacagatttctgcgtgcgggtgcgcgatggcatgcggtactggaacatgacggtgcagtggtggctggcgcagtatatctacaagagcgcacctgcccgttcctatgtcctgcggagcgcctggaccatgctgctgagcgcctactggcacggcctccacccgggctactacctgagcttcctgaccatcccgctgtgcctggctgccgagggccggctggagtcagccctgcgggggcggctgagcccagggggccagaaggcctgggactgggtgcactggttcctgaagatgcgcgcctatgactacatgtgcatgggcttcgtgctgctctccttggctgacacccttcggtactgggcctccatctacttctgtatccacttcctggccctggcagccctggggctggggctggctttaggtgggggcagccccagccggcggaaggcagcatcccagcccaccagccttgccccggagaagctccgggaggagtaagctgtcacgacgctccctctgccagctggtcccgggaattctgtgaaccaggctgctgtctcctccccagaaagagtccttaccttggagagggtcctggagagaatttcctcttccccagctaaataccctgcctgcaactgaagcagacccgggggtgtcctccctgccctctgcccagaggccacctccactcctacaaaatcaaagtattgtccagacaagagtcactggcccctgctccagcttctgggtatccagagagcactgcacttccccaaaacggaaggggcccctgggcagtgggttttgggcaaattccctttctttgcatccacaatgtggggtcggagcttgggggcaggtcctgggagtgggaagcctcttccttgtgtctttcgctccacttttagctcatcgcaccaatattgcagacttggaaggaagcataagcttcccatttcacaaaggggaaactgaggtgcgggtgcgcgggcctggggacggccgtcccatggcttccatctgagccacctcgggaccccagcactcctggcgccctcttctcatagcttggcctatgacaggtcaccgtgtgtaaatctttcccaataaagtgttgcacaaag

SEQ ID NO: 152732 - DNA, 2529 bp, Homo sapiens
  Payload ID: 10045
  Gene Symbol: MBOAT7
  Gene Name: membrane bound O-acyltransferase domain containing 7
  Uniprot ID: Q96N66
  ENST ID: ENST00000613746
  CDS Start-End: 482-1900
gttctcgactattgccgaagtgagccgaagtttgtggccccgcttccggagaactcaagctcccgattgtgcccgaaggaacccgaagggagaccccgcctcattcctcacggcgagctccagaccccgcctcctttccggagcccgtctgttccccttcgggtccaaagcttttggctcctccttgttccgagcccgaaggcccgccccttcacgtactcggagctcggatcccagtgtggacctggactcgaatcccgttgccgactcgcgctctcggcttctgctccggggcttcttccctgcccgcccggggccctgaccgtggcttcttccccggcctgatctgcgcagcccggcgggcgcccagaaggagcaggcggcgcgggggcgcgctgggcgggggaggcgtggccggagctgcggcggcaagcgggctgggactgctcggccgcctcctgcccggcgagcagctcagaccatgtcgcctgaagaatggacgtatctagtggttcttcttatctccatccccatcggcttcctctttaagaaagccggtcctgggctgaagagatggggagcagccgctgtgggcctggggctcaccctgttcacctgtggcccccacactttgcattctctggtcaccatcctcgggacctgggccctcattcaggcccagccctgctcctgccacgccctggctctggcctggactttctcctatctcctgttcttccgagccctcagcctcctgggcctgcccactcccacgcccttcaccaatgccgtccagctgctgctgacgctgaagctggtgagcctggccagtgaagtccaggacctgcatctggcccagaggaaggaaatggcctcaggcttcagcaaggggcccaccctggggctgctgcccgacgtgccctccctgatggagacactcagctacagctactgctacgtgggaatcatgacaggcccgttcttccgctaccgcacctacctggactggctggagcagcccttccccggggcagtgcccagcctgcggcccctgctgcgccgcgcctggccggccccgctcttcggcctgctgttcctgctctcctctcacctcttcccgctggaggccgtgcgcgaggacgccttctacgcccgcccgctgcccgcccgcctcttctacatgatccccgtcttcttcgccttccgcatgcgcttctacgtggcctggattgccgccgagtgcggctgcattgccgccggctttggggcctaccccgtggccgccaaagcccgggccggaggcggccccaccctccaatgcccaccccccagcagtccggagaaggcggcttccttggagtatgactatgagaccatccgcaacatcgactgctacagcacagatttctgcgtgcgggtgcgcgatggcatgcggtactggaacatgacggtgcagtggtggctggcgcagtatatctacaagagcgcacctgcccgttcctatgtcctgcggagcgcctggaccatgctgctgagcgcctactggcacggcctccacccgggctactacctgagcttcctgaccatcccgctgtgcctggctgccgagggccggctggagtcagccctgcgggggcggctgagcccagggggccagaaggcctgggactgggtgcactggttcctgaagatgcgcgcctatgactacatgtgcatgggcttcgtgctgctctccttggccgacacccttcggtactgggcctccatctacttctgtatccacttcctggccctggcagccctggggctggggctggctttaggtgggggcagccccagccggcggaaggcagcatcccagcccaccagccttgccccagagaagctccgggaggagtaagctgtcacgacgctccctctgccagctggtcccgggaattctgtgaaccaggctgctgtctcctccccagaaagagtccttaccttggagagggtcctggagagaatttcctcttccccagctaaataccctgcctgcaactgaagcagacccgggggtgtcctccctgccctctgcccagaggccacctccactcctacaaaatcaaagtattgtccagacaagagtcactggcccctgctccagcttctgggtatccagagagcactgcacttccccaaaacggaaggggcccctgggcagtgggttttgggcaaattccctttctttgcatccacaatgtggggtcggagcttgggggcaggtcctgggagtgggaagcctcttccttgtgtctttcgctccacttttagctcatcgcaccaatattgcagacttggaaggaagcataagcttcccatttcacaaaggggaaactgaggtgcgggtgcgcgggcctggggacggccgtcccatggcttccatctgagccacctcgggaccccagcgctcctggcgccctcttctcatcgcttggcctatgacaggtcaccgtgtgtaaatctttcccaataaagtgttgcacaaag

SEQ ID NO: 152733 - DNA, 2596 bp, Homo sapiens; identical to SEQ ID NO: 152731
  Payload ID: 10045
  Gene Symbol: MBOAT7
  Gene Name: membrane bound O-acyltransferase domain containing 7
  ENST ID: ENST00000619855
  CDS Start-End: 549-1967

SEQ ID NO: 152734 - DNA, 1663 bp, Homo sapiens
  Payload ID: 10046
  Gene Symbol: MFRP
  Gene Name: membrane frizzled-related protein
  Uniprot ID: Q9BY79
  ENST ID: ENST00000360167
  CDS Start-End: 153-1538
aaggacagcccaagaactggtctagcctggcagccttttccctcgggtagtagaggctgcccctctgacagggagtttgtggtcagcgagtgggcccttgggggtcttgggctgtcacagggactccagaaagccatgcagagccttgtgccatgaaggacttctcagatgtcatcctctgcatggaggcaacagaatcgagcaagaccgagttctgcaatcctgccttcgagcctgagtctgggccaccctgccctcccccagttttcccagaggatgccagctacagcgtcccagctccctggcatggtcggcgtcctcgagggctacggccagactgccgcttctcctggctctgtgtcctcctgctctccagcctgctcctcctgctgcttgggctgctggtggccatcatcctggcccagctgcaggctgcacccccatctggggcgtcccatagcccactgcctgccggaggccttaccacgaccaccaccacccccaccatcaccacctctcaggcagctgggacccctaaagggcagcaggagtcaggcgtgagcccctccccacagtccacctgtggaggcctcctctctggcccaaggggcttcttcagcagccctaactacccagacccttacccccccaacacccactgcgtgtggcatatccaggtggccacagaccatgcaatacagctcaagatcgaagccctcagcatagagagtgtggcctcttgcctttttgatcgcttggaactctcccctgagcctgaaggccccctcctcagggtttgtggaagggtgcctccccccacgctcaacaccaatgccagccacctcctggtggtcttcgtctctgacagcagtgtggaaggatttggtttccatgcctggtaccaggctatggcccctgggcgcgggagctgtgcccatgatgagttccgctgtgaccagctcatctgcctgctacctgactcagtgtgtgatggttttgccaactgtgctgacggcagtgatgagaccaattgcagtgccaagttctcgggttctgtggagcagagccacccccccacctcgtctcctcgcaccatgagctggctgtgctgtttaggacagatcatggcatcagcagtggaggcttctcagccacctacctggccttcaatgccacggagaacccctgtgggcccagtgagctctcctgccaggcaggagggtgtaagggtgtgcagtggatgtgtgacatgtggagagactgcaccgatggcagcgatgacaactgcagcggccccttgttcccacccccagagcctgacaagcctgccctgctaccagcatttccggaggctcctgtgtgggctgcttgtgccccgttgcaccccactaggcagtgttctgcccccttgccgctctgtctgccaggaagcggagcaccagtgccagtctggcctggcactactgggcaccccctggcccttcaactgcaacaggctgccagaggcagctgacctggaagcttgtgcccagccctgaccctgaagccggcccctgccctcttcctgcccgtcctcttttgccggtcagggctggcacgcaggggaacaaaggaaggagcatcagcagggtctctacccatccttctctggggctcccaggga

SEQ ID NO: 152735 - DNA, 565 bp, Homo sapiens
  Payload ID: 10046
  Gene Symbol: MFRP
  Gene Name: membrane frizzled-related protein
  Uniprot ID: Q9BY79
  ENST ID: ENST00000449574
  CDS Start-End: 1-565
cccacctcgtctcctcgcaccatgagctggctgtgctgtttaggacagatcatggcatcagcagtggaggcttctcagccacctacctggccttcaatgccacggagagtaggtgcccctgggcaaacccctgtgggcccagtgagctctcctgccaggcaggagggtgtaagggtgtgcagtggatgtgtgacatgtggagagactgcaccgatggcagcgatgacaactgcagcggccccttgttcccacccccagagctggcctgtgagcctgtccaggtggagatgtgcctcggtctgagctacaacaccacagccttccctaacatctgggtgggcatgatcacccaggaggaggtggtagaggtcctcagcggttacaagagcctgacaagcctgccctgctaccagcatttccggaggctcctgtgtgggctgcttgtgccccgttgcaccccactaggcagtgttctgcccccttgccgctctgtctgccaggaagcggagcaccagtgccagtctggcctggcactactgggcaccccctggcccttcaactgcaa

SEQ ID NO: 152736 - DNA, 3917 bp, Homo sapiens
  Payload ID: 10046
  Gene Symbol: MFRP
  Gene Name: membrane frizzled-related protein
  Uniprot ID: Q9BY79
  ENST ID: ENST00000619721
  CDS Start-End: 161-1900
actctaccaaggacagcccaagaactggtctagcctggcagccttttccctcgggtagtagaggctgcccctctgacagggagtttgtggtcagcgagtgggcccttgggggtcttgggctgtcacagggactccagaaagccatgcagagccttgtgccatgaaggacttctcagatgtcatcctctgcatggaggcaacagaatcgagcaagaccgagttctgcaatcctgccttcgagcctgagtctgggccaccctgccctcccccagttttcccagaggatgccagctacagcgtcccagctccctggcatggtcggcgtcctcgagggctacggccagactgccgcttctcctggctctgtgtcctcctgctctccagcctgctcctcctgctgcttgggctgctggtggccatcatcctggcccagctgcaggctgcacccccatctggggcgtcccatagcccactgcctgccggaggccttaccacgaccaccaccacccccaccatcaccacctctcaggcagctgggacccctaaagggcagcaggagtcaggcgtgagcccctccccacagtccacctgtggaggcctcctctctggcccaaggggcttcttcagcagccctaactacccagacccttacccccccaacacccactgcgtgtggcatatccaggtggccacagaccatgcaatacagctcaagatcgaagccctcagcatagagagtgtggcctcttgcctttttgatcgcttggaactctcccctgagcctgaaggccccctcctcagggtttgtggaagggtgcctccccccacgctcaacaccaatgccagccacctcctggtggtcttcgtctctgacagcagtgtggaaggatttggtttccatgcctggtaccaggctatggcccctgggcgcgggagctgtgcccatgatgagttccgctgtgaccagctcatctgcctgctacctgactcagtgtgtgatggttttgccaactgtgctgacggcagtgatgagaccaattgcagtgccaagttctcggggtgtggggggaatctgactggcctccagggcactttctctactcccagctacctgcagcagtaccctcaccaactgctctgcacctggcatatctcggtgcctgccggacacagcatagaactacagttccacaacttcagcctggaggctcaggacgagtgcaagtttgactacgtggaggtgtatgagaccagcagctcaggggccttcagcctcctgggcaggttctgtggagcagagccacccccccacctcgtctcctcgcaccatgagctggctgtgctgtttaggacagatcatggcatcagcagtggaggcttctcagccacctacctggccttcaatgccacggagaacccctgtgggcccagtgagctctcctgccaggcaggagggtgtaagggtgtgcagtggatgtgtgacatgtggagagactgcaccgatggcagcgatgacaactgcagcggccccttgttcccacccccagagctggcctgtgagcctgtccaggtggagatgtgcctcggtctgagctacaacaccacagccttccctaacatctgggtgggcatgatcacccaggaggaggtggtagaggtcctcagcggttacaagagcctgacaagcctgccctgctaccagcatttccggaggctcctgtgtgggctgcttgtgccccgttgcaccccactaggcagtgttctgcccccttgccgctctgtctgccaggaagcggagcaccagtgccagtctggcctggcactactgggcaccccctggcccttcaactgcaacaggctgccagaggcagctgacctggaagcttgtgcccagccctgaccctgaagccggcccctgccctcttcctgcccgtcctcttttgccggtcagggctggcacgcaggggaacaaaggaaggagcatcagcagggtctctacccatccttctctggggctcccagggagggggaagagaagtcctcagctggggctcatgggaccctaccaccctccctgctccttcctgtccctttaccggtcccaggctgctgactggccccacactgtgccaccggacaatcgagaccacttcccatccaggcctcttcccctttccatctgctttttcagcttctccatcgcctgccttctgaccttttccttgattcaacaaaaatgtactgagcatctattcatgtggcaggcccctgtcctaggccctagggatccaactggctgtctgcctctagaactctccaccctcatctctctgcgtatttctccctgaaatggggtctggtccttggtctctgccactgccctgcctctcctctggccctgggaacaggaggtgccctgtgtgtccgtctctcgaagttctgcctctctgtgcccagctcaagtctctctccccctcctttctccccctaaactttggccggccgccgggcgacaccacgagttatttcccagctatttcccggtccgggagctcttggcccctgaacaactggtttcctcttggagtctgggaggaggaaagcggagccggcagggagcgaaccaggactggggtgacggcagggcagggggcgcctggccggggagaagcgcgggggctggagcaccaccaactggagggtccggagtagcgagcgccccgaaggaggccatcggggagccgggaggggggactgcgagaggaccccggcgtccgggctcccggtgccagcgctatgaggccactcctcgtcctgctgctcctgggcctggcggccggctcgcccccactggacgacaacaagatccccagcctctgcccggggcaccccggccttccaggcacgccgggccaccatggcagccagggcttgccgggccgcgatggccgcgacggccgcgacggcgcgcccggggctccgggagagaaaggcgagggcgggaggccgggactgccgggacctcgaggggaccccgggccgcgaggagaggcgggacccgcggggcccaccgggcctgccggggagtgctcggtgcctccgcgatccgccttcagcgccaagcgctccgagagccgggtgcctccgccgtctgacgcacccttgcccttcgaccgcgtgctggtgaacgagcagggacattacgacgccgtcaccggcaagttcacctgccaggtgcctggggtctactacttcgccgtccatgccaccgtctaccgggccagcctgcagtttgatctggtgaagaatggcgaatccattgcctctttcttccagtttttcggggggtggcccaagccagcctcgctctcggggggggccatggtgaggctggagcctgaggaccaagtgtgggtgcaggtgggtgtgggtgactacattggcatctatgccagcatcaagacagacagcaccttctccggatttctggtgtactccgactggcacagctccccagtctttgcttagtgcccactgcaaagtgagctcatgctctcactcctagaaggagggtgtgaggctgacaaccaggtcatccaggagggctggcccccctggaatattgtgaatgactagggaggtggggtagagcactctccgtcctgctgctggcaaggaatgggaacagtggctgtctgcgatcaggtctggcagcatggggcagtggctggatttctgcccaagaccagaggagtgtgctgtgctggcaagtgtaagtcccccagttgctctggtccaggagcccacggtggggtgctctcttcctggtcctctgcttctctggatcctccccaccccctcctgctcctggggccggcccttttctcagagatcactcaataaacctaagaaccctc

SEQ ID NO: 152737 - DNA, 723 bp, Homo sapiens
  Payload ID: 10046
  Gene Symbol: MFRP
  Gene Name: membrane frizzled-related protein
  ENST ID: ENST00000634542
  CDS Start-End: 105-410
agtagaggctgcccctctgacagggagtttgtggtcagcgagtgggcccttgggggtcttgggctgtcacagggactccagaaagccatgcagagccttgtgccatgaaggacttctcagatgtcatcctctgcatggaggcaacagaatcgagcaaggtcggcgtcctcgagggctacggccagactgccgcttctcctggctctgtgtcctcctgctctccagcctgctcctcctgctgcttgggctgctggtggccatcatcctggcccagctgcaggctgcacccccatctggggcgtcccatagcccactgcctgccggaggccttaccacgaccaccaccacccccaccatcaccacctctcaggcagctgggacccctaaagggcagcaggagtcaggcgtgagcccctccccacagtccacctgtggaggcctcctctctggcccaaggggcttcttcagcagccctaactacccagacccttacccccccaacacccactgcgtgtggcatatccaggtggccacagaccatgcaatacagctcaagatcgaagccctcagcatagagagtgtggcctcttgcctttttgatcgcttggaactctcccctgagcctgaaggccccctcctcagggtttgtggaagggtgcctccccccacgctcaacaccaatgccagccacctcctggtggtcttcgtctctgacagcagtgt

SEQ ID NO: 152738 - DNA, 3738 bp, Homo sapiens
  Payload ID: 10047
  Gene Symbol: MMGT1
  Gene Name: membrane magnesium transporter 1
  Uniprot ID: Q8N4V1
  ENST ID: ENST00000305963
  CDS Start-End: 389-784
ctctacgcaggcccccgtccctctgccccaccctgttctcgccactggccctgcccccatttgccggcgcccttcctcttcgcttccccgtagctcccgctttcgcctcttcgtttatgactccgttgggctccggccctcctagagaggcctccatagcgcaggttcgtgggttctcgcggacctttttccgtgtagctttctgcttcttcccggcattcctgtttccgttttctcacagccctctggcttttccaccactgagacactttgcgctcaggacttcagtgacgtcatctttctgcggcgcgcggacacccgccggtggaagaagaaacagctccgccgtccttcgcttcttttgctgggctgctgctccttcggcatcatggcgccgtcgctgtggaaggggctggtgggcatcggtctctttgccctagcccacgccgccttttccgctgcgcagcatcgttcttatatgcgattaacagaaaaagaagatgaatcactgccaatagatatagttcttcagacacttctggcctttgcagttacctgttacggtatagttcatattgcaggagagtttaaagacatggatgccacttcagaactgaaaaataagacatttgatacgttaaggaatcacccatccttttatgtatttaatcatcgtggtcgagtacttttccggccttcggatacagcaaattcttcaaaccaagatgcattgtcctctaacacatcattgaagttacgaaaactcgaatcactgcgtcgttaagatttttacaaattataataataggacaggacacagagctggaatattggagtttggggtataaaacactcctccctgcccccattagtatttatattgatctttcagacctactttagtaaaaaaaaccatggcccttgtttatatactgttaatccaatcattaatgcagtgtaagttatatgtgaaatgagtctttggtatttcatataggaattattttttttttcatttaaaacaaatccacatcttttgtaaaagccactgttttgaacacatttccttgaaaaatgttggtggtttttgtgattatttatttttttagatttcttttcttttgcactacaatttttggaatccttttggaaatactgtgtgactgctgtgttttgcagcatgaattatagtaaaatggtcttcaattcttaacaaatggacttccctgatgagaccaaaatggtgatttaacagtttttcttgtgtcccctaaaaagtggctctgcttcagaagtacttgccagtttttaatttatttgtgacttttcaccctaccctgctcccatataccttctaccatcagctgtcttgtttcatcatttctctgagattctgtgtgcagtgagcaatttttgtgtcagaaattctttgtcagaacaaatatatgtaacaggctcaacttactgtaaagctacttgtgttctcttcatttgtctgtaaaaatttccctaattgattatatagtgtaagaatagttgaagactagttgaagaccttttgtgatttcattatcatgcctatgcagaagaaaaatcattgaggaaaattgtcattagccagtttaactgattcaaactctgtttatttcatactaaactagtgaataagtgaaataaaggaaactcgtcattaatctaaagacagagttcaaaggaattgggccaaatatattctcagtatttggaactaatgtttttaaggtttttaggaaaatcaggtcatttaagaaattgttttgtagtttctggtttatagcagtcttcaagttttccatcttcactgtatgttgctgaaagtgaggatgaggatacagagttgatatttttagaaacagtaattttacttttaaggaaattggctagctctttgagctagagagctgtaggaagctcaacatttctttgtagagaacgttgctttttttggattgtacaggtataaaaacattgcttttgttgaattgtataggtgtaaaaagggaataactgtatgcaggtttgaaaaggaaatgtgctttaggcatgagtcataagatgccattgtacttgtaggcattttattttcctttagaaatggacatcagctcttctcttctgactggtaacacatagccccaaagcatgagattatttttcattgggtttttattgttgtttagttttggtttgttacgccagcccagtctgtctgcggaacactgactctgctctctaatgagaacaaagttagaaatctgccgataacctaaaataatttagaaatgaattaaaaatgtgaaatcgggttaaagtgatgatgataaaatagcatgcaagaaacaagctccttccatcagacttggctactgttttcttctggtacgatttggtttggaagagcctcttgtttccttctctttggggtatgtcttcgtttcttaatatgtttgtaacattattgagatataattcacataccttacaattcacttattttaagggtacaatttagtggtttttagtgtattcacaaagttgtgtaaccgtgaccacagtcaattttagaacatttcgttaccccaaaaagaaaccctgtacccttgagcagtcacctctcattttctcccagtgcccaccccatccccgagcccctggcaaccactaatctatttctctctctgtagatttgcttattctggtcatttcatataaatggaattctacaatattcggtcttttgggactggcttcccaaatatgattttctatatggagtgagaaaattcttctcatcttgagaactcttattgctgtgaaagggagtggttggtaaaatcaatagatttcaggcaagagggccagatacctaacaggtttttctccgtgaatcttatgctgagtagtttttcctcataaccaagcatttatgatatattactacttataatactgtggctagtctctagaatggatgttgaaatctttgcctcctcagtcgggaagagtcctgctaaaaatcaggctaaaaatcaggccaaaaatcaggccaaatgacttggcaaataattgacaaagtggttttcacgtgtgtctatctttgctagcagcttgtatacctcaggccaggtgagctccccaaatttcttttttcatttactccagtgagtttctgctgtctttttcaagtatgtaccataggacttaaaggtgatttggatgcgttgtaacactgctaaatatgctaagtacagaattttatctacagtactgtgagacagtcaattattgcctagggtagttcaaaaatatgatgtgagctagttaagcctttgcttgactgatttcagtgatattcagaagtgtgtaccaatcaaggctctttaaaatacggaacgactcacttaataaccagggaaccagccaaatactgtgcagccgcagaatatgcatatcaatgagttggaggtgattattctctgtaactccctaatgattgttttctaagcattgtggcttctcagtggcttgacagcatcttcctggttgtatgtggcctgtttacatgatgtattgaataatgttgtttgttgtgagcatcaatgcctgtaacaccaaactaaacacgtgtttttgggatatgtttccaatctttaaatgaccttgccctgtccaataaataaatgattgtctcaccctgtt

SEQ ID NO: 152739 - DNA, 2360 bp, Homo sapiens
  Payload ID: 10048
  Gene Symbol: MME
  Gene Name: membrane metallo-endopeptidase
  Uniprot ID: P08473
  ENST ID: ENST00000360490
  CDS Start-End: 79-2331
tgggggctgggaatttgccattctgctgtacagacactgatttttttttcttctttttaaaaagcaagattttaggtgatgggcaagtcagaaagtcagatggatataactgatatcaacactccaaagccaaagaagaaacagcgatggactccactggagatcagcctctcggtccttgtcctgctcctcaccatcatagctgtgacaatgatcgcactctatgcaacctacgatgatggtatttgcaagtcatcagactgcataaaatcagctgctcgactgatccaaaacatggatgccaccactgagccttgtacagactttttcaaatatgcttgcggaggctggttgaaacgtaatgtcattcccgagaccagctcccgttacggcaactttgacattttaagagatgaactagaagtcgttttgaaagatgtccttcaagaacccaaaactgaagatatagtagcagtgcagaaagcaaaagcattgtacaggtcttgtataaatgaatctgctattgatagcagaggtggagaacctctactcaaactgttaccagacatatatgggtggccagtagcaacagaaaactgggagcaaaaatatggtgcttcttggacagctgaaaaagctattgcacaactgaattctaaatatgggaaaaaagtccttattaatttgtttgttggcactgatgataagaattctgtgaatcatgtaattcatattgaccaacctcgacttggcctcccttctagagattactatgaatgcactggaatctataaagaggcttgtacagcatatgtggattttatgatttctgtggccagattgattcgtcaggaagaaagattgcccatcgatgaaaaccagcttgctttggaaatgaataaagttatggaattggaaaaagaaattgccaatgctacggctaaacctgaagatcgaaatgatccaatgcttctgtataacaagatgacattggcccagatccaaaataacttttcactagagatcaatgggaagccattcagctggttgaatttcacaaatgaaatcatgtcaactgtgaatattagtattacaaatgaggaagatgtggttgtttatgctccagaatatttaaccaaacttaagcccattcttaccaaatattctgccagagatcttcaaaatttaatgtcctggagattcataatggatcttgtaagcagcctcagccgaacctacaaggagtccagaaatgctttccgcaaggccctttatggtacaacctcagaaacagcaacttggagacgttgtgcaaactatgtcaatgggaatatggaaaatgctgtggggaggctttatgtggaagcagcatttgctggagagagtaaacatgtggtcgaggatttgattgcacagatccgagaagtttttattcagactttagatgacctcacttggatggatgccgagacaaaaaagagagctgaagaaaaggccttagcaattaaagaaaggatcggctatcctgatgacattgtttcaaatgataacaaactgaataatgagtacctcgagttgaactacaaagaagatgaatacttcgagaacataattcaaaatttgaaattcagccaaagtaaacaactgaagaagctccgagaaaaggtggacaaagatgagtggataagtggagcagctgtagtcaatgcattttactcttcaggaagaaatcagatagtcttcccagccggcattctgcagccccccttctttagtgcccagcagtccaactcattgaactatgggggcatcggcatggtcataggacacgaaatcacccatggcttcgatgacaatggcagaaactttaacaaagatggagacctcgttgactggtggactcaacagtctgcaagtaactttaaggagcaatcccagtgcatggtgtatcagtatggaaacttttcctgggacctggcaggtggacagcaccttaatggaattaatacactgggagaaaacattgctgataatggaggtcttggtcaagcatacagagcctatcagaattatattaaaaagaatggcgaagaaaaattacttcctggacttgacctaaatcacaaacaactatttttcttgaactttgcacaggtgtggtgtggaacctataggccagagtatgcggttaactccattaaaacagatgtgcacagtccaggcaatttcaggattattgggactttgcagaactctgcagagttttcagaagcctttcactgccgcaagaattcatacatgaatccagaaaagaagtgccgggtttggtgatcttcaaaagaagcattgcagcccttggc

SEQ ID NO: 152740 - DNA, 1319 bp, Homo sapiens
  Payload ID: 10048
  Gene Symbol: MME
  Gene Name: membrane metallo-endopeptidase
  ENST ID: ENST00000382989
  CDS Start-End: 457-699
gctgagggagaaaggtccaaagggcgcgagcgcccagggcgctgggagcccgtgggacgggcacggggagggcagagccagccgaggggagcggctgccgggaggtgcgctgagcagggtccgcagctaaggtccagcgcgatccgagcgcccaggaccctgcggccgtggaggaggcgtgccctgggaaggagccgctactgggacctgaagagtgaggggagggagaggggcccagagggtgacctggaggagggctctggaagtcacgtcaggttggctcttcaggttcatttccatagttccctgcggcctctgccttggggagttatgttttgttaccgagatccgcgctaccagattgcaccggggctgatttgggggctgggaatttgccattctgctgtacagacactgatttttttttcttctttttaaaaagcaagattttaggtgatgggcaagtcagaaagtcagatggatataactgatatcaacactccaaagccaaagaagaaacagcgatggactccactggagatcagcctctcggtccttgtcctgctcctcaccatcatagctgtgacaatgatcgcactctatgcaacctacgatgatggtatttgcaagtcatcagactgcataaaatcaggcatggtagcacgcgcctataatcccagagggaggagaattgcttgaacccaggaggcagaggttgaagcgagccaagattgcacgactgcactccagcctggaagacagcgcaagactctatctccaaaaaaaagaaaaagacaacagagaattgaggggtctgcagaagcatatgttagaagtgtggtcctaaattatccagaggccagagaagccaagctaagacgtgatcaatacagtttacaagagaaagtgggaccacctccacctgtatagtcatgcaggttgtacactgcatatttgtcgatggcagccttgacagacaggcttgtggaacatcaagacctggatgaaacacctctcagaactgtccactccttttattttaattctgcacataccaagaaaacttttgatgattacttaattattaatacaaggagaggtggcattctgttacttgaaagatattttcatcatggtgagataatgcacagcggtccccttcttatcctctgaggatcccccaagacctcagtggatgtctgacactggactgaaccctatatatgctatattttttctgtatacatacctatgataaagtttaatttataaattagacaaagattaataacaataattaataaaaaataaaacgatta

SEQ ID NO: 152741 - DNA, 2556 bp, Homo sapiens
  Payload ID: 10048
  Gene Symbol: MME
  Gene Name: membrane metallo-endopeptidase
  Uniprot ID: P08473
  ENST ID: ENST00000493237
  CDS Start-End: 135-2387
gcggctgccgggaggtgcgctgagcagggtccgcagctaaggtccagcgcgatccgagcgcccaggaccctgcggccgtggaggaggcgtgccctgggaaggagccgctactgggacctgaagaattttaggtgatgggcaagtcagaaagtcagatggatataactgatatcaacactccaaagccaaagaagaaacagcgatggactccactggagatcagcctctcggtccttgtcctgctcctcaccatcatagctgtgacaatgatcgcactctatgcaacctacgatgatggtatttgcaagtcatcagactgcataaaatcagctgctcgactgatccaaaacatggatgccaccactgagccttgtacagactttttcaaatatgcttgcggaggctggttgaaacgtaatgtcattcccgagaccagctcccgttacggcaactttgacattttaagagatgaactagaagtcgttttgaaagatgtccttcaagaacccaaaactgaagatatagtagcagtgcagaaagcaaaagcattgtacaggtcttgtataaatgaatctgctattgatagcagaggtggagaacctctactcaaactgttaccagacatatatgggtggccagtagcaacagaaaactgggagcaaaaatatggtgcttcttggacagctgaaaaagctattgcacaactgaattctaaatatgggaaaaaagtccttattaatttgtttgttggcactgatgataagaattctgtgaatcatgtaattcatattgaccaacctcgacttggcctcccttctagagattactatgaatgcactggaatctataaagaggcttgtacagcatatgtggattttatgatttctgtggccagattgattcgtcaggaagaaagattgcccatcgatgaaaaccagcttgctttggaaatgaataaagttatggaattggaaaaagaaattgccaatgctacggctaaacctgaagatcgaaatgatccaatgcttctgtataacaagatgacattggcccagatccaaaataacttttcactagagatcaatgggaagccattcagctggttgaatttcacaaatgaaatcatgtcaactgtgaatattagtattacaaatgaggaagatgtggttgtttatgctccagaatatttaaccaaacttaagcccattcttaccaaatattctgccagagatcttcaaaatttaatgtcctggagattcataatggatcttgtaagcagcctcagccgaacctacaaggagtccagaaatgctttccgcaaggccctttatggtacaacctcagaaacagcaacttggagacgttgtgcaaactatgtcaatgggaatatggaaaatgctgtggggaggctttatgtggaagcagcatttgctggagagagtaaacatgtggtcgaggatttgattgcacagatccgagaagtttttattcagactttagatgacctcacttggatggatgccgagacaaaaaagagagctgaagaaaaggccttagcaattaaagaaaggatcggctatcctgatgacattgtttcaaatgataacaaactgaataatgagtacctcgagttgaactacaaagaagatgaatacttcgagaacataattcaaaatttgaaattcagccaaagtaaacaactgaagaagctccgagaaaaggtggacaaagatgagtggataagtggagcagctgtagtcaatgcattttactcttcaggaagaaatcagatagtcttcccagccggcattctgcagccccccttctttagtgcccagcagtccaactcattgaactatgggggcatcggcatggtcataggacacgaaatcacccatggcttcgatgacaatggcagaaactttaacaaagatggagacctcgttgactggtggactcaacagtctgcaagtaactttaaggagcaatcccagtgcatggtgtatcagtatggaaacttttcctgggacctggcaggtggacagcaccttaatggaattaatacactgggagaaaacattgctgataatggaggtcttggtcaagcatacagagcctatcagaattatattaaaaagaatggcgaagaaaaattacttcctggacttgacctaaatcacaaacaactatttttcttgaactttgcacaggtgtggtgtggaacctataggccagagtatgcggttaactccattaaaacagatgtgcacagtccaggcaatttcaggattattgggactttgcagaactctgcagagttttcagaagcctttcactgccgcaagaattcatacatgaatccagaaaagaagtgccgggtttggtgatcttcaaaagaagcattgcagcccttggctagacttgccaacaccacagaaatggggaattctctaatcgaaagaaaatgggccctaggggtcactgtactgacttgagggtgattaacagagagggcaccatcacaatacagataacattaggttgtcctagaaaggg

SEQ ID NO: 152742 - DNA, 593 bp, Homo sapiens
  Payload ID: 10048
  Gene Symbol: MME
  Gene Name: membrane metallo-endopeptidase
  ENST ID: ENST00000462837
  CDS Start-End: 110-593
aacaaaaaacaaaaggttgtgactgagacctgtcaaattcatttggctctatatactttgcattcagcaacaaaattttgacttctcaacagcaaaaatattttaggtgatgggcaagtcagaaagtcagatggatataactgatatcaacactccaaagccaaagaagaaacagcgatggactccactggagatcagcctctcggtccttgtcctgctcctcaccatcatagctgtgacaatgatcgcactctatgcaacctacgatgatggtatttgcaagtcatcagactgcataaaatcagctgctcgactgatccaaaacatggatgccaccactgagccttgtacagactttttcaaatatgcttgcggaggctggttgaaacgtaatgtcattcccgagaccagctcccgttacggcaactttgacattttaagagatgaactagaagtcgttttgaaagatgtccttcaagaacccaaaactgaagatatagtagcagtgcagaaagcaaaagcattgtacaggtcttgtataaatgaatctgctattgatagcagaggtggagaacctctactcaaactgttac

SEQ ID NO: 152743 - DNA, 324 bp, Homo sapiens
  Payload ID: 10048
  Gene Symbol: MME
  Gene Name: membrane metallo-endopeptidase
  ENST ID: ENST00000497890
  CDS Start-End: 279-324
gaccattttcagaatgttgtctaaccagttaatagatactggtatcagtagtagtagtaattttgaactgtaaaaataaaggttgtttttatgactaaaataaactacttcatgtgttcattcgttttgctgtttatctatattaatatttcaaattattgcttagtcaaaacctcaaggtattagtcactggtttttgagcttataaaggaagccactggagcaagatataaaattaaccattgatgttagtccagagttcaaaaggattttaggtgatgggcaagtcagaaagtcagatggatataactgatatcaacactc

SEQ ID NO: 152744 - DNA, 5622 bp, Homo sapiens
  Payload ID: 10048
  Gene Symbol: MME
  Gene Name: membrane metallo-endopeptidase
  Uniprot ID: P08473
  ENST ID: ENST00000460393
  CDS Start-End: 121-2373
gagagcgccgagacgcgcggggcgcggagatgtgcaagtggcgaagcttgaccgagagcaggctggagcagccgcccaactcctggcgcgggatctgctgaggggtcacgattttaggtgatgggcaagtcagaaagtcagatggatataactgatatcaacactccaaagccaaagaagaaacagcgatggactccactggagatcagcctctcggtccttgtcctgctcctcaccatcatagctgtgacaatgatcgcactctatgcaacctacgatgatggtatttgcaagtcatcagactgcataaaatcagctgctcgactgatccaaaacatggatgccaccactgagccttgtacagactttttcaaatatgcttgcggaggctggttgaaacgtaatgtcattcccgagaccagctcccgttacggcaactttgacattttaagagatgaactagaagtcgttttgaaagatgtccttcaagaacccaaaactgaagatatagtagcagtgcagaaagcaaaagcattgtacaggtcttgtataaatgaatctgctattgatagcagaggtggagaacctctactcaaactgttaccagacatatatgggtggccagtagcaacagaaaactgggagcaaaaatatggtgcttcttggacagctgaaaaagctattgcacaactgaattctaaatatgggaaaaaagtccttattaatttgtttgttggcactgatgataagaattctgtgaatcatgtaattcatattgaccaacctcgacttggcctcccttctagagattactatgaatgcactggaatctataaagaggcttgtacagcatatgtggattttatgatttctgtggccagattgattcgtcaggaagaaagattgcccatcgatgaaaaccagcttgctttggaaatgaataaagttatggaattggaaaaagaaattgccaatgctacggctaaacctgaagatcgaaatgatccaatgcttctgtataacaagatgacattggcccagatccaaaataacttttcactagagatcaatgggaagccattcagctggttgaatttcacaaatgaaatcatgtcaactgtgaatattagtattacaaatgaggaagatgtggttgtttatgctccagaatatttaaccaaacttaagcccattcttaccaaatattctgccagagatcttcaaaatttaatgtcctggagattcataatggatcttgtaagcagcctcagccgaacctacaaggagtccagaaatgctttccgcaaggccctttatggtacaacctcagaaacagcaacttggagacgttgtgcaaactatgtcaatgggaatatggaaaatgctgtggggaggctttatgtggaagcagcatttgctggagagagtaaacatgtggtcgaggatttgattgcacagatccgagaagtttttattcagactttagatgacctcacttggatggatgccgagacaaaaaagagagctgaagaaaaggccttagcaattaaagaaaggatcggctatcctgatgacattgtttcaaatgataacaaactgaataatgagtacctcgagttgaactacaaagaagatgaatacttcgagaacataattcaaaatttgaaattcagccaaagtaaacaactgaagaagctccgagaaaaggtggacaaagatgagtggataagtggagcagctgtagtcaatgcattttactcttcaggaagaaatcagatagtcttcccagccggcattctgcagccccccttctttagtgcccagcagtccaactcattgaactatgggggcatcggcatggtcataggacacgaaatcacccatggcttcgatgacaatggcagaaactttaacaaagatggagacctcgttgactggtggactcaacagtctgcaagtaactttaaggagcaatcccagtgcatggtgtatcagtatggaaacttttcctgggacctggcaggtggacagcaccttaatggaattaatacactgggagaaaacattgctgataatggaggtcttggtcaagcatacagagcctatcagaattatattaaaaagaatggcgaagaaaaattacttcctggacttgacctaaatcacaaacaactatttttcttgaactttgcacaggtgtggtgtggaacctataggccagagtatgcggttaactccattaaaacagatgtgcacagtccaggcaatttcaggattattgggactttgcagaactctgcagagttttcagaagcctttcactgccgcaagaattcatacatgaatccagaaaagaagtgccgggtttggtgatcttcaaaagaagcattgcagcccttggctagacttgccaacaccacagaaatggggaattctctaatcgaaagaaaatgggccctaggggtcactgtactgacttgagggtgattaacagagagggcaccatcacaatacagataacattaggttgtcctagaaagggtgtggagggaggaagggggtctaaggtctatcaagtcaatcatttctcactgtgtacataatgcttaatttctaaagataatattactgtttatttctgtttctcatatggtctaccagtttgctgatgtccctagaaaacaatgcaaaacctttgaggtagaccaggatttctaatcaaaagggaaaagaagatgttgaagaatacagttaggcaccagaagaacagtaggtgacactatagtttaaaacacattgcctaactactagtttttacttttatttgcaacatttacagtccttcaaaatccttccaaagaattcttatacacattggggccttggagcttacatagttttaaactcatttttgccatacatcagttattcattctgtgatcatttattttaagcactcttaaagcaaaaaatgaatgtctaaaattgttttttgttgtacctgctttgactgatgctgagattcttcaggcttcctgcaattttctaagcaatttcttgctctatctctcaaaacttggtatttttcagagatttatataaatgtaaaaataataatttttatatttaattattaactacatttatgagtaactattattataggtaatcaatgaatattgaagtttcagcttaaaataaacagttgtgaaccaagatctataaagcgatatacagatgaaaatttgagactatttaaacttataaatcatattgatgaaaagatttaagcacaaactttagggtaaaaattgccattggacagttgtctagagatatatatacttgtggttttcaaattggactttcaaaattaaatctgtccctgagagtgtctctgataaaagggcaaatctgcacctatgtagctctgcatctcctgtcttttcaggtttgtcatcagatggaaatattttgataataaattgaaattgtgaactcattgctccctaagactgtgacaactgtctaactttagaagtgcatttctgaatagaaatgggaggcctctgatggaccttctagaattataagtcacaaagagttctggaaaagaactgtttactgcttgataggaattcatcttttgaggcttctgttcctctcttttcctgttgtattgactattttcgttcattacttgattaagattttacaaaagaggagcacttccaaaattcttatttttcctaacaaaagatgaaagcagggaatttctatctaaatgatgagtattagttccctgtctcttgaaaaatgcccatttgcctttaaaaaaaaaagttacagaaatactataacatatgtacataaattgcataaagcataagtatacagttcaataaacttaactttaactgaacaatggccctgtagccagcacctgtaagaaacagagcagtaccagcgctctaaaagcacctccttgtcactttattactcccagaacaacaactatcctgacttctaatatcattcactagctttgcctggttttgtcttttatgcagatagaatcaatcagtatgtattcttttgtgcctggcttctttctctcagccttacatttgtgagattcctctgtattgtgctgattgtggatcttttcattctcattgcagaataatgttctattgtgggacttattacaatttgttcatcctattgttgatgggcacttgagaactttccattttggcgctattacaaatagtgcaactatgaatgtactgcatgttaccatcttacttgagcctttaatggacttatttcttcaaatccttccaaaaattattataagcattgaaattatagtttcaagccaactgtggatacccttaccctttcctcctttatcacaaccaccgttacaagtatacttatatttccctaaaatacatttaaaacttacctaagtgacatttgtagttggagtaataggagcttccagctctaataaaacagctgtctctaacttattttatttccatcatgtcagagcaggtgaagagccagaagtgaagagtgactagtacaaattataaaaagccactagactcttcactgttagctttttaaaacattaggctcccatccctatggaggaacaactctccagtgcctggatcccctctgtctacaaatataagattttctgggcctaaaggatagatcaaagtcaaaaatagcaatgcctccctatccctcacacatccagacatcatgaattttacatggtactcttgttgagttctgtagagccttctgatgtctctaaagcactaccgattctttggagttgtcacatcagataagacatatctctaattccatccataaatccagttctactatggctgagttctggtcaaagaaagaaagtttagaagctgagacacaaagggttgggagctgatgaaactcacaaatgatggtaggaagaagctctcgacaatacccgttggcaaggagtctgcctccatgctgcagtgttcgagtggattgtaggtgcaagatggaaaggattgtaggtgcaagctgtccagagaaaagagtccttgttccagccctattctgccactcctgacagggtgaccttgggtatttgcaatattcctttgggcctctgcttctctcacctaaaaaaagagaattagattatattggtggttctcagcaagagaaggagtatgtgtccaatgctgccttcccatgaatctgtctcccagttatgaatcagtgggcaggataaactgaaaactcccatttacgtgtctgaatcgagtgagacaaaattttagtccaaataacaagtaccaaagttttatcaagtttgggtctgtgctgctgttactgttaaccatttaagtggggcaaaaccttgctaattttctcaaaagcatttatcattcttgttgccacagctggagctctcaaactaaaagacatttgttattttggaaagaagaaagactctattctcaaagtttcctaatcagaaatttttatcagtttccagtctcaaaaatacaaaataaaaacaaacgtttttaatactattgc

SEQ ID NO: 152745 - DNA, 667 bp, Homo sapiens
  Payload ID: 10048
  Gene Symbol: MME
  Gene Name: membrane metallo-endopeptidase
  ENST ID: ENST00000491026
  CDS Start-End: 310-667
gtagagcagcactaaccaggggagtaatatggttggcacttcgtgtccagaactccgtatttcaggctgggaaacacctaattaatgtctgggaaacaagaagatgatttatcctgagtacctctgtcctcagcttctgcagacacagtttaaatatggaaactgtttctccttcttcctgtgcctcagtttccatagaacaaactgtaattgcatagcacagcttcaggaacctgcagatataagttaatgttataatgtgcagtgaagatgaaaactgcttagctaagtctaagtctattttaggtgatgggcaagtcagaaagtcagatggatataactgatatcaacactccaaagccaaagaagaaacagcgatggactccactggagatcagcctctcggtccttgtcctgctcctcaccatcatagctgtgacaatgatcgcactctatgcaacctacgatgatggtatttgcaagtcatcagactgcataaaatcagctgctcgactgatccaaaacatggatgccaccactgagccttgtacagactttttcaaatatgcttgcggaggctggttgaaacgtaatgtcattcccgagaccagctcccgttacggcaactttgacattttaagagatgaactagaagtcgttttgaaag

SEQ ID NO: 152746 - DNA, 3590 bp, Homo sapiens
  Payload ID: 10048
  Gene Symbol: MME
  Gene Name: membrane metallo-endopeptidase
  Uniprot ID: P08473
  ENST ID: ENST00000462745
  CDS Start-End: 213-2465
agagccagccgaggggagcggctgccgggaggtgcgctgagcagggtccgcagctaaggtccagcgcgatccgagcgcccaggaccctgcggccgtggaggaggcgtgccctgggaaggagccgctactgggacctgaagagtgaggggagggagaggggcccagagggtgacctggaggagggctctggaagtcacgtcagattttaggtgatgggcaagtcagaaagtcagatggatataactgatatcaacactccaaagccaaagaagaaacagcgatggactccactggagatcagcctctcggtccttgtcctgctcctcaccatcatagctgtgacaatgatcgcactctatgcaacctacgatgatggtatttgcaagtcatcagactgcataaaatcagctgctcgactgatccaaaacatggatgccaccactgagccttgtacagactttttcaaatatgcttgcggaggctggttgaaacgtaatgtcattcccgagaccagctcccgttacggcaactttgacattttaagagatgaactagaagtcgttttgaaagatgtccttcaagaacccaaaactgaagatatagtagcagtgcagaaagcaaaagcattgtacaggtcttgtataaatgaatctgctattgatagcagaggtggagaacctctactcaaactgttaccagacatatatgggtggccagtagcaacagaaaactgggagcaaaaatatggtgcttcttggacagctgaaaaagctattgcacaactgaattctaaatatgggaaaaaagtccttattaatttgtttgttggcactgatgataagaattctgtgaatcatgtaattcatattgaccaacctcgacttggcctcccttctagagattactatgaatgcactggaatctataaagaggcttgtacagcatatgtggattttatgatttctgtggccagattgattcgtcaggaagaaagattgcccatcgatgaaaaccagcttgctttggaaatgaataaagttatggaattggaaaaagaaattgccaatgctacggctaaacctgaagatcgaaatgatccaatgcttctgtataacaagatgacattggcccagatccaaaataacttttcactagagatcaatgggaagccattcagctggttgaatttcacaaatgaaatcatgtcaactgtgaatattagtattacaaatgaggaagatgtggttgtttatgctccagaatatttaaccaaacttaagcccattcttaccaaatattctgccagagatcttcaaaatttaatgtcctggagattcataatggatcttgtaagcagcctcagccgaacctacaaggagtccagaaatgctttccgcaaggccctttatggtacaacctcagaaacagcaacttggagacgttgtgcaaactatgtcaatgggaatatggaaaatgctgtggggaggctttatgtggaagcagcatttgctggagagagtaaacatgtggtcgaggatttgattgcacagatccgagaagtttttattcagactttagatgacctcacttggatggatgccgagacaaaaaagagagctgaagaaaaggccttagcaattaaagaaaggatcggctatcctgatgacattgtttcaaatgataacaaactgaataatgagtacctcgagttgaactacaaagaagatgaatacttcgagaacataattcaaaatttgaaattcagccaaagtaaacaactgaagaagctccgagaaaaggtggacaaagatgagtggataagtggagcagctgtagtcaatgcattttactcttcaggaagaaatcagatagtcttcccagccggcattctgcagccccccttctttagtgcccagcagtccaactcattgaactatgggggcatcggcatggtcataggacacgaaatcacccatggcttcgatgacaatggcagaaactttaacaaagatggagacctcgttgactggtggactcaacagtctgcaagtaactttaaggagcaatcccagtgcatggtgtatcagtatggaaacttttcctgggacctggcaggtggacagcaccttaatggaattaatacactgggagaaaacattgctgataatggaggtcttggtcaagcatacagagcctatcagaattatattaaaaagaatggcgaagaaaaattacttcctggacttgacctaaatcacaaacaactatttttcttgaactttgcacaggtgtggtgtggaacctataggccagagtatgcggttaactccattaaaacagatgtgcacagtccaggcaatttcaggattattgggactttgcagaactctgcagagttttcagaagcctttcactgccgcaagaattcatacatgaatccagaaaagaagtgccgggtttggtgatcttcaaaagaagcattgcagcccttggctagacttgccaacaccacagaaatggggaattctctaatcgaaagaaaatgggccctaggggtcactgtactgacttgagggtgattaacagagagggcaccatcacaatacagataacattaggttgtcctagaaagggtgtggagggaggaagggggtctaaggtctatcaagtcaatcatttctcactgtgtacataatgcttaatttctaaagataatattactgtttatttctgtttctcatatggtctaccagtttgctgatgtccctagaaaacaatgcaaaacctttgaggtagaccaggatttctaatcaaaagggaaaagaagatgttgaagaatacagttaggcaccagaagaacagtaggtgacactatagtttaaaacacattgcctaactactagtttttacttttatttgcaacatttacagtccttcaaaatccttccaaagaattcttatacacattggggccttggagcttacatagttttaaactcatttttgccatacatcagttattcattctgtgatcatttattttaagcactcttaaagcaaaaaatgaatgtctaaaattgttttttgttgtacctgctttgactgatgctgagattcttcaggcttcctgcaattttctaagcaatttcttgctctatctctcaaaacttggtatttttcagagatttatataaatgtaaaaataataatttttatatttaattattaactacatttatgagtaactattattataggtaatcaatgaatattgaagtttcagcttaaaataaacagttgtgaaccaagatctataaagcgatatacagatgaaaatttgagactatttaaacttataaatcatattgatgaaaagatttaagcacaaactttagggtaaaaattgccattggacagttgtctagagatatatatacttgtggttttcaaattggactttcaaaattaaatctgtccctgagagtgtctctgataaaagggcaaatctgcacctatgtagctctgcatctcctgtcttttcaggtttgtcatcagatggaaatattttgataataaattgaaattgtgaa

SEQ ID NO: 152747 - DNA, 856 bp, Homo sapiens
  Payload ID: 10048
  Gene Symbol: MME
  Gene Name: membrane metallo-endopeptidase
  ENST ID: ENST00000481828
  CDS Start-End: 157-856
agcctggagcccgcgcgccttgggcggatgcacggactgagaggcgcttggctgggctctcagcccgccactgccacccggccccgtgcgctcattggtcgggatgtgtcggctcagcagcctccaacttctcccgaatcccactgattttaggtgatgggcaagtcagaaagtcagatggatataactgatatcaacactccaaagccaaagaagaaacagcgatggactccactggagatcagcctctcggtccttgtcctgctcctcaccatcatagctgtgacaatgatcgcactctatgcaacctacgatgatggtatttgcaagtcatcagactgcataaaatcagctgctcgactgatccaaaacatggatgccaccactgagccttgtacagactttttcaaatatgcttgcggaggctggttgaaacgtaatgtcattcccgagaccagctcccgttacggcaactttgacattttaagagatgaactagaagtcgttttgaaagatgtccttcaagaacccaaaactgaagatatagtagcagtgcagaaagcaaaagcattgtacaggtcttgtataaatgaatctgctattgatagcagaggtggagaacctctactcaaactgttaccagacatatatgggtggccagtagcaacagaaaactgggagcaaaaatatggtgcttcttggacagctgaaaaagctattgcacaactgaattctaaatatgggaaaaaagtccttattaatttgtttgttggcactgatgataagaattctgtgaatcatgtaattcatattgaccaacctcgacttggcctcccttctagagattactatgaat

SEQ ID NO: 152748 - DNA, 2854 bp, Homo sapiens
  Payload ID: 10048
  Gene Symbol: MME
  Gene Name: membrane metallo-endopeptidase
  Uniprot ID: P08473
  ENST ID: ENST00000492661
  CDS Start-End: 212-2464
acattcctactgagtatgacgaatggttgttgatggttatcactggagattgaaaactgggattcctttttcaccaggaattggtgcctaccatggctggggatacacagtgatggatttgtgacttgctcctctgaaagctggcccaagggtgtacagcatatgaatgtgggggagtttacactacacacgctcttggctattttaggtgatgggcaagtcagaaagtcagatggatataactgatatcaacactccaaagccaaagaagaaacagcgatggactccactggagatcagcctctcggtccttgtcctgctcctcaccatcatagctgtgacaatgatcgcactctatgcaacctacgatgatggtatttgcaagtcatcagactgcataaaatcagctgctcgactgatccaaaacatggatgccaccactgagccttgtacagactttttcaaatatgcttgcggaggctggttgaaacgtaatgtcattcccgagaccagctcccgttacggcaactttgacattttaagagatgaactagaagtcgttttgaaagatgtccttcaagaacccaaaactgaagatatagtagcagtgcagaaagcaaaagcattgtacaggtcttgtataaatgaatctgctattgatagcagaggtggagaacctctactcaaactgttaccagacatatatgggtggccagtagcaacagaaaactgggagcaaaaatatggtgcttcttggacagctgaaaaagctattgcacaactgaattctaaatatgggaaaaaagtccttattaatttgtttgttggcactgatgataagaattctgtgaatcatgtaattcatattgaccaacctcgacttggcctcccttctagagattactatgaatgcactggaatctataaagaggcttgtacagcatatgtggattttatgatttctgtggccagattgattcgtcaggaagaaagattgcccatcgatgaaaaccagcttgctttggaaatgaataaagttatggaattggaaaaagaaattgccaatgctacggctaaacctgaagatcgaaatgatccaatgcttctgtataacaagatgacattggcccagatccaaaataacttttcactagagatcaatgggaagccattcagctggttgaatttcacaaatgaaatcatgtcaactgtgaatattagtattacaaatgaggaagatgtggttgtttatgctccagaatatttaaccaaacttaagcccattcttaccaaatattctgccagagatcttcaaaatttaatgtcctggagattcataatggatcttgtaagcagcctcagccgaacctacaaggagtccagaaatgctttccgcaaggccctttatggtacaacctcagaaacagcaacttggagacgttgtgcaaactatgtcaatgggaatatggaaaatgctgtggggaggctttatgtggaagcagcatttgctggagagagtaaacatgtggtcgaggatttgattgcacagatccgagaagtttttattcagactttagatgacctcacttggatggatgccgagacaaaaaagagagctgaagaaaaggccttagcaattaaagaaaggatcggctatcctgatgacattgtttcaaatgataacaaactgaataatgagtacctcgagttgaactacaaagaagatgaatacttcgagaacataattcaaaatttgaaattcagccaaagtaaacaactgaagaagctccgagaaaaggtggacaaagatgagtggataagtggagcagctgtagtcaatgcattttactcttcaggaagaaatcagatagtcttcccagccggcattctgcagccccccttctttagtgcccagcagtccaactcattgaactatgggggcatcggcatggtcataggacacgaaatcacccatggcttcgatgacaatggcagaaactttaacaaagatggagacctcgttgactggtggactcaacagtctgcaagtaactttaaggagcaatcccagtgcatggtgtatcagtatggaaacttttcctgggacctggcaggtggacagcaccttaatggaattaatacactgggagaaaacattgctgataatggaggtcttggtcaagcatacagagcctatcagaattatattaaaaagaatggcgaagaaaaattacttcctggacttgacctaaatcacaaacaactatttttcttgaactttgcacaggtgtggtgtggaacctataggccagagtatgcggttaactccattaaaacagatgtgcacagtccaggcaatttcaggattattgggactttgcagaactctgcagagttttcagaagcctttcactgccgcaagaattcatacatgaatccagaaaagaagtgccgggtttggtgatcttcaaaagaagcattgcagcccttggctagacttgccaacaccacagaaatggggaattctctaatcgaaagaaaatgggccctaggggtcactgtactgacttgagggtgattaacagagagggcaccatcacaatacagataacattaggttgtcctagaaagggtgtggagggaggaagggggtctaaggtctatcaagtcaatcatttctcactgtgtacataatgcttaatttctaaagataatattactgtttatttctgtttctcatatggtctaccagtttgctgatgtccctagaaaacaatgcaaaacctttgaggtagaccaggatttctaatcaaaagggaaaagaagatgttgaagaatacagttaggcaccaga

SEQ ID NO: 152749 - DNA, 892 bp, Homo sapiens
  Payload ID: 10048
  Gene Symbol: MME
  Gene Name: membrane metallo-endopeptidase
  ENST ID: ENST00000473730
  CDS Start-End: 613-892
tcaactggtataagaattgctgctttacattgctttgaaattaagcttacacttaaaatagtaatttattctgttggtaatattgtcgagctgaagtttgcaggttcttgttatcttagacctcctaattctctattctcgtctgtggcagtgtccacttttccgtttaaactttttatttaacacatcttcagttgaagtgaaatattttaagaatacaggtatgtttttgcgtaccctgctttatatgggactataagcctcaacttggtattttttttttttttgtattcttttgtttacttgtcccccttactcttctctatgggattgggtgtggttaagttggatattcaggtatttggggtttagtcatatgttccacagtgagattccagatactgtcccctgatgtcttaaagaaaaattgtgaaccttccagaattaactggaaatgaacgacaaagttaattaggagattaaacttgcatcatttctgcttttgctcaatgcttttgaaaaaaggctactaagagcaaaagacttcctttaagaatttacagggcatttacaagagggggagatggaggaagactttgcagattttaggtgatgggcaagtcagaaagtcagatggatataactgatatcaacactccaaagccaaagaagaaacagcgatggactccactggagatcagcctctcggtccttgtcctgctcctcaccatcatagctgtgacaatgatcgcactctatgcaacctacgatgatggtatttgcaagtcatcagactgcataaaatcagctgctcgactgatccaaaacatggatgccaccactgagccttgtacagactttttcaaatatgcttgcggaggctggttgaaac

SEQ ID NO: 152750 - DNA, 5523 bp, Homo sapiens
  Payload ID: 10048
  Gene Symbol: MME
  Gene Name: membrane metallo-endopeptidase
  Uniprot ID: P08473
  ENST ID: ENST00000615825
  CDS Start-End: 1-2253
atgggcaagtcagaaagtcagatggatataactgatatcaacactccaaagccaaagaagaaacagcgatggactccactggagatcagcctctcggtccttgtcctgctcctcaccatcatagctgtgacaatgatcgcactctatgcaacctacgatgatggtatttgcaagtcatcagactgcataaaatcagctgctcgactgatccaaaacatggatgccaccactgagccttgtacagactttttcaaatatgcttgcggaggctggttgaaacgtaatgtcattcccgagaccagctcccgttacggcaactttgacattttaagagatgaactagaagtcgttttgaaagatgtccttcaagaacccaaaactgaagatatagtagcagtgcagaaagcaaaagcattgtacaggtcttgtataaatgaatctgctattgatagcagaggtggagaacctctactcaaactgttaccagacatatatgggtggccagtagcaacagaaaactgggagcaaaaatatggtgcttcttggacagctgaaaaagctattgcacaactgaattctaaatatgggaaaaaagtccttattaatttgtttgttggcactgatgataagaattctgtgaatcatgtaattcatattgaccaacctcgacttggcctcccttctagagattactatgaatgcactggaatctataaagaggcttgtacagcatatgtggattttatgatttctgtggccagattgattcgtcaggaagaaagattgcccatcgatgaaaaccagcttgctttggaaatgaataaagttatggaattggaaaaagaaattgccaatgctacggctaaacctgaagatcgaaatgatccaatgcttctgtataacaagatgacattggcccagatccaaaataacttttcactagagatcaatgggaagccattcagctggttgaatttcacaaatgaaatcatgtcaactgtgaatattagtattacaaatgaggaagatgtggttgtttatgctccagaatatttaaccaaacttaagcccattcttaccaaatattctgccagagatcttcaaaatttaatgtcctggagattcataatggatcttgtaagcagcctcagccgaacctacaaggagtccagaaatgctttccgcaaggccctttatggtacaacctcagaaacagcaacttggagacgttgtgcaaactatgtcaatgggaatatggaaaatgctgtggggaggctttatgtggaagcagcatttgctggagagagtaaacatgtggtcgaggatttgattgcacagatccgagaagtttttattcagactttagatgacctcacttggatggatgccgagacaaaaaagagagctgaagaaaaggccttagcaattaaagaaaggatcggctatcctgatgacattgtttcaaatgataacaaactgaataatgagtacctcgagttgaactacaaagaagatgaatacttcgagaacataattcaaaatttgaaattcagccaaagtaaacaactgaagaagctccgagaaaaggtggacaaagatgagtggataagtggagcagctgtagtcaatgcattttactcttcaggaagaaatcagatagtcttcccagccggcattctgcagccccccttctttagtgcccagcagtccaactcattgaactatgggggcatcggcatggtcataggacacgaaatcacccatggcttcgatgacaatggcagaaactttaacaaagatggagacctcgttgactggtggactcaacagtctgcaagtaactttaaggagcaatcccagtgcatggtgtatcagtatggaaacttttcctgggacctggcaggtggacagcaccttaatggaattaatacactgggagaaaacattgctgataatggaggtcttggtcaagcatacagagcctatcagaattatattaaaaagaatggcgaagaaaaattacttcctggacttgacctaaatcacaaacaactatttttcttgaactttgcacaggtgtggtgtggaacctataggccagagtatgcggttaactccattaaaacagatgtgcacagtccaggcaatttcaggattattgggactttgcagaactctgcagagttttcagaagcctttcactgccgcaagaattcatacatgaatccagaaaagaagtgccgggtttggtgatcttcaaaagaagcattgcagcccttggctagacttgccaacaccacagaaatggggaattctctaatcgaaagaaaatgggccctaggggtcactgtactgacttgagggtgattaacagagagggcaccatcacaatacagataacattaggttgtcctagaaagggtgtggagggaggaagggggtctaaggtctatcaagtcaatcatttctcactgtgtacataatgcttaatttctaaagataatattactgtttatttctgtttctcatatggtctaccagtttgctgatgtccctagaaaacaatgcaaaacctttgaggtagaccaggatttctaatcaaaagggaaaagaagatgttgaagaatacagttaggcaccagaagaacagtaggtgacactatagtttaaaacacattgcctaactactagtttttacttttatttgcaacatttacagtccttcaaaatccttccaaagaattcttatacacattggggccttggagcttacatagttttaaactcatttttgccatacatcagttattcattctgtgatcatttattttaagcactcttaaagcaaaaaatgaatgtctaaaattgttttttgttgtacctgctttgactgatgctgagattcttcaggcttcctgcaattttctaagcaatttcttgctctatctctcaaaacttggtatttttcagagatttatataaatgtaaaaataataatttttatatttaattattaactacatttatgagtaactattattataggtaatcaatgaatattgaagtttcagcttaaaataaacagttgtgaaccaagatctataaagcgatatacagatgaaaatttgagactatttaaacttataaatcatattgatgaaaagatttaagcacaaactttagggtaaaaattgccattggacagttgtctagagatatatatacttgtggttttcaaattggactttcaaaattaaatctgtccctgagagtgtctctgataaaagggcaaatctgcacctatgtagctctgcatctcctgtcttttcaggtttgtcatcagatggaaatattttgataataaattgaaattgtgaactcattgctccctaagactgtgacaactgtctaactttagaagtgcatttctgaatagaaatgggaggcctctgatggaccttctagaattataagtcacaaagagttctggaaaagaactgtttactgcttgataggaattcatcttttgaggcttctgttcctctcttttcctgttgtattgactattttcgttcattacttgattaagattttacaaaagaggagcacttccaaaattcttatttttcctaacaaaagatgaaagcagggaatttctatctaaatgatgagtattagttccctgtctcttgaaaaatgcccatttgcctttaaaaaaaaaagttacagaaatactataacatatgtacataaattgcataaagcataagtatacagttcaataaacttaactttaactgaacaatggccctgtagccagcacctgtaagaaacagagcagtaccagcgctctaaaagcacctccttgtcactttattactcccagaacaacaactatcctgacttctaatatcattcactagctttgcctggttttgtcttttatgcagatagaatcaatcagtatgtattcttttgtgcctggcttctttctctcagccttacatttgtgagattcctctgtattgtgctgattgtggatcttttcattctcattgcagaataatgttctattgtgggacttattacaatttgttcatcctattgttgatgggcacttgagaactttccattttggcgctattacaaatagtgcaactatgaatgtactgcatgttaccatcttacttgagcctttaatggacttatttcttcaaatccttccaaaaattattataagcattgaaattatagtttcaagccaactgtggatacccttaccctttcctcctttatcacaaccaccgttacaagtatacttatatttccctaaaatacatttaaaacttacctaagtgacatttgtagttggagtaataggagcttccagctctaataaaacagctgtctctaacttattttatttccatcatgtcagagcaggtgaagagccagaagtgaagagtgactagtacaaattataaaaagccactagactcttcactgttagctttttaaaacattaggctcccatccctatggaggaacaactctccagtgcctggatcccctctgtctacaaatataagattttctgggcctaaaggatagatcaaagtcaaaaatagcaatgcctccctatccctcacacatccagacatcatgaattttacatggtactcttgttgagttctgtagagccttctgatgtctctaaagcactaccgattctttggagttgtcacatcagataagacatatctctaattccatccataaatccagttctactatggctgagttctggtcaaagaaagaaagtttagaagctgagacacaaagggttgggagctgatgaaactcacaaatgatggtaggaagaagctctcgacaatacccgttggcaaggagtctgcctccatgctgcagtgttcgagtggattgtaggtgcaagatggaaaggattgtaggtgcaagctgtccagagaaaagagtccttgttccagccctattctgccactcctgacagggtgaccttgggtatttgcaatattcctttgggcctctgcttctctcacctaaaaaaagagaattagattatattggtggttctcagcaagagaaggagtatgtgtccaatgctgccttcccatgaatctgtctcccagttatgaatcagtgggcaggataaactgaaaactcccatttacgtgtctgaatcgagtgagacaaaattttagtccaaataacaagtaccaaagttttatcaagtttgggtctgtgctgctgttactgttaaccatttaagtggggcaaaaccttgctaattttctcaaaagcatttatcattcttgttgccacagctggagctctcaaactaaaagacatttgttattttggaaagaagaaagactctattctcaaagtttcctaatcagaaatttttatcagtttccagtctcaaaaatacaaaataaaaacaaacgtttttaatactattgcttttatgcctagtcaactctg

SEQ ID NO: 152751 - DNA, 1315 bp, Homo sapiens
  Payload ID: 10048
  Gene Symbol: MME
  Gene Name: membrane metallo-endopeptidase
  ENST ID: ENST00000616757
  CDS Start-End: 457-696
gctgagggagaaaggtccaaagggcgcgagcgcccagggcgctgggagcccgtgggacgggcacggggagggcagagccagccgaggggagcggctgccgggaggtgcgctgagcagggtccgcagctaaggtccagcgcgatccgagcgcccaggaccctgcggccgtggaggaggcgtgccctgggaaggagccgctactgggacctgaagagtgaggggagggagaggggcccagagggtgacctggaggagggctctggaagtcacgtcaggttggctcttcaggttcatttccatagttccctgcggcctctgccttggggagttatgttttgttaccgagatccgcgctaccagattgcaccggggctgatttgggggctgggaatttgccattctgctgtacagacactgatttttttttcttctttttaaaaagcaagattttaggtgatgggcaagtcagaaagtcagatggatataactgatatcaacactccaaagccaaagaagaaacagcgatggactccactggagatcagcctctcggtccttgtcctgctcctcaccatcatagctgtgacaatgatcgcactctatgcaacctacgatggtgagttactcccacacctgtgcataagtgcaagcatggtagcacgcgcctataatcccagagggaggagaattgcttgaacccaggaggcagaggttgaagcgagccaagattgcacgactgcactccagcctggaagacagcgcaagactctatctccaaaaaaaagaaaaagacaacagagaattgaggggtctgcagaagcatatgttagaagtgtggtcctaaattatccagaggccagagaagccaagctaagacgtgatcaatacagtttacaagagaaagtgggaccacctccacctgtatagtcatgcaggttgtacactgcatatttgtcgatggcagccttgacagacaggcttgtggaacatcaagacctggatgaaacacctctcagaactgtccactccttttattttaattctgcacataccaagaaaacttttgatgattacttaattattaatacaaggagaggtggcattctgttacttgaaagatattttcatcatggtgagataatgcacagcggtccccttcttatcctctgaggatcccccaagacctcagtggatgtctgacactggactgaaccctatatatgctatattttttctgtatacatacctatgataaagtttaatttataaattagacaaagattaataacaataattaataaaaaataaaacgatt

SEQ ID NO: 152752 - DNA, 363 bp, Homo sapiens
  Payload ID: 10048
  Gene Symbol: MME
  Gene Name: membrane metallo-endopeptidase
  ENST ID: ENST00000625667
  CDS Start-End: 121-363
gagagcgccgagacgcgcggggcgcggagatgtgcaagtggcgaagcttgaccgagagcaggctggagcagccgcccaactcctggcgcgggatctgctgaggggtcacgattttaggtgatgggcaagtcagaaagtcagatggatataactgatatcaacactccaaagccaaagaagaaacagcgatggactccactggagatcagcctctcggtccttgtcctgctcctcaccatcatagctgtgacaatgatcgcactctatgcaacctacgatgatggtatttgcaagtcatcagactgcataaaatcaggcatggtagcacgcgcctataatcccagagggaggagaattgcttga

SEQ ID NO: 152753 - DNA, 2849 bp, Homo sapiens
  Payload ID: 10049
  Gene Symbol: MMEL1
  Gene Name: membrane metallo-endopeptidase-like 1
  Uniprot ID: Q495T6
  ENST ID: ENST00000378412
  CDS Start-End: 163-2502
actgctctcccatcccagtccctggaaatccacccacttggcccagctcaccccaactccaacccactgggacccagtctccaggggcctgactgtgggcggcagccactcctgagtgagcaaaggttcctccgcggtgctctcccgtccagagccctgctgatggggaagtccgaaggcccagtggggatggtggagagcgccggccgtgcagggcagaagcgcccggggttcctggagggggggctgctgctgctgctgctgctggtgaccgctgccctggtggccttgggtgtcctctacgccgaccgcagagggaagcagctgccacgccttgctagccggctgtgcttcttacaggaggagaggacctttgtaaaacgaaaaccccgagggatcccagaggcccaagaggtgagcgaggtctgcaccacccctggctgcgtgatagcagctgccaggatcctccagaacatggacccgaccacggaaccgtgtgacgacttctaccagtttgcatgcggaggctggctgcggcgccacgtgatccctgagaccaactcaagatacagcatctttgacgtcctccgcgacgagctggaggtcatcctcaaagcggtgctggagaattcgactgccaaggaccggccggctgtggagaaggccaggacgctgtaccgctcctgcatgaaccagagtgtgatagagaagcgaggctctcagcccctgctggacatcttggaggtggtgggaggctggccggtggcgatggacaggtggaacgagaccgtaggactcgagtgggagctggagcggcagctggcgctgatgaactcacagttcaacaggcgcgtcctcatcgacctcttcatctggaacgacgaccagaactccagccggcacatcatctacatagaccagcccaccttgggcatgccctcccgagagtactacttcaacggcggcagcaaccggaaggtgcgggaagcctacctgcagttcatggtgtcagtggccacgttgctgcgggaggatgcaaacctgcccagggacagctgcctggtgcaggaggacatggtgcaggtgctggagctggagacacagctggccaaggccacggtaccccaggaggagagacacgacgtcatcgccttgtaccaccggatgggactggaggagctgcaaagccagtttggcctgaagggatttaactggactctgttcatacaaactgtgctatcctctgtcaaaatcaagctgctgccagatgaggaagtggtggtctatggcatcccctacctgcagaaccttgaaaacatcatcgacacctactcagccaggaccatacagaactacctggtctggcgcctggtgctggaccgcattggtagcctaagccagagattcaaggacacacgagtgaactaccgcaaggcgctgtttggcacaatggtggaggaggtgcgctggcgtgaatgtgtgggctacgtcaacagcaacatggagaacgccgtgggctccctctacgtcagggaggcgttccctggagacagcaagagcatggtcagagaactcattgacaaggtgcggacagtgtttgtggagacgctggacgagctgggctggatggacgaggagtccaagaagaaggcgcaggagaaggccatgagcatccgggagcagatcgggcaccctgactacatcctggaggagatgaacaggcgcctggacgaggagtactccaatctgaacttctcagaggacctgtactttgagaacagtctgcagaacctcaaggtgggcgcccagcggagcctcaggaagcttcgggaaaaggtggacccaaatctctggatcatcggggcggcggtggtcaatgcgttctactccccaaaccgaaaccagattgtattccctgccgggatcctccagccccccttcttcagcaaggagcagccacaggccttgaactttggaggcattgggatggtgatcgggcacgagatcacgcacggctttgacgacaatggccggaacttcgacaagaatggcaacatgatggattggtggagtaacttctccacccagcacttccgggagcagtcagagtgcatgatctaccagtacggcaactactcctgggacctggcagacgaacagaacgtgaacggattcaacacccttggggaaaacattgctgacaacggaggggtgcggcaagcctataaggcctacctcaagtggatggcagagggtggcaaggaccagcagctgcccggcctggatctcacccatgagcagctcttcttcatcaactatgcccaggtgtggtgcgggtcctaccggcccgagttcgccatccaatccatcaagacagacgtccacagtcccctgaagtacagggtactggggtcgctgcagaacctggccgccttcgcagacacgttccactgtgcccggggcacccccatgcaccccaaggagcgatgccgcgtgtggtagccaaggccctgccgcgctgtgcggcccacgcccacccgctgctcggaggcatctgtgcgaaggtgcagctagcggcgacccagtgtacgtcccgccccggccaaccatgccaagcctgcctgccaggcctctgcgcctggcctagggtgcagccacctgcctgacacccagggatgagcagtgtccagtgcagtacctggaccggagccccctccacagacacccgcggggctcagtgcccccgtcacagctctgtagagacaatcaactgtgtcctgcccaccctccaaggtgcattgtcttccagtatctacagcttcagacttgagctaagtaaatgcttcaaa

SEQ ID NO: 152754 - DNA, 1943 bp, Homo sapiens
  Payload ID: 10049
  Gene Symbol: MMEL1
  Gene Name: membrane metallo-endopeptidase-like 1
  Uniprot ID: Q495T6
  ENST ID: ENST00000502556
  CDS Start-End: 11-1879
agccctgctgatggggaagtccgaaggcccagtggggatggtggagagcgccggccgtgcagggcagaagcgcccggggttcctggagggggggctgctgctgctgctgctgctggtgaccgctgccctggtggccttgggtgtcctctacgccgaccgcagagggaagcagctgccacgccttgctagccggctgtgcttcttacaggaggagaggacctttgtaaaacgaaaaccccgagggatcccagaggcccaagaggtgagcgaggtctgcaccacccctggctgcgtgatagcagctgccaggatcctccagaacatggacccgaccacggaaccgtgtgacgacttctaccagtttgcatgcggaggctggctgcggcgccacgtgatccctgagaccaactcaagatacagcatctttgacgtcctccgcgacgagctggaggtcatcctcaaagcggtgctggagaattcgactgccaaggccacggtaccccaggaggagagacacgacgtcatcgccttgtaccaccggatgggactggaggagctgcaaagccagtttggcctgaagggatttaactggactctgttcatacaaactgtgctatcctctgtcaaaatcaagctgctgccagatgaggaagtggtggtctatggcatcccctacctgcagaaccttgaaaacatcatcgacacctactcagccaggaccatacagaactacctggtctggcgcctggtgctggaccgcattggtagcctaagccagagattcaaggacacacgagtgaactaccgcaaggcgctgtttggcacaatggtggaggaggtgcgctggcgtgaatgtgtgggctacgtcaacagcaacatggagaacgccgtgggctccctctacgtcagggaggcgttccctggagacagcaagagcatggtcagagaactcattgacaaggtgcggacagtgtttgtggagacgctggacgagctgggctggatggacgaggagtccaagaagaaggcgcaggagaaggccatgagcatccgggagcagatcgggcaccctgactacatcctggaggagatgaacaggcgcctggacgaggagtactccaatctgaacttctcagaggacctgtactttgagaacagtctgcagaacctcaaggtgggcgcccagcggagcctcaggaagcttcgggaaaaggtggacccaaatctctggatcatcggggcggcggtggtcaatgcgttctactccccaaaccgaaaccagattgtattccctgccgggatcctccagccccccttcttcagcaaggagcagccacaggccttgaactttggaggcattgggatggtgatcgggcacgagatcacgcacggctttgacgacaatggccggaacttcgacaagaatggcaacatgatggattggtggagtaacttctccacccagcacttccgggagcagtcagagtgcatgatctaccagtacggcaactactcctgggacctggcagacgaacagaacgtgaacggattcaacacccttggggaaaacattgctgacaacggaggggtgcggcaagcctataaggcctacctcaagtggatggcagagggtggcaaggaccagcagctgcccggcctggatctcacccatgagcagctcttcttcatcaactatgcccaggtgtggtgcgggtcctaccggcccgagttcgccatccaatccatcaagacagacgtccacagtcccctgaagtacagggtactggggtcgctgcagaacctggccgccttcgcagacacgttccactgtgcccggggcacccccatgcaccccaaggagcgatgccgcgtgtggtagccaaggccctgccgcgctgtgcggcccacgcccacccgctgctcggaggcatctgtgcgaaggt

SEQ ID NO: 152755 - DNA, 2443 bp, Homo sapiens
  Payload ID: 10049
  Gene Symbol: MMEL1
  Gene Name: membrane metallo-endopeptidase-like 1
  Uniprot ID: Q495T6
  ENST ID: ENST00000504800
  CDS Start-End: 11-1846
agccctgctgatggggaagtccgaaggcccagtggggatggtggagagcgccggccgtgcagggcagaagcgcccggggttcctggagggggggctgctgctgctgctgctgctggtgaccgctgccctggtggccttgggtgtcctctacgccgaccgcagagggaagcagctgccacgccttgctagccggctgtgcttcttacaggaggagaggacctttgtaaaacgaaaaccccgagggatcccagaggcccaagaggtgagcgaggtctgcaccacccctggctgcgtgatagcagctgccaggatcctccagaacatggacccgaccacggaaccgtgtgacgacttctaccagtttgcatgcggaggctggctgcggcgccacgtgatccctgagaccaactcaagatacagcatctttgacgtcctccgcgacgagctggaggtcatcctcaaagcggtgctggagaattcgactgccaaggaccggccggctgtggagaaggccaggacgctgtaccgctcctgcatgaaccagagtgtgatagagaagcgaggctctcagcccctgctggacatcttggaggtggtgggaggctggccggtggcgatggacaggtggaacgagaccgtaggactcgagtgggagctggagcggcagctggcgctgatgaactcacagttcaacaggcgcgtcctcatcgacctcttcatctggaacgacgaccagaactccagccggcacatcatctacatagaccagcccaccttgggcatgccctcccgagagtactacttcaacggcggcagcaaccggaaggtgcgggaagcctacctgcagttcatggtgtcagtggccacgttgctgcgggaggatgcaaacctgcccagggacagctgcctggtgcaggaggacatggtgcaggtgctggagctggagacacagctggccaaggccacggtaccccaggaggagagacacgacgtcatcgccttgtaccaccggatgggactggaggagctgcaaagccagtttggcctgaagggatttaactggactctgttcatacaaactgtgctatcctctgtcaaaatcaagctgctgccagatgaggaagtggtggtctatggcatcccctacctgcagaaccttgaaaacatcatcgacacctactcagccaggaccatacagaactacctggtctggcgcctggtgctggaccgcattggtagcctaagccagagattcaaggacacacgagtgaactaccgcaaggcgctgtttggcacaatggtggaggaggtgcgctggcgtgaatgtgtgggctacgtcaacagcaacatggagaacgccgtgggctccctctacgtcagggaggcgttccctggagacagcaagagcatggtcagagaactcattgacaaggtgcggacagtgtttgtggagacgctggacgagctgggctggatggacgaggagtccaagaagaaggcgcaggagaaggccatgagcatccgggagcagatcgggcaccctgactacatcctggaggagatgaacaggcgcctggacgaggagtactccaatctgaacttctcagaggacctgtactttgagaacagtctgcagaacctcaaggtgggcgcccagcggagcctcaggaagcttcgggaaaaggtggacccaaatctctggatcatcggggcggcggtggtcaatgcgttctactccccaaaccgaaaccagattgcttattctttgtcccgcccttggggacagtattccctgccgggatcctccagccccccttcttcagcaaggagcagccacaggccttgaactttggaggcattgggatggtgatcgggcacgagatcacgcacggctttgacgacaatggccggaacttcgacaagaatggcaacatgatggattggtggagtaacttctccacccagcacttccgggagcagtcagagtgcatgatctaccagtacggcaactactcctgggacctggcagacgaacagaacgtgaacggattcaacacccttggggaaaacattgctgacaacggaggggtgcggcaagcctataaggcctacctcaagtggatggcagagggtggcaaggaccagcagctgcccggcctggatctcacccatgagcagctcttcttcatcaactatgcccaggtgtggtgcgggtcctaccggcccgagttcgccatccaatccatcaagacagacgtccacagtcccctgaagtacagggtactggggtcgctgcagaacctggccgccttcgcagacacgttccactgtgcccggggcacccccatgcaccccaaggagcgatgccgcgtgtggtagccaaggccctgccgcgctgtgcggcccacgcccacccgctgctcggaggcatctgtgcgaaggt

SEQ ID NO: 152756 - DNA, 552 bp, Homo sapiens
  Payload ID: 10049
  Gene Symbol: MMEL1
  Gene Name: membrane metallo-endopeptidase-like 1
  ENST ID: ENST00000471840
  CDS Start-End: 1-201
ggaggggtgcggcaagcctataaggtgtggtgcgggtcctaccggcccgagttcgccatccaatccatcaagacagacgtccacagtcccctgaagtacagggtactggggtcgctgcagaacctggccgccttcgcagacacgttccactgtgcccggggcacccccatgcaccccaaggagcgatgccgcgtgtggtagccaaggccctgccgcgctgtgcggcccacgcccacccgctgctcggaggcatctgtgcgaaggtgcagctagcggcgacccagtgtacgtcccgccccggccaaccatgccaagcctgcctgccaggcctctgcgcctggcctagggtgcagccacctgcctgacacccagggatgagcagtgtccagtgcagtacctggaccggagccccctccacagacacccgcggggctcagtgcccccgtcacagctctgtagagacaatcaactgtgtcctgcccaccctccaaggtgcattgtcttccagtatctacagcttcagacttgagctaagtaaatgcttcaaagaaa

SEQ ID NO: 152757 - DNA, 1943 bp, Homo sapiens
  Payload ID: 10049
  Gene Symbol: MMEL1
  Gene Name: membrane metallo-endopeptidase-like 1
  Uniprot ID: Q495T6
  ENST ID: ENST00000621908
  CDS Start-End: 11-1879
agccctgctgatggggaagtccgaaggccccgtggggatggtggagagcgctggccgtgcagggcagaagcgcccggggttcctggagggggggctgctgctgctgctgctgctggtgaccgctgccctggtggccttgggtgtcctctacgccgaccgcagagggaagcagctgccacgccttgctagccggctgtgcttcttacaggaggagaggacctttgtaaaacgaaaaccccgagggatcccagaggcccaagaggtgagcgaggtctgcaccacccctggctgcgtgatagcagctgccaggatcctccagaacatggacccgaccacggaaccgtgtgacgacttctaccagtttgcatgcggaggctggctgcggcgccacgtgatccctgagaccaactcaagatacagcatctttgacgtcctccgcgacgagctggaggtcatcctcaaagcggtgctggagaattcgactgccaaggccacggtaccccaggaggagagacacgacgtcatcgccttgtaccaccggatgggactggaggagctgcaaagccagtttggcctgaagggatttaactggactctgttcatacaaactgtgctatcctctgtcaaaatcaagctgctgccagatgaggaagtggtggtctatggcatcccctacctgcagaaccttgaaaacatcatcgacacctactcagccaggaccatacagaactacctggtctggcgcctggtgctggaccgcattggtagcctaagccagagattcaaggacacacgagtgaactaccgcaaggcgctgtttggcacaatggtggaggaggtgcgctggcgtgaatgtgtgggctacgtcaacagcaacatggagaacgccgtgggctccctctacgtcagggaggcgttccctggagacagcaagagcatggtcagagaactcattgacaaggtgcggacagtgtttgtggagacgctggacgagctgggctggatggacgaggagtccaagaagaaggcgcaggagaaggccatgagcatccgggagcagatcgggcaccctgactacatcctggaggagatgaacaggcgcctggacgaggagtactccaatctgaacttctcagaggacctgtactttgagaacagtctgcagaacctcaaggtgggcgcccagcggagcctcaggaagcttcgggaaaaggtggacccaaatctctggatcatcggggcggcggtggtcaatgcgttctactccccaaaccgaaaccagattgtattccctgccgggatcctccagccccccttcttcagcaaggagcagccacaggccttgaactttggaggcattgggatggtgatcgggcacgagatcacgcacggctttgacgacaatggccggaacttcgacaagaatggcaacatgatggattggtggagtaacttctccacccagcacttccgggagcagtcagagtgcatgatctaccagtacggcaactactcctgggacctggcagacgaacagaacgtgaacggattcaacacccttggggaaaacattgctgacaacggaggggtgcggcaagcctataaggcctacctcaagtggatggcagagggtggcaaggaccagcagctgcccggcctggatctcacccatgagcagctcttcttcatcaactatgcccaggtgtggtgcgggtcctaccggcccgagttcgccatccaatccatcaagacagacgtccacagtcccctgaagtacagggtactggggtcgctgcagaacctggccgccttcgcagacacgttccactgtgcccggggcacccccatgcaccccaaggagcgatgccgcgtgtggtagccaaggccctgccgcgctgtgcggcccacgcccacccgctgctcggaggcatctgtgcgaaggt

SEQ ID NO: 152758 - DNA, 2849 bp, Homo sapiens
  Payload ID: 10049
  Gene Symbol: MMEL1
  Gene Name: membrane metallo-endopeptidase-like 1
  Uniprot ID: Q495T6
  ENST ID: ENST00000611357
  CDS Start-End: 163-2502
actgctctcccatcccagtccctggaaatccacccacttggcccagctcaccccaactccaacccactgggacccagtctccaggggcctgactgtgggcggcagccactcctgagtgagcaaaggttcctccgcggtgctctcccgtccagagccctgctgatggggaagtccgaaggccccgtggggatggtggagagcgctggccgtgcagggcagaagcgcccggggttcctggagggggggctgctgctgctgctgctgctggtgaccgctgccctggtggccttgggtgtcctctacgccgaccgcagagggaagcagctgccacgccttgctagccggctgtgcttcttacaggaggagaggacctttgtaaaacgaaaaccccgagggatcccagaggcccaagaggtgagcgaggtctgcaccacccctggctgcgtgatagcagctgccaggatcctccagaacatggacccgaccacggaaccgtgtgacgacttctaccagtttgcatgcggaggctggctgcggcgccacgtgatccctgagaccaactcaagatacagcatctttgacgtcctccgcgacgagctggaggtcatcctcaaagcggtgctggagaattcgactgccaaggaccggccggctgtggagaaggccaggacgctgtaccgctcctgcatgaaccagagtgtgatagagaagcgaggctctcagcccctgctggacatcttggaggtggtgggaggctggccggtggcgatggacaggtggaacgagaccgtaggactcgagtgggagctggagcggcagctggcgctgatgaactcacagttcaacaggcgcgtcctcatcgacctcttcatctggaacgacgaccagaactccagccggcacatcatctacatagaccagcccaccttgggcatgccctcccgagagtactacttcaacggcggcagcaaccggaaggtgcgggaagcctacctgcagttcatggtgtcagtggccacgttgctgcgggaggatgcaaacctgcccagggacagctgcctggtgcaggaggacatggtgcaggtgctggagctggagacacagctggccaaggccacggtaccccaggaggagagacacgacgtcatcgccttgtaccaccggatgggactggaggagctgcaaagccagtttggcctgaagggatttaactggactctgttcatacaaactgtgctatcctctgtcaaaatcaagctgctgccagatgaggaagtggtggtctatggcatcccctacctgcagaaccttgaaaacatcatcgacacctactcagccaggaccatacagaactacctggtctggcgcctggtgctggaccgcattggtagcctaagccagagattcaaggacacacgagtgaactaccgcaaggcgctgtttggcacaatggtggaggaggtgcgctggcgtgaatgtgtgggctacgtcaacagcaacatggagaacgccgtgggctccctctacgtcagggaggcgttccctggagacagcaagagcatggtcagagaactcattgacaaggtgcggacagtgtttgtggagacgctggacgagctgggctggatggacgaggagtccaagaagaaggcgcaggagaaggccatgagcatccgggagcagatcgggcaccctgactacatcctggaggagatgaacaggcgcctggacgaggagtactccaatctgaacttctcagaggacctgtactttgagaacagtctgcagaacctcaaggtgggcgcccagcggagcctcaggaagcttcgggaaaaggtggacccaaatctctggatcatcggggcggcggtggtcaatgcgttctactccccaaaccgaaaccagattgtattccctgccgggatcctccagccccccttcttcagcaaggagcagccacaggccttgaactttggaggcattgggatggtgatcgggcacgagatcacgcacggctttgacgacaatggccggaacttcgacaagaatggcaacatgatggattggtggagtaacttctccacccagcacttccgggagcagtcagagtgcatgatctaccagtacggcaactactcctgggacctggcagacgaacagaacgtgaacggattcaacacccttggggaaaacattgctgacaacggaggggtgcggcaagcctataaggcctacctcaagtggatggcagagggtggcaaggaccagcagctgcccggcctggatctcacccatgagcagctcttcttcatcaactatgcccaggtgtggtgcgggtcctaccggcccgagttcgccatccaatccatcaagacagacgtccacagtcccctgaagtacagggtactggggtcgctgcagaacctggccgccttcgcagacacgttccactgtgcccggggcacccccatgcaccccaaggagcgatgccgcgtgtggtagccaaggccctgccgcgctgtgcggcccacgcccacccgctgctcggaggcatctgtgcgaaggtgcagctagcggcgacccagtgtacgtcccgccccggccaaccatgccaagcctgcctgccaggcctctgcgcctggcctagggtgcagccacctgcctgacacccagggatgagcagtgtccagtgcagtacctggaccggagccccctccacagacacccgcggggctcagtgcccccgtcacagctctgtagagacaatcaactgtgtcctgcccaccctccaaggtgcattgtcttccagtatctacagcttcagacttgagctaagtaaatgcttcaaa

SEQ ID NO: 152759 - DNA, 2443 bp, Homo sapiens
  Payload ID: 10049
  Gene Symbol: MMEL1
  Gene Name: membrane metallo-endopeptidase-like 1
  Uniprot ID: Q495T6
  ENST ID: ENST00000628503
  CDS Start-End: 11-1846
agccctgctgatggggaagtccgaaggccccgtggggatggtggagagcgctggccgtgcagggcagaagcgcccggggttcctggagggggggctgctgctgctgctgctgctggtgaccgctgccctggtggccttgggtgtcctctacgccgaccgcagagggaagcagctgccacgccttgctagccggctgtgcttcttacaggaggagaggacctttgtaaaacgaaaaccccgagggatcccagaggcccaagaggtgagcgaggtctgcaccacccctggctgcgtgatagcagctgccaggatcctccagaacatggacccgaccacggaaccgtgtgacgacttctaccagtttgcatgcggaggctggctgcggcgccacgtgatccctgagaccaactcaagatacagcatctttgacgtcctccgcgacgagctggaggtcatcctcaaagcggtgctggagaattcgactgccaaggaccggccggctgtggagaaggccaggacgctgtaccgctcctgcatgaaccagagtgtgatagagaagcgaggctctcagcccctgctggacatcttggaggtggtgggaggctggccggtggcgatggacaggtggaacgagaccgtaggactcgagtgggagctggagcggcagctggcgctgatgaactcacagttcaacaggcgcgtcctcatcgacctcttcatctggaacgacgaccagaactccagccggcacatcatctacatagaccagcccaccttgggcatgccctcccgagagtactacttcaacggcggcagcaaccggaaggtgcgggaagcctacctgcagttcatggtgtcagtggccacgttgctgcgggaggatgcaaacctgcccagggacagctgcctggtgcaggaggacatggtgcaggtgctggagctggagacacagctggccaaggccacggtaccccaggaggagagacacgacgtcatcgccttgtaccaccggatgggactggaggagctgcaaagccagtttggcctgaagggatttaactggactctgttcatacaaactgtgctatcctctgtcaaaatcaagctgctgccagatgaggaagtggtggtctatggcatcccctacctgcagaaccttgaaaacatcatcgacacctactcagccaggaccatacagaactacctggtctggcgcctggtgctggaccgcattggtagcctaagccagagattcaaggacacacgagtgaactaccgcaaggcgctgtttggcacaatggtggaggaggtgcgctggcgtgaatgtgtgggctacgtcaacagcaacatggagaacgccgtgggctccctctacgtcagggaggcgttccctggagacagcaagagcatggtcagagaactcattgacaaggtgcggacagtgtttgtggagacgctggacgagctgggctggatggacgaggagtccaagaagaaggcgcaggagaaggccatgagcatccgggagcagatcgggcaccctgactacatcctggaggagatgaacaggcgcctggacgaggagtactccaatctgaacttctcagaggacctgtactttgagaacagtctgcagaacctcaaggtgggcgcccagcggagcctcaggaagcttcgggaaaaggtggacccaaatctctggatcatcggggcggcggtggtcaatgcgttctactccccaaaccgaaaccagattgcttattctttgtcccgcccttggggacagtattccctgccgggatcctccagccccccttcttcagcaaggagcagccacaggccttgaactttggaggcattgggatggtgatcgggcacgagatcacgcacggctttgacgacaatggccggaacttcgacaagaatggcaacatgatggattggtggagtaacttctccacccagcacttccgggagcagtcagagtgcatgatctaccagtacggcaactactcctgggacctggcagacgaacagaacgtgaacggattcaacacccttggggaaaacattgctgacaacggaggggtgcggcaagcctataaggcctacctcaagtggatggcagagggtggcaaggaccagcagctgcccggcctggatctcacccatgagcagctcttcttcatcaactatgcccaggtgtggtgcgggtcctaccggcccgagttcgccatccaatccatcaagacagacgtccacagtcccctgaagtacagggtactggggtcgctgcagaacctggccgccttcgcagacacgttccactgtgcccggggcacccccatgcaccccaaggagcgatgccgcgtgtggtagccaaggccctgccgcgctgtgcggcccacgcccacccgctgctcggaggcatctgtgcgaaggt

SEQ ID NO: 152760 - DNA, 552 bp, Homo sapiens; identical to SEQ ID NO: 152756
  Payload ID: 10049
  Gene Symbol: MMEL1
  Gene Name: membrane metallo-endopeptidase-like 1
  ENST ID: ENST00000629675
  CDS Start-End: 1-201

SEQ ID NO: 152761 - DNA, 519 bp, Homo sapiens
  Payload ID: 10050
  Gene Symbol: MPP1
  Gene Name: membrane protein, palmitoylated 1, 55kDa
  ENST ID: ENST00000369531
  CDS Start-End: 126-519
cctgcggggcggtgactggcccagccgcaccgcgtctcccgccttctccgcagccccgcaggccccgggccctgtcattcccagcgctgccctgtcttgcgttccagtgttccagcttctgcgagatgaccctcaaggcgagcgagggcgagagtgggggcagcatgcacacggcgctctccgacctctacctggagcatttgctgcagaagcgtagtcggccagaggctgtatcgcatccattgaatactgtgaccgaggacatgtacaccaacgggtctcctgccccaggtagccctgcccaggtcaagggacaggagggaatcacgctgaagctgaatgaaaaacagtcctgtacggtggccagaattcttcatggtggcatgatccatagacaaggctcccttcacgtgggggatgagatcctagaaatcaatggcacaaatgtgacaaatcattcagtggatcagctgcagaaggcgatgaaagaaaccaaaggaatgatctcattaaaagtaa

SEQ ID NO: 152762 - DNA, 2042 bp, Homo sapiens
  Payload ID: 10050
  Gene Symbol: MPP1
  Gene Name: membrane protein, palmitoylated 1, 55kDa
  Uniprot ID: Q00013
  ENST ID: ENST00000369534
  CDS Start-End: 149-1549
gtccgcgccctcccggcgcaccgcctgcggggcggtgactggcccagccgcaccgcgtctcccgccttctccgcagccccgcaggccccgggccctgtcattcccagcgctgccctgtcttgcgttccagtgttccagcttctgcgagatgaccctcaaggcgagcgagggcgagagtgggggcagcatgcacacggcgctctccgacctctacctggagcatttgctgcagaagcgtagtcggccagaggctgtatcgcatccattgaatactgtgaccgaggacatgtacaccaacgggtctcctgccccaggtagccctgcccaggtcaagggacaggaggtgcggaaagtgcgactcatacagtttgagaaggtcacagaagagcccatgggaatcacgctgaagctgaatgaaaaacagtcctgtacggtggccagaattcttcatggtggcatgatccatagacaaggctcccttcacgtgggggatgagatcctagaaatcaatggcacaaatgtgacaaatcattcagtggatcagctgcagaaggcgatgaaagaaaccaaaggaatgatctcattaaaagtaattcccaaccagcaaagccgtcttcctgcactacagatgttcatgagagcgcagtttgactatgatcccaaaaaggacaatctgatcccttgcaaggaggcgggactgaagtttgctactggggacattatccagattatcaacaaggatgacagcaattggtggcagggacgggtggaaggctcctccaaggagtcagcaggattgatcccttcccctgagctgcaggaatggcgagtggcaagtatggctcagtcagctcctagcgaagccccgagctgcagtccctttgggaagaagaagaagtacaaagacaaatatctggccaagcacagctcgatttttgatcagttggatgttgtttcctacgaggaagtcgttcggctccctgcattcaagaggaagaccctggtgctgatcggagccagtggggtgggtcgcagccacattaagaatgccctgctcagccagaatccggagaagtttgtgtaccctgtcccatatacaacacggccgccaaggaagagtgaggaagatgggaaggagtaccactttatctcaacggaggagatgacgaggaacatctctgccaatgagttcttggagtttggcagctaccaaggcaacatgtttggcaccaaatttgaaacagtgcaccagatccataagcagaacaagattgccatccttgacattgagccccagaccctgaaaattgttcggacagcagaactttcgcctttcattgtgttcattgcacctactgaccagggcactcagacagaagccctgcagcagctgcagaaggactctgaggccatccgcagccagtacgctcactactttgacctctcactggtcaataatggtgttgatgaaacccttaagaaattacaagaagccttcgaccaagcgtgcagttctccacagtgggtgcctgtctcctgggtttactaagcttgtagaatgggggaacccactgtatgcccctctccagcatttggaattccacccgccttgctttaagacaaacagggctgctccaactagttttgtgtcagcttccagctctctgcagctatcctaattcagccagtaaggttcagtcttcttgctcaggctcctgaagggttgattctcctgatagatggggccccactgatctggatttgaaaaggatttctagaaattgggggtaagaagtactaccaaaatgtaactgctaatcaagggtgatgcacagcaaaagcaatggaccccatccctctaaagcctgccctcctttgccttcaactgtatatgctgggtatttcatttgtctttttattttggagaaagcgtttttaactgcaactttctataatgccaaaatgacacatctgtgcaatagaatgatgtctgctctagggaaaccttcaaaagcaataaaaatgctgtgttgaaatgccaa

SEQ ID NO: 152763 - DNA, 794 bp, Homo sapiens
  Payload ID: 10050
  Gene Symbol: MPP1
  Gene Name: membrane protein, palmitoylated 1, 55kDa
  ENST ID: ENST00000393529
  CDS Start-End: 71-794
agagagcagtcttcagcctgagacccactcctaggctgtatcgcatccattgaatactgtgaccgaggacatgtacaccaacgggtctcctgccccaggtagccctgcccaggtcaagggacaggaggtgcggaaagtgcgactcatacagtttgagaaggtcacagaagagcccatgggaatcacgctgaagctgaatgaaaaacagtcctgtacggtggccagaattcttcatggtggcatgatccatagacaaggctcccttcacgtgggggatgagatcctagaaatcaatggcacaaatgtgacaaatcattcagtggatcagctgcagaaggcgatgaaagaaaccaaaggaatgatctcattaaaagtaattcccaaccagcaaagccgtcttcctgcactacagatgttcatgagagcgcagtttgactatgatcccaaaaaggacaatctgatcccttgcaaggaggcgggactgaagtttgctactggggacattatccagattatcaacaaggatgacagcaattggtggcagggacgggtggaaggctcctccaaggagtcagcaggattgatcccttcccctgagctgcaggaatggcgagtggcaagtatggctcagtcagctcctagcgaagccccgagctgcagtccctttgggaagaagaagaagtacaaagacaaatatctggccaagcacagctcgatttttgatcagttggatgttgtttcctacgaggaagtcgttcggctccctgcattcaagaggaagaccctggtgctga

SEQ ID NO: 152764 - DNA, 1389 bp, Homo sapiens
  Payload ID: 10050
  Gene Symbol: MPP1
  Gene Name: membrane protein, palmitoylated 1, 55kDa
  Uniprot ID: Q00013
  ENST ID: ENST00000393531
  CDS Start-End: 25-1365
ttccagtgttccagcttctgcgagatgaccctcaaggcgagcgagggcgagagtgggggcagcatgcacacggcgctctccgacctctacctggagcatttgctgcagaagcgtagtcggccagaggctgtatcgcatccattgaatactgtgaccgaggacatgtacaccaacgggtctcctgccccaggtagccctgcccaggtcaagggacaggaggtgcggaaagtgcgactcatacagtttgagaaggtcacagaagagcccatgggaatcacgctgaagctgaatgaaaaacagtcctgtacggtggccagaattcttcatggtggcatgatccatagacaaggctcccttcacgtgggggatgagatcctagaaatcaatggcacaaatgtgacaaatcattcagtggatcagctgcagaaggcgatgaaagaaaccaaaggaatgatctcattaaaagtaattcccaaccagcaaagccgtcttcctgcactacaggaggcgggactgaagtttgctactggggacattatccagattatcaacaaggatgacagcaattggtggcagggacgggtggaaggctcctccaaggagtcagcaggattgatcccttcccctgagctgcaggaatggcgagtggcaagtatggctcagtcagctcctagcgaagccccgagctgcagtccctttgggaagaagaagaagtacaaagacaaatatctggccaagcacagctcgatttttgatcagttggatgttgtttcctacgaggaagtcgttcggctccctgcattcaagaggaagaccctggtgctgatcggagccagtggggtgggtcgcagccacattaagaatgccctgctcagccagaatccggagaagtttgtgtaccctgtcccatatacaacacggccgccaaggaagagtgaggaagatgggaaggagtaccactttatctcaacggaggagatgacgaggaacatctctgccaatgagttcttggagtttggcagctaccaaggcaacatgtttggcaccaaatttgaaacagtgcaccagatccataagcagaacaagattgccatccttgacattgagccccagaccctgaaaattgttcggacagcagaactttcgcctttcattgtgttcattgcacctactgaccagggcactcagacagaagccctgcagcagctgcagaaggactctgaggccatccgcagccagtacgctcactactttgacctctcactggtcaataatggtgttgatgaaacccttaagaaattacaagaagccttcgaccaagcgtgcagttctccacagtgggtgcctgtctcctgggtttactaagcttgtagaatgggggaacccact

SEQ ID NO: 152765 - DNA, 970 bp, Homo sapiens
  Payload ID: 10050
  Gene Symbol: MPP1
  Gene Name: membrane protein, palmitoylated 1, 55kDa
  ENST ID: ENST00000417435
  CDS Start-End: 155-424
agctccgtccgcgccctcccggcgcaccgcctgcggggcggtgactggcccagccgcaccgcgtctcccgccttctccgcagccccgcaggccccgggccctgtcattcccagcgctgccctgtcttgcgttccagtgttccagcttctgcgagatgaccctcaaggcgagcgagggcgagagtgggggcagcatgcacacggcgctctccgacctctacctggagcatttgctgcagaagcgtagtcggccagagcttcctttgagcaactgcctctgccctttgaaccctgctgcagatgtttcctctgaaggggctttcagagcggcaggcattgccactccagcactttgtctgattaaaggccagaggctgcagaacaaaggccagacatggagtcctgggctgtatcgcatccattgaatactgtgaccgaggacatgtacaccaacgggtctcctgccccaggtagccctgcccaggtcaagggacaggaggtgcggaaagtgcgactcatacagtttgagaaggtcacagaagagcccatgggaatcacgctgaagctgaatgaaaaacagtcctgtacggtggccagaattcttcatggtggcatgatccatagacaaggctcccttcacgtgggggatgagatcctagaaatcaatggcacaaatgtgacaaatcattcagtggatcagctgcagaaggcgatgaaagaaaccaaaggaatgatctcattaaaagtaattcccaaccagcaaagccgtcttcctgcactacagatgttcatgagagcgcagtttgactatgatcccaaaaaggacaatctgatcccttgcaaggaggcgggactgaagtttgctactggggacattatccagattatcaacaaggatgacagcaattggtggcagggacgggtggaaggctcctccaaggagtcagcaggattgatcccttcccctgagc

SEQ ID NO: 152766 - DNA, 581 bp, Homo sapiens
  Payload ID: 10050
  Gene Symbol: MPP1
  Gene Name: membrane protein, palmitoylated 1, 55kDa
  ENST ID: ENST00000428488
  CDS Start-End: 113-581
gactggcccagccgcaccgcgtctcccgccttctccgcagccccgcaggccccgggccctgtcattcccagcgctgccctgtcttgcgttccagtgttccagcttctgcgagatgaccctcaaggcgagcgagggcgagagtgggggcagcatgcacacggcgctctccgacctctacctggagcatttgctgcagaagcgtagtcggccagagaaagaaaccaaaggaatgatctcattaaaagtaattcccaaccagcaaagccgtcttcctgcactacagatgttcatgagagcgcagtttgactatgatcccaaaaaggacaatctgatcccttgcaaggaggcgggactgaagtttgctactggggacattatccagattatcaacaaggatgacagcaattggtggcagggacgggtggaaggctcctccaaggagtcagcaggattgatcccttcccctgagctgcaggaatggcgagtggcaagtatggctcagtcagctcctagcgaagccccgagctgcagtccctttgggaagaagaagaagtacaaagacaaatatctggccaagcaca

SEQ ID NO: 152767 - DNA, 2195 bp, Homo sapiens
  Payload ID: 10050
  Gene Symbol: MPP1
  Gene Name: membrane protein, palmitoylated 1, 55kDa
  Uniprot ID: Q00013
  ENST ID: ENST00000413259
  CDS Start-End: 394-1704
agctccgtccgcgccctcccggcgcaccgcctgcggggcggtgactggcccagccgcaccgcgtctcccgccttctccgcagccccgcaggccccgggccctgtcattcccagcgctgccctgtcttgcgttccagtgttccagcttctgcgagatgaccctcaaggcgagcgagggcgagagtgggggcagcatgcacacggcgctctccgacctctacctggagcatttgctgcagaagcgtagtcggccagagcttcctttgagcaactgcctctgccctttgaaccctgctgcagatgtttcctctgaaggggctttcagagcggcaggcattgccactccagcactttgtctgattaaaggccagaggctgcagaacaaaggccagacatggagtcctgggctgtatcgcatccattgaatactgtgaccgaggacatgtacaccaacgggtctcctgccccaggtagccctgcccaggtcaagggacaggaggtgcggaaagtgcgactcatacagtttgagaaggtcacagaagagcccatgggaatcacgctgaagctgaatgaaaaacagtcctgtacggtggccagaattcttcatggtggcatgatccatagacaaggctcccttcacgtgggggatgagatcctagaaatcaatggcacaaatgtgacaaatcattcagtggatcagctgcagaaggcgatgaaagaaaccaaaggaatgatctcattaaaagtaattcccaaccagcaaagccgtcttcctgcactacagatgttcatgagagcgcagtttgactatgatcccaaaaaggacaatctgatcccttgcaaggaggcgggactgaagtttgctactggggacattatccagattatcaacaaggatgacagcaattggtggcagggacgggtggaaggctcctccaaggagtcagcaggattgatcccttcccctgagctgcaggaatggcgagtggcaagtatggctcagtcagctcctagcgaagccccgagctgcagtccctttgggaagaagaagaagtacaaagacaaatatctggccaagcacagctcgatttttgatcagttggatgttgtttcctacgaggaagtcgttcggctccctgcattcaagaggaagaccctggtgctgatcggagccagtggggtgggtcgcagccacattaagaatgccctgctcagccagaatccggagaagtttgtgtaccctgtcccatatacaacacggccgccaaggaagagtgaggaagatgggaaggagtaccactttatctcaacggaggagatgacgaggaacatctctgccaatgagttcttggagtttggcagctaccaaggcaacatgtttggcaccaaatttgaaacagtgcaccagatccataagcagaacaagattgccatccttgacattgagccccagaccctgaaaattgttcggacagcagaactttcgcctttcattgtgttcattgcacctactgaccagggcactcagacagaagccctgcagcagctgcagaaggactctgaggccatccgcagccagtacgctcactactttgacctctcactggtcaataatggtgttgatgaaacccttaagaaattacaagaagccttcgaccaagcgtgcagttctccacagtgggtgcctgtctcctgggtttactaagcttgtagaatgggggaacccactgtatgcccctctccagcatttggaattccacccgccttgctttaagacaaacagggctgctccaactagttttgtgtcagcttccagctctctgcagctatcctaattcagccagtaaggttcagtcttcttgctcaggctcctgaagggttgattctcctgatagatggggccccactgatctggatttgaaaaggatttctagaaattgggggtaagaagtactaccaaaatgtaactgctaatcaagggtgatgcacagcaaaagcaatggaccccatccctctaaagcctgccctcctttgccttcaactgtatatgctgggtatttcatttgtctttttattttggagaaagcgtttttaactgcaactttctataatgccaaaatgacacatctgtgcaatagaatgatgtctgctctagggaaaccttcaaaagcaataaaaatgctgtgttgaaatgcc

SEQ ID NO: 152768 - DNA, 2066 bp, Homo sapiens
  Payload ID: 10050
  Gene Symbol: MPP1
  Gene Name: membrane protein, palmitoylated 1, 55kDa
  ENST ID: ENST00000439370
  CDS Start-End: 84-290
cttctccgcagccccgcaggccccgggccctgtcattcccagcgctgccctgtcttgcgttccagtgttccagcttctgcgagatgaccctcaaggcgagcgagggcgagagtgggggcagcatgcacacggcgctctccgacctctacctggagcatttgctgcagaagcgtagtcggccagaggcaggtccccttgtgctatggtgcaaagagggtggccagtgtatatttgcgggtggaacaaggaatccagattccagggatggatggctggtaaatagctattaacctccgtcctcaaagatgccctaagggctgtatcgcatccattgaatactgtgaccgaggacatgtacaccaacgggtctcctgccccaggtagccctgcccaggtcaagggacaggaggtgcggaaagtgcgactcatacagtttgagaaggtcacagaagagcccatgggaatcacgctgaagctgaatgaaaaacagtcctgtacggtggccagaattcttcatggtggcatgatccatagacaaggctcccttcacgtgggggatgagatcctagaaatcaatggcacaaatgtgacaaatcattcagtggatcagctgcagaaggcgatgaaagaaaccaaaggaatgatctcattaaaagtaattcccaaccagcaaagccgtcttcctgcactacagatgttcatgagagcgcagtttgactatgatcccaaaaaggacaatctgatcccttgcaaggaggcgggactgaagtttgctactggggacattatccagattatcaacaaggatgacagcaattggtggcagggacgggtggaaggctcctccaaggagtcagcaggattgatcccttcccctgagctgcaggaatggcgagtggcaagtatggctcagtcagctcctagcgaagccccgagctgcagtccctttgggaagaagaagaagtacaaagacaaatatctggccaagcacagctcgatttttgatcagttggatgttgtttcctacgaggaagtcgttcggctccctgcattcaagaggaagaccctggtgctgatcggagccagtggggtgggtcgcagccacattaagaatgccctgctcagccagaatccggagaagtttgtgtaccctgtcccatatacaacacggccgccaaggaagagtgaggaagatgggaaggagtaccactttatctcaacggaggagatgacgaggaacatctctgccaatgagttcttggagtttggcagctaccaaggcaacatgtttggcaccaaatttgaaacagtgcaccagatccataagcagaacaagattgccatccttgacattgagccccagaccctgaaaattgttcggacagcagaactttcgcctttcattgtgttcattgcacctactgaccagggcactcagacagaagccctgcagcagctgcagaaggactctgaggccatccgcagccagtacgctcactactttgacctctcactggtcaataatggtgttgatgaaacccttaagaaattacaagaagccttcgaccaagcgtgcagttctccacagtgggtgcctgtctcctgggtttactaagcttgtagaatgggggaacccactgtatgcccctctccagcatttggaattccacccgccttgctttaagacaaacagggctgctccaactagttttgtgtcagcttccagctctctgcagctatcctaattcagccagtaaggttcagtcttcttgctcaggctcctgaagggttgattctcctgatagatggggccccactgatctggatttgaaaaggatttctagaaattgggggtaagaagtactaccaaaatgtaactgctaatcaagggtgatgcacagcaaaagcaatggaccccatccctctaaagcctgccctcctttgccttcaactgtatatgctgggtatttcatttgtctttttattttggagaaagcgtttttaactgcaactttctataatgccaaaatgacacatctgtgcaatagaatgatgtctgctctagg

SEQ ID NO: 152769 - DNA, 729 bp, Homo sapiens
  Payload ID: 10050
  Gene Symbol: MPP1
  Gene Name: membrane protein, palmitoylated 1, 55kDa
  ENST ID: ENST00000453245
  CDS Start-End: 113-729
gactggcccagccgcaccgcgtctcccgccttctccgcagccccgcaggccccgggccctgtcattcccagcgctgccctgtcttgcgttccagtgttccagcttctgcgagatgaccctcaaggcgagcgagggcgagagtgggggcagcatgcacacggcgctctccgacctctacctggagcatttgctgcagaagcgtagtcggccagagatgttcatgagagcgcagtttgactatgatcccaaaaaggacaatctgatcccttgcaaggaggcgggactgaagtttgctactggggacattatccagattatcaacaaggatgacagcaattggtggcagggacgggtggaaggctcctccaaggagtcagcaggattgatcccttcccctgagctgcaggaatggcgagtggcaagtatggctcagtcagctcctagcgaagccccgagctgcagtccctttgggaagaagaagaagtacaaagacaaatatctggccaagcacagctcgatttttgatcagttggatgttgtttcctacgaggaagtcgttcggctccctgcattcaagaggaagaccctggtgctgatcggagccagtggggtgggtcgcagccacattaagaatgccctgctcagccagaatccggagaagtttgtgtaccctgtcccatatacaacacggccgccaaggaagagtgaggaagatgggaaggagtacca

SEQ ID NO: 152770 - DNA, 4414 bp, Homo sapiens
  Payload ID: 10051
  Gene Symbol: MPP2
  Gene Name: membrane protein, palmitoylated 2 (MAGUK p55 subfamily member 2)
  ENST ID: ENST00000269095
  CDS Start-End: 306-1964
cttcccagtgggactccagcagggcgtcgtggtctgtgcggtgtctcccaaaccactacctggctgcccccgtaccagctgctgggaaagactacttcctccgagttgtgccggcctccgcgttctcctcacctcccctctcctccggacctccgccccctcgcggagaggccttgccgctttaagagccgggctagcgattgacaagcaataaacgctgagcgcccggctgcgctggagccgcccggagctaggggcttcccggggcgcaggagagacgtttcagagcccttgcctccttcaccatgccggttgccgccaccaactctgaaactgccatgcagcaagtcctggacaacttgggatccctccccagtgccacgggggctgcagagctggacctgatcttccttcgaggcattatggaaagtcccatagtaagatccctggccaaggcccatgagaggctggaggagacgaagctggaggccgtgagagacaacaacctggagctggtgcaggagatcctgcgggacctggcgcagctggctgagcagagcagcacagccgccgagctggcccacatcctccaggagccccacttccagtccctcctggagacgcacgactctgtggcctcaaagacctatgagacaccaccccccagccctggcctggaccctacattcagcaaccagcctgtacctcccgatgctgtgcgcatggtgggcatccgcaagacagccggagaacatctgggtgtaacgttccgcgtggagggcggcgagctggtgatcgcgcgcattctgcatgggggcatggtggctcaacaaggcctgctgcatgtgggtgacatcatcaaggaggtgaacgggcagccagtgggcagtgacccccgcgcactgcaggagctcctgcgcaatgccagtggcagtgtcatcctcaagatcctgcccagctaccaggagccccatctgccccgccaggtatttgtgaaatgtcactttgactatgacccggcccgagacagcctcatcccctgcaaggaagcaggcctgcgcttcaacgccggggacttgctccagatcgtaaaccaggatgatgccaactggtggcaggcatgccatgtcgaagggggcagtgctgggctcattcccagccagctgctggaggagaagcggaaagcatttgtcaagagggacctggagctgacaccaaactcagggaccctatgcggcagcctttcaggaaagaaaaagaagcgaatgatgtatttgaccaccaagaatgcagagtttgaccgtcatgagctgctcatttatgaggaggtggcccgcatgcccccgttccgccggaaaaccctggtactgattggggctcagggcgtgggacggcgcagcctgaagaacaagctcatcatgtgggatccagatcgctatggcaccacggtgccctacacctcccggcggccgaaagactcagagcgggaaggtcagggttacagctttgtgtcccgtggggagatggaggctgacgtccgtgctgggcgctacctggagcatggcgaatacgagggcaacctgtatggcacacgtattgactccatccggggcgtggtcgctgctgggaaggtgtgcgtgctggatgtcaacccccaggcggtgaaggtgctacgaacggccgagtttgtcccttacgtggtgttcatcgaggccccagacttcgagaccctgcgggccatgaacagggctgcgctggagagtggaatatccaccaagcagctcacggaggcggacctgagacggacagtggaggagagcagccgcatccagcggggctacgggcactactttgacctctgcctggtcaatagcaacctggagaggaccttccgcgagctccagacagccatggagaagctacggacagagccccagtgggtgcctgtcagctgggtgtactgagcctgttcacctggtctttggctcactctgtgttgaaacccagaacctgaatccatccccctcctgacctgtgaccccctgccacaatccttagcccccatatctggctgtccttgggtaacagctcccagcaggccctaagtctggcttcagcacagaggcgtgcactgccagggaggtgggcattcatggggtaccttgtgcccaggtgctgcccactcctgatgcccattggtcaccagatatctctgagggccaagctatgcccaggaatgtgtcagagtcacctccataatggtcagtacagagaagagaaaagctgctttgggaccacatggtcagtaggcacactgccccctgccacccctccccagtcaccagttctcctctggactggccacacccaccccattcctggactcctcccacctctcacccctgtgtcggaggaacaggccttgggctgtttccgtgtgaccaggggaatgtgtggcccgctggcagccaggcaggcccgggtggtggtgccagcctggtgccatcttgaaggctggaggagtcagagtgagagctagtggccacagctgcagagcactgcagctcccagctcctttggaaagggacagggtcgcagggcagatgctgctcggtccttccctcatccacagcttctcactgccgaagtttctccagatttctccaatgtgtcctgacaggtcagccctgctccccacagggccaggctggcaggggccagtgggctcagcccaggtaggggcaggatggagggctgagccctgtgacaacctgctgttaccaactgaagagccccaagctctccatggcccacagcaggcacaggtctgagctctatgtccttgaccttggtccatttggttttctgtctagccaggtccaggtagcccacttgcatcagggctgctgggttggaggggctaaggaggagtgcagaggggaccttgggagcctgggcttgaaggacagttgccctccaggaggttcctcacacacaactccagaggcgccatttacactgtagtctgtacaacctgtggttccacgtgcatgttcggcacctgtctgtgcctctggcaccaggttgtgtgtatgtgtgtgcgtgtgcacgtgcgtgtgtgtgtgtgtgtgtcaggtttaatttggggaggaagcaaagggttttgttttggaggtcactctttggggcccctttctgggggttccccatcagccctcatttcttataataccctgatcccagactccaaagccctggtcctttcctgatgtctcctcccttgtcttattgtccccctaccctaaatgcccccctgccataacttggggagggcagttttgtaaaataggagactccctttaagaaagaatgctgtcctagatgtacttgggcatctcatccttcattattctctgcattccttccggggggagcctgtcctcagaggggacaacctgtgacaccctgagtccaaacccttgtgcctcccagttcttccaagtgtctaactagtcttcgctgcagcgtcagccaaagctggcccctgaaccactgtgtgcccatttcctagggaaggggaaggagaataaacagaatatttattacaaatgttagaatatatttcttatactaggaatctcatttgcatttgcatagactatacacatggggtggaaaggccaggcctgcccccatctcgttggtgtggctctgcgtatactacacactcattctcctgctcctcttttcccttagtcagtgtcctttcatcctgattcagctctgccttgcatcaccctcagcctaagggagtgggaaggaaatggggtgttttcttgctgacctgaggctatagggtcacttgccatttcctaccttctctgggggatttgagggtagaggcaggggaagatctgttgttgcagctgcttctgcccccttgatccaaatgaccatcatctctgatggagatgggttgggtacctggccttcatggcaccttcactgctagggatgctcaaggggcaggcctggggcccttccctcctgtctcttctcggtctttcctctctgagcagcctcctacctcccctgcctgagccctcactccacagccctcccaggtacctagcagaggctgtcagtccttggctcacctggaacagggctggggctgggttggaacaggtgtgtgcccccaccacagctctatgactctgttctccctccctgccattgtggactcttgtatttgagggacctcaagagagtgaggaccctaccatccactgtccatattcagtcccagccccagtgcgcttcctctgttccctccctcagccatccaattcttgagttttctcactgattggttttctttctttttccttggattaaatgtgaaagcaaaggc

SEQ ID NO: 152771 - DNA, 4206 bp, Homo sapiens
  Payload ID: 10051
  Gene Symbol: MPP2
  Gene Name: membrane protein, palmitoylated 2 (MAGUK p55 subfamily member 2)
  ENST ID: ENST00000377184
  CDS Start-End: 47-1756
ggcggcgtgtaggacgctccgggagtccccgggtctgggggccgccatggcaggcagcccaggcagcggggtctccttggagggtatatccctggagtcttctgaggaagcggagctccagagggaagccatgcagcaagtcctggacaacttgggatccctccccagtgccacgggggctgcagagctggacctgatcttccttcgaggcattatggaaagtcccatagtaagatccctggccaaggcccatgagaggctggaggagacgaagctggaggccgtgagagacaacaacctggagctggtgcaggagatcctgcgggacctggcgcagctggctgagcagagcagcacagccgccgagctggcccacatcctccaggagccccacttccagtccctcctggagacgcacgactctgtggcctcaaagacctatgagacaccaccccccagccctggcctggaccctacattcagcaaccagcctgtacctcccgatgctgtgcgcatggtgggcatccgcaagacagccggagaacatctgggtgtaacgttccgcgtggagggcggcgagctggtgatcgcgcgcattctgcatgggggcatggtggctcaacaaggcctgctgcatgtgggtgacatcatcaaggaggtgaacgggcagccagtgggcagtgacccccgcgcactgcaggagctcctgcgcaatgccagtggcagtgtcatcctcaagatcctgcccagctaccaggagccccatctgccccgccaggtatttgtgaaatgtcactttgactatgacccggcccgagacagcctcatcccctgcaaggaagcaggcctgcgcttcaacgccggggacttgctccagatcgtaaaccaggatgatgccaactggtggcaggcatgccatgtcgaagggggcagtgctgggctcattcccagccagctgctggaggagaagcggaaagcatttgtcaagagggacctggagctgacaccaaactcagggaccctatgcggcagcctttcaggaaagaaaaagaagcgaatgatgtatttgaccaccaagaatgcagagtttgaccgtcatgagctgctcatttatgaggaggtggcccgcatgcccccgttccgccggaaaaccctggtactgattggggctcagggcgtgggacggcgcagcctgaagaacaagctcatcatgtgggatccagatcgctatggcaccacggtgccctacacctcccggcggccgaaagactcagagcgggaaggtcagggttacagctttgtgtcccgtggggagatggaggctgacgtccgtgctgggcgctacctggagcatggcgaatacgagggcaacctgtatggcacacgtattgactccatccggggcgtggtcgctgctgggaaggtgtgcgtgctggatgtcaacccccaggcggtgaaggtgctacgaacggccgagtttgtcccttacgtggtgttcatcgaggccccagacttcgagaccctgcgggccatgaacagggctgcgctggagagtggaatatccaccaagcagctcacggaggcggacctgagacggacagtggaggagagcagccgcatccagcggggctacgggcactactttgacctctgcctggtcaatagcaacctggagaggaccttccgcgagctccagacagccatggagaagctacggacagagccccagtgggtgcctgtcagctgggtgtactgagcctgttcacctggtctttggctcactctgtgttgaaacccagaacctgaatccatccccctcctgacctgtgaccccctgccacaatccttagcccccatatctggctgtccttgggtaacagctcccagcaggccctaagtctggcttcagcacagaggcgtgcactgccagggaggtgggcattcatggggtaccttgtgcccaggtgctgcccactcctgatgcccattggtcaccagatatctctgagggccaagctatgcccaggaatgtgtcagagtcacctccataatggtcagtacagagaagagaaaagctgctttgggaccacatggtcagtaggcacactgccccctgccacccctccccagtcaccagttctcctctggactggccacacccaccccattcctggactcctcccacctctcacccctgtgtcggaggaacaggccttgggctgtttccgtgtgaccaggggaatgtgtggcccgctggcagccaggcaggcccgggtggtggtgccagcctggtgccatcttgaaggctggaggagtcagagtgagagctagtggccacagctgcagagcactgcagctcccagctcctttggaaagggacagggtcgcagggcagatgctgctcggtccttccctcatccacagcttctcactgccgaagtttctccagatttctccaatgtgtcctgacaggtcagccctgctccccacagggccaggctggcaggggccagtgggctcagcccaggtaggggcaggatggagggctgagccctgtgacaacctgctgttaccaactgaagagccccaagctctccatggcccacagcaggcacaggtctgagctctatgtccttgaccttggtccatttggttttctgtctagccaggtccaggtagcccacttgcatcagggctgctgggttggaggggctaaggaggagtgcagaggggaccttgggagcctgggcttgaaggacagttgccctccaggaggttcctcacacacaactccagaggcgccatttacactgtagtctgtacaacctgtggttccacgtgcatgttcggcacctgtctgtgcctctggcaccaggttgtgtgtatgtgtgtgcgtgtgcacgtgcgtgtgtgtgtgtgtgtgtcaggtttaatttggggaggaagcaaagggttttgttttggaggtcactctttggggcccctttctgggggttccccatcagccctcatttcttataataccctgatcccagactccaaagccctggtcctttcctgatgtctcctcccttgtcttattgtccccctaccctaaatgcccccctgccataacttggggagggcagttttgtaaaataggagactccctttaagaaagaatgctgtcctagatgtacttgggcatctcatccttcattattctctgcattccttccggggggagcctgtcctcagaggggacaacctgtgacaccctgagtccaaacccttgtgcctcccagttcttccaagtgtctaactagtcttcgctgcagcgtcagccaaagctggcccctgaaccactgtgtgcccatttcctagggaaggggaaggagaataaacagaatatttattacaaatgttagaatatatttcttatactaggaatctcatttgcatttgcatagactatacacatggggtggaaaggccaggcctgcccccatctcgttggtgtggctctgcgtatactacacactcattctcctgctcctcttttcccttagtcagtgtcctttcatcctgattcagctctgccttgcatcaccctcagcctaagggagtgggaaggaaatggggtgttttcttgctgacctgaggctatagggtcacttgccatttcctaccttctctgggggatttgagggtagaggcaggggaagatctgttgttgcagctgcttctgcccccttgatccaaatgaccatcatctctgatggagatgggttgggtacctggccttcatggcaccttcactgctagggatgctcaaggggcaggcctggggcccttccctcctgtctcttctcggtctttcctctctgagcagcctcctacctcccctgcctgagccctcactccacagccctcccaggtacctagcagaggctgtcagtccttggctcacctggaacagggctggggctgggttggaacaggtgtgtgcccccaccacagctctatgactctgttctccctccctgccattgtggactcttgtatttgagggacctcaagagagtgaggaccctaccatccactgtccatattcagtcccagccccagtgcgcttcctctgttccctccctcagccatccaattcttgagttttctcactgattggttttctttctttttccttggattaaatgtgaaagcaaaggc

SEQ ID NO: 152772 - DNA, 2111 bp, Homo sapiens
  Payload ID: 10051
  Gene Symbol: MPP2
  Gene Name: membrane protein, palmitoylated 2 (MAGUK p55 subfamily member 2)
  Uniprot ID: Q14168
  ENST ID: ENST00000520305
  CDS Start-End: 395-1636
aataaacgctgagcgcccggctgcgctggagccgcccggagctaggggcttcccggggcgcaggagagacgtttcagagcccttgcctccttcaccatgccggttgccgccaccaactctgaaactggcccatgagaggctggaggagacgaagctggaggccgtgagagacaacaacctggagctggtgcaggagatcctgcgggacctggcgcagctggctgagcagagcagcacagccgccgagctggcccacatcctccaggagccccacttccagtccctcctggagacgcacgactctgtggcctcaaagacctatgagacaccaccccccagccctggcctggaccctacattcagcaaccagcctgtacctcccgatgctgtgcgcatggtgggcatccgcaagacagccggagaacatctgggtgtaacgttccgcgtggagggcggcgagctggtgatcgcgcgcattctgcatgggggcatggtggctcaacaaggcctgctgcatgtgggtgacatcatcaaggaggtgaacgggcagccagtgggcagtgacccccgcgcactgcaggagctcctgcgcaatgccagtggcagtgtcatcctcaagatcctgcccagctaccaggagccccatctgccccgccaggtatttgtgaaatgtcactttgactatgacccggcccgagacagcctcatcccctgcaaggaagcaggcctgcgcttcaacgccggggacttgctccagatcgtaaaccaggatgatgccaactggtggcaggcatgccatgtcgaagggggcagtgctgggctcattcccagccagctgctggaggagaagcggaaagcatttgtcaagagggacctggagctgacaccaaactcagggaccctatgcggcagcctttcaggaaagaaaaagaagcgaatgatgtatttgaccaccaagaatgcagagtttgaccgtcatgagctgctcatttatgaggaggtggcccgcatgcccccgttccgccggaaaaccctggtactgattggggctcagggcgtgggacggcgcagcctgaagaacaagctcatcatgtgggatccagatcgctatggcaccacggtgccctacacctcccggcggccgaaagactcagagcgggaaggtcagggttacagctttgtgtcccgtggggagatggaggctgacgtccgtgctgggcgctacctggagcatggcgaatacgagggcaacctgtatggcacacgtattgactccatccggggcgtggtcgctgctgggaaggtgtgcgtgctggatgtcaacccccaggcggtgaaggtgctacgaacggccgagtttgtcccttacgtggtgttcatcgaggccccagacttcgagaccctgcgggccatgaacagggctgcgctggagagtggaatatccaccaagcagctcacggaggcggacctgagacggacagtggaggagagcagccgcatccagcggggctacgggcactactttgacctctgcctggtcaatagcaacctggagaggaccttccgcgagctccagacagccatggagaagctacggacagagccccagtgggtgcctgtcagctgggtgtactgagcctgttcacctggtctttggctcactctgtgttgaaacccagaacctgaatccatccccctcctgacctgtgaccccctgccacaatccttagcccccatatctggctgtccttgggtaacagctcccagcaggccctaagtctggcttcagcacagaggcgtgcactgccagggaggtgggcattcatggggtaccttgtgcccaggtgctgcccactcctgatgcccattggtcaccagatatctctgagggccaagctatgcccaggaatgtgtcagagtcacctccataatggtcagtacagagaagagaaaagctgctttgggaccacatggtcagtaggcacactgccccctgccacccctccccagtcaccagttctcctctggactggccacacccaccccattcctggactcctcccacctctcacccctgtgtcggaggaacaggccttgggctgtttccgtgt

SEQ ID NO: 152773 - DNA, 1896 bp, Homo sapiens
  Payload ID: 10051
  Gene Symbol: MPP2
  Gene Name: membrane protein, palmitoylated 2 (MAGUK p55 subfamily member 2)
  ENST ID: ENST00000518766
  CDS Start-End: 58-1851
ctttattagagagatacttgttgaccgacgaatgcagtggggcagccgctaagaataatgagttgggctccacctccccaggtgggccagaatctgagatcccagactgtcctgaggatcctaaatggaatggaagatttgatgtgggtcgctatggaggagagacgtttcagagcccttgcctccttcaccatgccggttgccgccaccaactctgaaactgccatgcagcaagtcctggacaacttgggatccctccccagtgccacgggggctgcagagctggacctgatcttccttcgaggcattatggaaagtcccatagtaagatccctggccaaggcccatgagaggctggaggagacgaagctggaggccgtgagagacaacaacctggagctggtgcaggagatcctgcgggacctggcgcagctggctgagcagagcagcacagccgccgagctggcccacatcctccaggagccccacttccagtccctcctggagacgcacgactctgtggcctcaaagacctatgagacaccaccccccagccctggcctggaccctacattcagcaaccagcctgtacctcccgatgctgtgcgcatggtgggcatccgcaagacagccggagaacatctgggtgtaacgttccgcgtggagggcggcgagctggtgatcgcgcgcattctgcatgggggcatggtggctcaacaaggcctgctgcatgtgggtgacatcatcaaggaggtgaacgggcagccagtgggcagtgacccccgcgcactgcaggagctcctgcgcaatgccagtggcagtgtcatcctcaagatcctgcccagctaccaggagccccatctgccccgccaggtatttgtgaaatgtcactttgactatgacccggcccgagacagcctcatcccctgcaaggaagcaggcctgcgcttcaacgccggggacttgctccagatcgtaaaccaggatgatgccaactggtggcaggcatgccatgtcgaagggggcagtgctgggctcattcccagccagctgctggaggagaagcggaaagcatttgtcaagagggacctggagctgacaccaaactcagggaccctatgcggcagcctttcaggaaagaaaaagaagcgaatgatgtatttgaccaccaagaatgcagagtttgaccgtcatgagctgctcatttatgaggaggtggcccgcatgcccccgttccgccggaaaaccctggtactgattggggctcagggcgtgggacggcgcagcctgaagaacaagctcatcatgtgggatccagatcgctatggcaccacggtgccctacacctcccggcggccgaaagactcagagcgggaaggtcagggttacagctttgtgtcccgtggggagatggaggctgacgtccgtgctgggcgctacctggagcatggcgaatacgagggcaacctgtatggcacacgtattgactccatccggggcgtggtcgctgctgggaaggtgtgcgtgctggatgtcaacccccaggcggtgaaggtgctacgaacggccgagtttgtcccttacgtggtgttcatcgaggccccagacttcgagaccctgcgggccatgaacagggctgcgctggagagtggaatatccaccaagcagctcacggaggcggacctgagacggacagtggaggagagcagccgcatccagcggggctacgggcactactttgacctctgcctggtcaatagcaacctggagaggaccttccgcgagctccagacagccatggagaagctacggacagagccccagtgggtgcctgtcagctgggtgtactgagcctgttcacctggtctttggctcactctgtgttgaaacccagaa

SEQ ID NO: 152774 - DNA, 564 bp, Homo sapiens
  Payload ID: 10051
  Gene Symbol: MPP2
  Gene Name: membrane protein, palmitoylated 2 (MAGUK p55 subfamily member 2)
  ENST ID: ENST00000523762
  CDS Start-End: 145-564
ttgttgaccgacgaatgcagtggggcagccgctaagaataatgagttgggctccacctccccaggtgggccagaatctgagatcccagactgtcctgaggatcctaaatggaatggaagatttgatgtgggtcgctatggagccatgcagcaagtcctggacaacttgggatccctccccagtgccacgggggctgcagagctggacctgatcttccttcgaggcattatggaaagtcccatagtaagatccctggccaaggcccatgagaggctggaggagacgaagctggaggccgtgagagacaacaacctggagctggtgcaggagatcctgcgggacctggcgcagctggctgagcagagcagcacagccgccgagctggcccacatcctccaggagccccacttccagtccctcctggagacgcacgactctgtggcctcaaagacctatgagacaccaccccccagccctggcctggaccctacattcagcaaccagcctgtacctcccgatgctgtgcgcatggtgggcatccgcaagacagccggagaacatctg

SEQ ID NO: 152775 - DNA, 3462 bp, Homo sapiens
  Payload ID: 10051
  Gene Symbol: MPP2
  Gene Name: membrane protein, palmitoylated 2 (MAGUK p55 subfamily member 2)
  ENST ID: ENST00000461854
  CDS Start-End: 87-1817
gagcgcccggctgcgctggagccgcccggagctaggggcttcccggggcgcaggagagacgtttcagagcccttgcctccttcaccatgccggttgccgccaccaactctgaaactgccatgcagcaagtcctggacaacttgggatccctccccagtgccacgggggctgcagagctggacctgatcttccttcgaggcattatggaaagtcccatagtaagatccctggccaaggtgataatggtattgtggtttatgcagcagaatgtctttgttcctatgaaatacatgctgaaatactttggggcccatgagaggctggaggagacgaagctggaggccgtgagagacaacaacctggagctggtgcaggagatcctgcgggacctggcgcagctggctgagcagagcagcacagccgccgagctggcccacatcctccaggagccccacttccagtccctcctggagacgcacgactctgtggcctcaaagacctatgagacaccaccccccagccctggcctggaccctacattcagcaaccagcctgtacctcccgatgctgtgcgcatggtgggcatccgcaagacagccggagaacatctgggtgtaacgttccgcgtggagggcggcgagctggtgatcgcgcgcattctgcatgggggcatggtggctcaacaaggcctgctgcatgtgggtgacatcatcaaggaggtgaacgggcagccagtgggcagtgacccccgcgcactgcaggagctcctgcgcaatgccagtggcagtgtcatcctcaagatcctgcccagctaccaggagccccatctgccccgccaggtatttgtgaaatgtcactttgactatgacccggcccgagacagcctcatcccctgcaaggaagcaggcctgcgcttcaacgccggggacttgctccagatcgtaaaccaggatgatgccaactggtggcaggcatgccatgtcgaagggggcagtgctgggctcattcccagccagctgctggaggagaagcggaaagcatttgtcaagagggacctggagctgacaccaaactcagggaccctatgcggcagcctttcaggaaagaaaaagaagcgaatgatgtatttgaccaccaagaatgcagagtttgaccgtcatgagctgctcatttatgaggaggtggcccgcatgcccccgttccgccggaaaaccctggtactgattggggctcagggcgtgggacggcgcagcctgaagaacaagctcatcatgtgggatccagatcgctatggcaccacggtgccctacacctcccggcggccgaaagactcagagcgggaaggtcagggttacagctttgtgtcccgtggggagatggaggctgacgtccgtgctgggcgctacctggagcatggcgaatacgagggcaacctgtatggcacacgtattgactccatccggggcgtggtcgctgctgggaaggtgtgcgtgctggatgtcaacccccaggcggtgaaggtgctacgaacggccgagtttgtcccttacgtggtgttcatcgaggccccagacttcgagaccctgcgggccatgaacagggctgcgctggagagtggaatatccaccaagcagctcacggaggcggacctgagacggacagtggaggagagcagccgcatccagcggggctacgggcactactttgacctctgcctggtcaatagcaacctggagaggaccttccgcgagctccagacagccatggagaagctacggacagagccccagtgggtgcctgtcagctgggtgtactgagcctgttcacctggtctttggctcactctgtgttgaaacccagaacctgaatccatccccctcctgacctgtgaccccctgccacaatccttagcccccatatctggctgtccttgggtaacagctcccagcaggccctaagtctggcttcagcacagaggcgtgcactgccagggaggtgggcattcatggggtaccttgtgcccaggtgctgcccactcctgatgcccattggtcaccagatatctctgagggccaagctatgcccaggaatgtgtcagagtcacctccataatggtcagtacagagaagagaaaagctgctttgggaccacatggtcagtaggcacactgccccctgccacccctccccagtcaccagttctcctctggactggccacacccaccccattcctggactcctcccacctctcacccctgtgtcggaggaacaggccttgggctgtttccgtgtgaccaggggaatgtgtggcccgctggcagccaggcaggcccgggtggtggtgccagcctggtgccatcttgaaggctggaggagtcagagtgagagctagtggccacagctgcagagcactgcagctcccagctcctttggaaagggacagggtcgcagggcagatgctgctcggtccttccctcatccacagcttctcactgccgaagtttctccagatttctccaatgtgtcctgacaggtcagccctgctccccacagggccaggctggcaggggccagtgggctcagcccaggtaggggcaggatggagggctgagccctgtgacaacctgctgttaccaactgaagagccccaagctctccatggcccacagcaggcacaggtctgagctctatgtccttgaccttggtccatttggttttctgtctagccaggtccaggtagcccacttgcatcagggctgctgggttggaggggctaaggaggagtgcagaggggaccttgggagcctgggcttgaaggacagttgccctccaggaggttcctcacacacaactccagaggcgccatttacactgtagtctgtacaacctgtggttccacgtgcatgttcggcacctgtctgtgcctctggcaccaggttgtgtgtatgtgtgtgcgtgtgcacgtgcgtgtgtgtgtgtgtgtgtcaggtttaatttggggaggaagcaaagggttttgttttggaggtcactctttggggcccctttctgggggttccccatcagccctcatttcttataataccctgatcccagactccaaagccctggtcctttcctgatgtctcctcccttgtcttattgtccccctaccctaaatgcccccctgccataacttggggagggcagttttgtaaaataggagactccctttaagaaagaatgctgtcctagatgtacttgggcatctcatccttcattattctctgcattccttccggggggagcctgtcctcagaggggacaacctgtgacaccctgagtccaaacccttgtgcctcccagttcttccaagtgtctaactagtcttcgctgcagcgtcagccaaagctggcccctgaaccactgtgtgcccatttcctagggaaggggaaggagaataaacagaatatttattacaaa

SEQ ID NO: 152776 - DNA, 741 bp, Homo sapiens
  Payload ID: 10051
  Gene Symbol: MPP2
  Gene Name: membrane protein, palmitoylated 2 (MAGUK p55 subfamily member 2)
  ENST ID: ENST00000520406
  CDS Start-End: 289-741
gtcccccggcccccgggccagctcctatcccaagacctccgccttcttttcgtcctgacacggcacttaggaccctattcactgggtttaaactccacaggcccctttcacccaggcccgttccctccctgtccacccgcccccgcccctgggccctctttctggggtgctggttgggagaaccaagccccgctgcccattgacactggtccccgcccctgcggtaggggctccaaagtggcttcaggcaccaaggagagacgtttcagagcccttgcctccttcaccatgccggttgccgccaccaactctgaaactgccatgcagcaagtcctggacaacttgggatccctccccagtgccacgggggctgcagagctggacctgatcttccttcgaggcattatggaaagtcccatagtaagatccctggccaaggcccatgagaggctggaggagacgaagctggaggccgtgagagacaacaacctggagctggtgcaggagatcctgcgggacctggcgcagctggctgagcagagcagcacagccgccgagctggcccacatcctccaggagccccacttccagtccctcctggagacgcacgactctgtggcctcaaagacctatgagacaccaccccccagccctggcctggaccctacattcagcaaccagcctgtacctcccgatgctgtgcgcatggtgggcatccgcaagacagccggagaacatctg

SEQ ID NO: 152777 - DNA, 857 bp, Homo sapiens
  Payload ID: 10051
  Gene Symbol: MPP2
  Gene Name: membrane protein, palmitoylated 2 (MAGUK p55 subfamily member 2)
  ENST ID: ENST00000523220
  CDS Start-End: 289-857
ctgcctccctaacccttcccagtgggactccagcagggcgtcgtggtctgtgcggtgtctcccaaaccactacctggctgcccccgtaccagctgctgggaaagactacttcctccgagttgtgccggcctccgcgttctcctcacctcccctctcctccggacctccgccccctcgcggagaggccttgccgctttaagagccgggctagcgattgacaagcaataaacgctgagcgcccggctgcgctggagccgcccggagctaggggcttcccggggcgcagccatgcagcaagtcctggacaacttgggatccctccccagtgccacgggggctgcagagctggacctgatcttccttcgaggcattatggaaagtcccatagcccatgagaggctggaggagacgaagctggaggccgtgagagacaacaacctggagctggtgcaggagatcctgcgggacctggcgcagctggctgagcagagcagcacagccgccgagctggcccacatcctccaggagccccacttccagtccctcctggagacgcacgactctgtggcctcaaagacctatgagacaccaccccccagccctggcctggaccctacattcagcaaccagcctgtacctcccgatgctgtgcgcatggtgggcatccgcaagacagccggagaacatctgggtgtaacgttccgcgtggagggcggcgagctggtgatcgcgcgcattctgcatgggggcatggtggctcaacaaggcctgctgcatgtgggtgacatcatcaaggaggtgaacgggcagccagtgggcagtgacccccgcgcactgcaggagctcctgcgcaatgc

SEQ ID NO: 152778 - DNA, 534 bp, Homo sapiens
  Payload ID: 10051
  Gene Symbol: MPP2
  Gene Name: membrane protein, palmitoylated 2 (MAGUK p55 subfamily member 2)
  ENST ID: ENST00000520241
  CDS Start-End: 104-534
gacaagcaataaacgctgagcgcccggctgcgctggagccgcccggagctaggggcttcccggggcgcaggagagacgtttcagagcccttgcctccttcaccatgccggttgccgccaccaactctgaaactgccatgcagcaagtcctggacaacttgggatccctccccagtgccacgggggctgcagagctggacctgatcttccttcgaggcattatggaaagtcccatagtaagatccctggccaaggtacagtgctccagggaggcccatgagaggctggaggagacgaagctggaggccgtgagagacaacaacctggagctggtgcaggagatcctgcgggacctggcgcagctggctgagcagagcagcacagccgccgagctggcccacatcctccaggagccccacttccagtccctcctggagacgcacgactctgtggcctcaaagacctatgagacaccaccccccagccctggcctggaccctacattcagcaaccagcctgtacctcccgatgctgt

SEQ ID NO: 152779 - DNA, 543 bp, Homo sapiens
  Payload ID: 10051
  Gene Symbol: MPP2
  Gene Name: membrane protein, palmitoylated 2 (MAGUK p55 subfamily member 2)
  ENST ID: ENST00000518478
  CDS Start-End: 449-543
aggcgtcccccggcccccgggccagctcctatcccaagacctccgccttcttttcgtcctgacacggcacttaggaccctattcactgggtttaaactccacaggcccctttcacccaggcccgttccctccctgtccacccgcccccgcccctgggccctctttctggggtgctggttgggagaaccaagccccgctgcccattgacactggtccccgcccctgcggtaggggctccaaagtggcttcaggcaccaaggtggtgagctgtgaggggccccggtatctgcgcggcctccccgggggctgtgcgggttgggggtacttagaagcccggcattacggaaggaggacttctggagtcccttctctgaccctgtgagggagagcagcgccagccaggagaaggctccaggagagacgtttcagagcccttgcctccttcaccatgccggttgccgccaccaactctgaaactgccatgcagcaagtcctggacaacttgggatccctccccagtgccacgggggctgcagagctgga

SEQ ID NO: 152780 - DNA, 588 bp, Homo sapiens
  Payload ID: 10051
  Gene Symbol: MPP2
  Gene Name: membrane protein, palmitoylated 2 (MAGUK p55 subfamily member 2)
  ENST ID: ENST00000522172
  CDS Start-End: 369-588
aggtaggcgtcccccggcccccgggccagctcctatcccaagacctccgccttcttttcgtcctgacacggcacttaggaccctattcactgggtttaaactccacaggcccctttcacccaggcccgttccctccctgtccacccgcccccgcccctgggccctctttctggggtgctggttgggagaaccaagccccgctgcccattgacactggtccccgcccctgcggtaggggctccaaagtggcttcaggcaccaagggaaggaggacttctggagtcccttctctgaccctgtgagggagagcagcgccagccaggagaaggctccaggagagacgtttcagagcccttgcctccttcaccatgccggttgccgccaccaactctgaaactgccatgcagcaagtcctggacaacttgggatccctccccagtgccacgggggctgcagagctggacctgatcttccttcgaggcattatggaaagtcccatagtaagatccctggccaaggcccatgagaggctggaggagacgaagctggaggccgtgagagacaacaacctggagctggtgcaggaga

SEQ ID NO: 152781 - DNA, 545 bp, Homo sapiens
  Payload ID: 10051
  Gene Symbol: MPP2
  Gene Name: membrane protein, palmitoylated 2 (MAGUK p55 subfamily member 2)
  ENST ID: ENST00000521178
  CDS Start-End: 168-545
ataaacgctgagcgcccggctgcgctggagccgcccggagctaggggcttcccggggcgcagggaaggaggacttctggagtcccttctctgaccctgtgagggagagcagcgccagccaggagaaggctccaggagagacgtttcagagcccttgcctccttcaccatgccggttgccgccaccaactctgaaactgccatgcagcaagtcctggacaacttgggatccctccccagtgccacgggggctgcagagctggacctgatcttccttcgaggcattatggaaagtcccatagtaagatccctggccaaggcccatgagaggctggaggagacgaagctggaggccgtgagagacaacaacctggagctggtgcaggagatcctgcgggacctggcgcagctggctgagcagagcagcacagccgccgagctggcccacatcctccaggagccccacttccagtccctcctggagacgcacgactctgtggcctcaaagacctatgagacaccaccccccagccctggcctggaccct

SEQ ID NO: 152782 - DNA, 2121 bp, Homo sapiens
  Payload ID: 10051
  Gene Symbol: MPP2
  Gene Name: membrane protein, palmitoylated 2 (MAGUK p55 subfamily member 2)
  ENST ID: ENST00000523501
  CDS Start-End: 66-1691
aataaacgctgagcgcccggctgcgctggagccgcccggagctaggggcttcccggggcgcagccatgcagcaagtcctggacaacttgggatccctccccagtgccacgggggctgcagagctggacctgatcttccttcgaggcattatggaaagtcccatagtaagatccctggccaaggcccatgagaggctggaggagacgaagctggaggccgtgagagacaacaacctggagctggtgcaggagatcctgcgggacctggcgcagctggctgagcagagcagcacagccgccgagctggcccacatcctccaggagccccacttccagtccctcctggagacgcacgactctgtggcctcaaagacctatgagacaccaccccccagccctggcctggaccctacattcagcaaccagcctgtacctcccgatgctgtgcgcatggtgggcatccgcaagacagccggagaacatctgggtgtaacgttccgcgtggagggcggcgagctggtgatcgcgcgcattctgcatgggggcatggtggctcaacaaggcctgctgcatgtgggtgacatcatcaaggaggtgaacgggcagccagtgggcagtgacccccgcgcactgcaggagctcctgcgcaatgccagtggcagtgtcatcctcaagatcctgcccagctaccaggagccccatctgccccgccaggtatttgtgaaatgtcactttgactatgacccggcccgagacagcctcatcccctgcaaggaagcaggcctgcgcttcaacgccggggacttgctccagatcgtaaaccaggatgatgccaactggtggcaggcatgccatgtcgaagggggcagtgctgggctcattcccagccagctgctggaggagaagcggaaagcatttgtcaagagggacctggagctgacaccaaactcagggaccctatgcggcagcctttcaggaaagaaaaagaagcgaatgatgtatttgaccaccaagaatgcagagtttgaccgtcatgagctgctcatttatgaggaggtggcccgcatgcccccgttccgccggaaaaccctggtactgattggggctcagggcgtgggacggcgcagcctgaagaacaagctcatcatgtgggatccagatcgctatggcaccacggtgccctacacctcccggcggccgaaagactcagagcgggaaggtcagggttacagctttgtgtcccgtggggagatggaggctgacgtccgtgctgggcgctacctggagcatggcgaatacgagggcaacctgtatggcacacgtattgactccatccggggcgtggtcgctgctgggaaggtgtgcgtgctggatgtcaacccccaggcggtgaaggtgctacgaacggccgagtttgtcccttacgtggtgttcatcgaggccccagacttcgagaccctgcgggccatgaacagggctgcgctggagagtggaatatccaccaagcagctcacggaggcggacctgagacggacagtggaggagagcagccgcatccagcggggctacgggcactactttgacctctgcctggtcaatagcaacctggagaggaccttccgcgagctccagacagccatggagaagctacggacagagccccagtgggtgcctgtcagctgggtgtactgagcctgttcacctggtctttggctcactctgtgttgaaacccagaacctgaatccatccccctcctgacctgtgaccccctgccacaatccttagcccccatatctggctgtccttgggtaacagctcccagcaggccctaagtctggcttcagcacagaggcgtgcactgccagggaggtgggcattcatggggtaccttgtgcccaggtgctgcccactcctgatgcccattggtcaccagatatctctgagggccaagctatgcccaggaatgtgtcagagtcacctccataatggtcagtacagagaagagaaaagctgctttgggaccacatggtcagtaggcacactgccccctgccacccctccccagtcaccagttctcctctggactggccacacccaccccattcctggactcctcccacc

SEQ ID NO: 152783 - DNA, 584 bp, Homo sapiens
  Payload ID: 10051
  Gene Symbol: MPP2
  Gene Name: membrane protein, palmitoylated 2 (MAGUK p55 subfamily member 2)
  ENST ID: ENST00000523934
  CDS Start-End: 139-584
aaagtggcttcaggcaccaaggtggtgagctgtgaggggccccggtatctgcgcggcctccccgggggctgtgcgggttgggggtacttagaagcccggcattacgagagacgtttcagagcccttgcctccttcaccatgccggttgccgccaccaactctgaaactgccatgcagcaagtcctggacaacttgggatccctccccagtgccacgggggctgcagagctggacctgatcttccttcgaggcattatggaaagtcccatagtaagatccctggccaaggcccatgagaggctggaggagacgaagctggaggccgtgagagacaacaacctggagctggtgcaggagatcctgcgggacctggcgcagctggctgagcagagcagcacagccgccgagctggcccacatcctccaggagccccacttccagtccctcctggagacgcacgactctgtggcctcaaagacctatgagacaccaccccccagccctggcctggaccctacattcagcaaccagcctgtacctcccgatgctgtgcgcatggtgggcatccgcaagacagccggaga

SEQ ID NO: 152784 - DNA, 4351 bp, Homo sapiens
  Payload ID: 10051
  Gene Symbol: MPP2
  Gene Name: membrane protein, palmitoylated 2 (MAGUK p55 subfamily member 2)
  ENST ID: ENST00000536246
  CDS Start-End: 282-1907
gacctggtgccactcctcagggaatgtctgagtggaggctgcagtaccctgatggtggcctcttgggcacaagatctcagaggaatggggtcaccggagcggagctgagtccttcccttctgcccacacttttccctgtgtgcaaatgtgccctcatttttcctttctggggaactgagttccaagatgcctgacttgcttcctgggcatcatccccttcattaagaggaagaactcatgggagatgggggaggggaagaagctgctgtgaggcgagggccatgcagcaagtcctggacaacttgggatccctccccagtgccacgggggctgcagagctggacctgatcttccttcgaggcattatggaaagtcccatagtaagatccctggccaaggcccatgagaggctggaggagacgaagctggaggccgtgagagacaacaacctggagctggtgcaggagatcctgcgggacctggcgcagctggctgagcagagcagcacagccgccgagctggcccacatcctccaggagccccacttccagtccctcctggagacgcacgactctgtggcctcaaagacctatgagacaccaccccccagccctggcctggaccctacattcagcaaccagcctgtacctcccgatgctgtgcgcatggtgggcatccgcaagacagccggagaacatctgggtgtaacgttccgcgtggagggcggcgagctggtgatcgcgcgcattctgcatgggggcatggtggctcaacaaggcctgctgcatgtgggtgacatcatcaaggaggtgaacgggcagccagtgggcagtgacccccgcgcactgcaggagctcctgcgcaatgccagtggcagtgtcatcctcaagatcctgcccagctaccaggagccccatctgccccgccaggtatttgtgaaatgtcactttgactatgacccggcccgagacagcctcatcccctgcaaggaagcaggcctgcgcttcaacgccggggacttgctccagatcgtaaaccaggatgatgccaactggtggcaggcatgccatgtcgaagggggcagtgctgggctcattcccagccagctgctggaggagaagcggaaagcatttgtcaagagggacctggagctgacaccaaactcagggaccctatgcggcagcctttcaggaaagaaaaagaagcgaatgatgtatttgaccaccaagaatgcagagtttgaccgtcatgagctgctcatttatgaggaggtggcccgcatgcccccgttccgccggaaaaccctggtactgattggggctcagggcgtgggacggcgcagcctgaagaacaagctcatcatgtgggatccagatcgctatggcaccacggtgccctacacctcccggcggccgaaagactcagagcgggaaggtcagggttacagctttgtgtcccgtggggagatggaggctgacgtccgtgctgggcgctacctggagcatggcgaatacgagggcaacctgtatggcacacgtattgactccatccggggcgtggtcgctgctgggaaggtgtgcgtgctggatgtcaacccccaggcggtgaaggtgctacgaacggccgagtttgtcccttacgtggtgttcatcgaggccccagacttcgagaccctgcgggccatgaacagggctgcgctggagagtggaatatccaccaagcagctcacggaggcggacctgagacggacagtggaggagagcagccgcatccagcggggctacgggcactactttgacctctgcctggtcaatagcaacctggagaggaccttccgcgagctccagacagccatggagaagctacggacagagccccagtgggtgcctgtcagctgggtgtactgagcctgttcacctggtctttggctcactctgtgttgaaacccagaacctgaatccatccccctcctgacctgtgaccccctgccacaatccttagcccccatatctggctgtccttgggtaacagctcccagcaggccctaagtctggcttcagcacagaggcgtgcactgccagggaggtgggcattcatggggtaccttgtgcccaggtgctgcccactcctgatgcccattggtcaccagatatctctgagggccaagctatgcccaggaatgtgtcagagtcacctccataatggtcagtacagagaagagaaaagctgctttgggaccacatggtcagtaggcacactgccccctgccacccctccccagtcaccagttctcctctggactggccacacccaccccattcctggactcctcccacctctcacccctgtgtcggaggaacaggccttgggctgtttccgtgtgaccaggggaatgtgtggcccgctggcagccaggcaggcccgggtggtggtgccagcctggtgccatcttgaaggctggaggagtcagagtgagagctagtggccacagctgcagagcactgcagctcccagctcctttggaaagggacagggtcgcagggcagatgctgctcggtccttccctcatccacagcttctcactgccgaagtttctccagatttctccaatgtgtcctgacaggtcagccctgctccccacagggccaggctggcaggggccagtgggctcagcccaggtaggggcaggatggagggctgagccctgtgacaacctgctgttaccaactgaagagccccaagctctccatggcccacagcaggcacaggtctgagctctatgtccttgaccttggtccatttggttttctgtctagccaggtccaggtagcccacttgcatcagggctgctgggttggaggggctaaggaggagtgcagaggggaccttgggagcctgggcttgaaggacagttgccctccaggaggttcctcacacacaactccagaggcgccatttacactgtagtctgtacaacctgtggttccacgtgcatgttcggcacctgtctgtgcctctggcaccaggttgtgtgtatgtgtgtgcgtgtgcacgtgcgtgtgtgtgtgtgtgtgtcaggtttaatttggggaggaagcaaagggttttgttttggaggtcactctttggggcccctttctgggggttccccatcagccctcatttcttataataccctgatcccagactccaaagccctggtcctttcctgatgtctcctcccttgtcttattgtccccctaccctaaatgcccccctgccataacttggggagggcagttttgtaaaataggagactccctttaagaaagaatgctgtcctagatgtacttgggcatctcatccttcattattctctgcattccttccggggggagcctgtcctcagaggggacaacctgtgacaccctgagtccaaacccttgtgcctcccagttcttccaagtgtctaactagtcttcgctgcagcgtcagccaaagctggcccctgaaccactgtgtgcccatttcctagggaaggggaaggagaataaacagaatatttattacaaatgttagaatatatttcttatactaggaatctcatttgcatttgcatagactatacacatggggtggaaaggccaggcctgcccccatctcgttggtgtggctctgcgtatactacacactcattctcctgctcctcttttcccttagtcagtgtcctttcatcctgattcagctctgccttgcatcaccctcagcctaagggagtgggaaggaaatggggtgttttcttgctgacctgaggctatagggtcacttgccatttcctaccttctctgggggatttgagggtagaggcaggggaagatctgttgttgcagctgcttctgcccccttgatccaaatgaccatcatctctgatggagatgggttgggtacctggccttcatggcaccttcactgctagggatgctcaaggggcaggcctggggcccttccctcctgtctcttctcggtctttcctctctgagcagcctcctacctcccctgcctgagccctcactccacagccctcccaggtacctagcagaggctgtcagtccttggctcacctggaacagggctggggctgggttggaacaggtgtgtgcccccaccacagctctatgactctgttctccctccctgccattgtggactcttgtatttgagggacctcaagagagtgaggaccctaccatccactgtccatattcagtcccagccccagtgcgcttcctctgttccctccctcagccatccaattcttgagttttctcactgattggttttctttctttttccttggattaaatgtgaaagc

SEQ ID NO: 152785 - DNA, 4938 bp, Homo sapiens
  Payload ID: 10051
  Gene Symbol: MPP2
  Gene Name: membrane protein, palmitoylated 2 (MAGUK p55 subfamily member 2)
  ENST ID: ENST00000612133
  CDS Start-End: 836-2494
ttctttttctcaatatggaagcaggataacgaggaaaagtgaggcacgcctggaactagaacgccggtctaagccaagatgggtgggcggagtaatcaagccggtctcattaggcacttttaccatcgcccctttaagggatccttgggagccgaggggcaccagcgggtactggtaccagtcctgcctccctaacccttcccagtgggactccagcagggcgtcgtggtctgtgcggtgtctcccaaaccactacctggctgcccccgtaccagctgctgggaaagactacttcctccgagttgtgccggcctccgcgttctcctcacctcccctctcctccggacctccgccccctcgcggagaggccttgccgctttaagagccgggctagcgattgacaagcaataaacgctgagcgcccggctgcgctggagccgcccggagctaggggcttcccggggcgcaggtaggcgtcccccggcccccgggccagctcctatcccaagacctccgccttcttttcgtcctgacacggcacttaggaccctattcactgggtttaaactccacaggcccctttcacccaggcccgttccctccctgtccacccgcccccgcccctgggccctctttctggggtgctggttgggagaaccaagccccgctgcccattgacactggtccccgcccctgcggtaggggctccaaagtggcttcaggcaccaagggaaggaggacttctggagtcccttctctgaccctgtgagggagagcagcgccagccaggagaaggctccaggagagacgtttcagagcccttgcctccttcaccatgccggttgccgccaccaactctgaaactgccatgcagcaagtcctggacaacttgggatccctccccagtgccacgggggctgcagagctggacctgatcttccttcgaggcattatggaaagtcccatagtaagatccctggccaaggcccatgagaggctggaggagacgaagctggaggccgtgagagacaacaacctggagctggtgcaggagatcctgcgggacctggcgcagctggctgagcagagcagcacagccgccgagctggcccacatcctccaggagccccacttccagtccctcctggagacgcacgactctgtggcctcaaagacctatgagacaccaccccccagccctggcctggaccctacattcagcaaccagcctgtacctcccgatgctgtgcgcatggtgggcatccgcaagacagccggagaacatctgggtgtaacgttccgcgtggagggcggcgagctggtgatcgcgcgcattctgcatgggggcatggtggctcaacaaggcctgctgcatgtgggtgacatcatcaaggaggtgaacgggcagccagtgggcagtgacccccgcgcactgcaggagctcctgcgcaatgccagtggcagtgtcatcctcaagatcctgcccagctaccaggagccccatctgccccgccaggtatttgtgaaatgtcactttgactatgacccggcccgagacagcctcatcccctgcaaggaagcaggcctgcgcttcaacgccggggacttgctccagatcgtaaaccaggatgatgccaactggtggcaggcatgccatgtcgaagggggcagtgctgggctcattcccagccagctgctggaggagaagcggaaagcatttgtcaagagggacctggagctgacaccaaactcagggaccctatgcggcagcctttcaggaaagaaaaagaagcgaatgatgtatttgaccaccaagaatgcagagtttgaccgtcatgagctgctcatttatgaggaggtggcccgcatgcccccgttccgccggaaaaccctggtactgattggggctcagggcgtgggacggcgcagcctgaagaacaagctcatcatgtgggatccagatcgctatggcaccacggtgccctacacctcccggcggccgaaagactcagagcgggaaggtcagggttacagctttgtgtcccgtggggagatggaggctgacgtccgtgctgggcgctacctggagcatggcgaatacgagggcaacctgtatggcacacgtattgactccatccggggcgtggtcgctgctgggaaggtgtgcgtgctggatgtcaacccccaggcggtgaaggtgctacgaacggccgagtttgtcccttacgtggtgttcatcgaggccccagacttcgagaccctgcgggccatgaacagggctgcgctggagagtggaatatccaccaagcagctcacggaggcggacctgagacggacagtggaggagagcagccgcatccagcggggctacgggcactactttgacctctgcctggtcaatagcaacctggagaggaccttccgcgagctccagacagccatggagaagctacggacagagccccagtgggtgcctgtcagctgggtgtactgagcctgttcacctggtctttggctcactctgtgttgaaacccagaacctgaatccatccccctcctgacctgtgaccccctgccacaatccttagcccccatatctggctgtccttgggtaacagctcccagcaggccctaagtctggcttcagcacagaggcgtgcactgccagggaggtgggcattcatggggtaccttgtgcccaggtgctgcccactcctgatgcccattggtcaccagatatctctgagggccaagctatgcccaggaatgtgtcagagtcacctccataatggtcagtacagagaagagaaaagctgctttgggaccacatggtcagtaggcacactgccccctgccacccctccccagtcaccagttctcctctggactggccacacccaccccattcctggactcctcccacctctcacccctgtgtcggaggaacaggccttgggctgtttccgtgtgaccaggggaatgtgtggcccgctggcagccaggcaggcccgggtggtggtgccagcctggtgccatcttgaaggctggaggagtcagagtgagagctagtggccacagctgcagagcactgcagctcccagctcctttggaaagggacagggtcgcagggcagatgctgctcggtccttccctcatccacagcttctcactgccgaagtttctccagatttctccaatgtgtcctgacaggtcagccctgctccccacagggccaggctggcaggggccagtgggctcagcccaggtaggggcaggatggagggctgagccctgtgacaacctgctgttaccaactgaagagccccaagctctccatggcccacagcaggcacaggtctgagctctatgtccttgaccttggtccatttggttttctgtctagccaggtccaggtagcccacttgcatcagggctgctgggttggaggggctaaggaggagtgcagaggggaccttgggagcctgggcttgaaggacagttgccctccaggaggttcctcacacacaactccagaggcgccatttacactgtagtctgtacaacctgtggttccacgtgcatgttcggcacctgtctgtgcctctggcaccaggttgtgtgtatgtgtgtgcgtgtgcacgtgcgtgtgtgtgtgtgtgtgtcaggtttaatttggggaggaagcaaagggttttgttttggaggtcactctttggggcccctttctgggggttccccatcagccctcatttcttataataccctgatcccagactccaaagccctggtcctttcctgatgtctcctcccttgtcttattgtccccctaccctaaatgcccccctgccataacttggggagggcagttttgtaaaataggagactccctttaagaaagaatgctgtcctagatgtacttgggcatctcatccttcattattctctgcattccttccggggggagcctgtcctcagaggggacaacctgtgacaccctgagtccaaacccttgtgcctcccagttcttccaagtgtctaactagtcttcgctgcagcgtcagccaaagctggcccctgaaccactgtgtgcccatttcctagggaaggggaaggagaataaacagaatatttattacaaatgttagaatatatttcttatactaggaatctcatttgcatttgcatagactatacacatggggtggaaaggccaggcctgcccccatctcgttggtgtggctctgcgtatactacacactcattctcctgctcctcttttcccttagtcagtgtcctttcatcctgattcagctctgccttgcatcaccctcagcctaagggagtgggaaggaaatggggtgttttcttgctgacctgaggctatagggtcacttgccatttcctaccttctctgggggatttgagggtagaggcaggggaagatctgttgttgcagctgcttctgcccccttgatccaaatgaccatcatctctgatggagatgggttgggtacctggccttcatggcaccttcactgctagggatgctcaaggggcaggcctggggcccttccctcctgtctcttctcggtctttcctctctgagcagcctcctacctcccctgcctgagccctcactccacagccctcccaggtacctagcagaggctgtcagtccttggctcacctggaacagggctggggctgggttggaacaggtgtgtgcccccaccacagctctatgactctgttctccctccctgccattgtggactcttgtatttgagggacctcaagagagtgaggaccctaccatccactgtccatattcagtcccagccccagtgcgcttcctctgttccctccctcagccatccaattcttgagttttctcactgattggttttctttctttttccttggattaaatgtgaaagc

SEQ ID NO: 152786 - DNA, 841 bp, Homo sapiens
  Payload ID: 10051
  Gene Symbol: MPP2
  Gene Name: membrane protein, palmitoylated 2 (MAGUK p55 subfamily member 2)
  ENST ID: ENST00000473246
  CDS Start-End: 284-841
gcgacctggtgccactcctcagggaatgtctgagtggaggctgcagtaccctgatggtggcctcttgggcacaagatctcagaggaatggggtcaccggagcggagctgagtccttcccttctgcccacacttttccctgtgtgcaaatgtgccctcatttttcctttctggggaactgagttccaagatgcctgacttgcttcctgggcatcatccccttcattaagaggaagaactcatgggagatgggggaggggaagaagctgctgtgaggcgagggccatgcagcaagtcctggacaacttgggatccctccccagtgccacgggggctgcagagctggacctgatcttccttcgaggcattatggaaagtcccatagtaagatccctggccaaggcccatgagaggctggaggagacgaagctggaggccgtgagagacaacaacctggagctggtgcaggagatcctgcgggacctggcgcagctggctgagcagagcagcacagccgccgagctggcccacatcctccaggagccccacttccagtccctcctggagacgcacgactctgtggcctcaaagacctatgagacaccaccccccagccctggcctggaccctacattcagcaaccagcctgtacctcccgatgctgtgcgcatggtgggcatccgcaagacagccggagaacatctgggtgtaacgttccgcgtggagggcggcgagctggtgatcgcgcgcattctgcatgggggcatggtggctcaacaaggcctgctgcatgtgggtgacatcatcaaggaggtgaacgggcagccagtgggcagtgacccc

SEQ ID NO: 152787 - DNA, 4242 bp, Homo sapiens
  Payload ID: 10051
  Gene Symbol: MPP2
  Gene Name: membrane protein, palmitoylated 2 (MAGUK p55 subfamily member 2)
  ENST ID: ENST00000622681
  CDS Start-End: 173-1798
ttctgcaaggcctttattagagagatacttgttgaccgacgaatgcagtggggcagccgctaagaataatgagttgggctccacctccccaggtgggccagaatctgagatcccagactgtcctgaggatcctaaatggaatggaagatttgatgtgggtcgctatggagccatgcagcaagtcctggacaacttgggatccctccccagtgccacgggggctgcagagctggacctgatcttccttcgaggcattatggaaagtcccatagtaagatccctggccaaggcccatgagaggctggaggagacgaagctggaggccgtgagagacaacaacctggagctggtgcaggagatcctgcgggacctggcgcagctggctgagcagagcagcacagccgccgagctggcccacatcctccaggagccccacttccagtccctcctggagacgcacgactctgtggcctcaaagacctatgagacaccaccccccagccctggcctggaccctacattcagcaaccagcctgtacctcccgatgctgtgcgcatggtgggcatccgcaagacagccggagaacatctgggtgtaacgttccgcgtggagggcggcgagctggtgatcgcgcgcattctgcatgggggcatggtggctcaacaaggcctgctgcatgtgggtgacatcatcaaggaggtgaacgggcagccagtgggcagtgacccccgcgcactgcaggagctcctgcgcaatgccagtggcagtgtcatcctcaagatcctgcccagctaccaggagccccatctgccccgccaggtatttgtgaaatgtcactttgactatgacccggcccgagacagcctcatcccctgcaaggaagcaggcctgcgcttcaacgccggggacttgctccagatcgtaaaccaggatgatgccaactggtggcaggcatgccatgtcgaagggggcagtgctgggctcattcccagccagctgctggaggagaagcggaaagcatttgtcaagagggacctggagctgacaccaaactcagggaccctatgcggcagcctttcaggaaagaaaaagaagcgaatgatgtatttgaccaccaagaatgcagagtttgaccgtcatgagctgctcatttatgaggaggtggcccgcatgcccccgttccgccggaaaaccctggtactgattggggctcagggcgtgggacggcgcagcctgaagaacaagctcatcatgtgggatccagatcgctatggcaccacggtgccctacacctcccggcggccgaaagactcagagcgggaaggtcagggttacagctttgtgtcccgtggggagatggaggctgacgtccgtgctgggcgctacctggagcatggcgaatacgagggcaacctgtatggcacacgtattgactccatccggggcgtggtcgctgctgggaaggtgtgcgtgctggatgtcaacccccaggcggtgaaggtgctacgaacggccgagtttgtcccttacgtggtgttcatcgaggccccagacttcgagaccctgcgggccatgaacagggctgcgctggagagtggaatatccaccaagcagctcacggaggcggacctgagacggacagtggaggagagcagccgcatccagcggggctacgggcactactttgacctctgcctggtcaatagcaacctggagaggaccttccgcgagctccagacagccatggagaagctacggacagagccccagtgggtgcctgtcagctgggtgtactgagcctgttcacctggtctttggctcactctgtgttgaaacccagaacctgaatccatccccctcctgacctgtgaccccctgccacaatccttagcccccatatctggctgtccttgggtaacagctcccagcaggccctaagtctggcttcagcacagaggcgtgcactgccagggaggtgggcattcatggggtaccttgtgcccaggtgctgcccactcctgatgcccattggtcaccagatatctctgagggccaagctatgcccaggaatgtgtcagagtcacctccataatggtcagtacagagaagagaaaagctgctttgggaccacatggtcagtaggcacactgccccctgccacccctccccagtcaccagttctcctctggactggccacacccaccccattcctggactcctcccacctctcacccctgtgtcggaggaacaggccttgggctgtttccgtgtgaccaggggaatgtgtggcccgctggcagccaggcaggcccgggtggtggtgccagcctggtgccatcttgaaggctggaggagtcagagtgagagctagtggccacagctgcagagcactgcagctcccagctcctttggaaagggacagggtcgcagggcagatgctgctcggtccttccctcatccacagcttctcactgccgaagtttctccagatttctccaatgtgtcctgacaggtcagccctgctccccacagggccaggctggcaggggccagtgggctcagcccaggtaggggcaggatggagggctgagccctgtgacaacctgctgttaccaactgaagagccccaagctctccatggcccacagcaggcacaggtctgagctctatgtccttgaccttggtccatttggttttctgtctagccaggtccaggtagcccacttgcatcagggctgctgggttggaggggctaaggaggagtgcagaggggaccttgggagcctgggcttgaaggacagttgccctccaggaggttcctcacacacaactccagaggcgccatttacactgtagtctgtacaacctgtggttccacgtgcatgttcggcacctgtctgtgcctctggcaccaggttgtgtgtatgtgtgtgcgtgtgcacgtgcgtgtgtgtgtgtgtgtgtcaggtttaatttggggaggaagcaaagggttttgttttggaggtcactctttggggcccctttctgggggttccccatcagccctcatttcttataataccctgatcccagactccaaagccctggtcctttcctgatgtctcctcccttgtcttattgtccccctaccctaaatgcccccctgccataacttggggagggcagttttgtaaaataggagactccctttaagaaagaatgctgtcctagatgtacttgggcatctcatccttcattattctctgcattccttccggggggagcctgtcctcagaggggacaacctgtgacaccctgagtccaaacccttgtgcctcccagttcttccaagtgtctaactagtcttcgctgcagcgtcagccaaagctggcccctgaaccactgtgtgcccatttcctagggaaggggaaggagaataaacagaatatttattacaaatgttagaatatatttcttatactaggaatctcatttgcatttgcatagactatacacatggggtggaaaggccaggcctgcccccatctcgttggtgtggctctgcgtatactacacactcattctcctgctcctcttttcccttagtcagtgtcctttcatcctgattcagctctgccttgcatcaccctcagcctaagggagtgggaaggaaatggggtgttttcttgctgacctgaggctatagggtcacttgccatttcctaccttctctgggggatttgagggtagaggcaggggaagatctgttgttgcagctgcttctgcccccttgatccaaatgaccatcatctctgatggagatgggttgggtacctggccttcatggcaccttcactgctagggatgctcaaggggcaggcctggggcccttccctcctgtctcttctcggtctttcctctctgagcagcctcctacctcccctgcctgagccctcactccacagccctcccaggtacctagcagaggctgtcagtccttggctcacctggaacagggctggggctgggttggaacaggtgtgtgcccccaccacagctctatgactctgttctccctccctgccattgtggactcttgtatttgagggacctcaagagagtgaggaccctaccatccactgtccatattcagtcccagccccagtgcgcttcctctgttccctccctcagccatccaattcttgagttttctcactgattggttttctttctttttccttggattaaatgtgaaagc

SEQ ID NO: 152788 - DNA, 592 bp, Homo sapiens
  Payload ID: 10051
  Gene Symbol: MPP2
  Gene Name: membrane protein, palmitoylated 2 (MAGUK p55 subfamily member 2)
  ENST ID: ENST00000524294
  CDS Start-End: 256-592
agcacatgcccaggaaggcaaagggaagaagggtggggggtaaccccctgccctctcctgggagaacgagggagccactcctagcctggggaggccctggaatggaaactggggctgtagactccatgcttggttctgcccagagcacttggtctccttgtgccagctctgagctaagaaagggagagaggagagagagccagccagaggggccgtggagaggagagacgtttcagagcccttgcctccttcaccatgccggttgccgccaccaactctgaaactgccatgcagcaagtcctggacaacttgggatccctccccagtgccacgggggctgcagagctggacctgatcttccttcgaggcattatggaaagtcccatagtaagatccctggccaaggcccatgagaggctggaggagacgaagctggaggccgtgagagacaacaacctggagctggtgcaggagatcctgcgggacctggcgcagctggctgagcagagcagcacagccgccgagctggcccacatcctccaggagccccacttccagtccctcctggagacgcacgactctgtggcctcaa

SEQ ID NO: 152789 - DNA, 4668 bp, Homo sapiens
  Payload ID: 10051
  Gene Symbol: MPP2
  Gene Name: membrane protein, palmitoylated 2 (MAGUK p55 subfamily member 2)
  ENST ID: ENST00000625880
  CDS Start-End: 503-2224
ttctttttctcaatatggaagcaggataacgaggaaaagtgaggcacgcctggaactagaacgccggtctaagccaagatgggtgggcggagtaatcaagccggtctcattaggcacttttaccatcgcccctttaagggatccttgggagccgaggggcaccagcgggtactggtaccagtcctgcctccctaacccttcccagtgggactccagcagggcgtcgtggtctgtgcggtgtctcccaaaccactacctggctgcccccgtaccagctgctgggaaagactacttcctccgagttgtgccggcctccgcgttctcctcacctcccctctcctccggacctccgccccctcgcggagaggccttgccgctttaagagccgggctagcgattgacaagcaataaacgctgagcgcccggctgcgctggagccgcccggagctaggggcttcccggggcgcaggagagacgtttcagagcccttgcctccttcaccatgccggttgccgccaccaactctgaaactgccatgcagcaagtcctggacaacttgggatccctccccagtgccacgggggctgcagagctggacctgatcttccttcgaggcattatggaaagtcccatagtaagatccctggccaaggtacagtgctccagggaggtgggcacaagggcactcccccacctgttctgcttccacccccaggcccatgagaggctggaggagacgaagctggaggccgtgagagacaacaacctggagctggtgcaggagatcctgcgggacctggcgcagctggctgagcagagcagcacagccgccgagctggcccacatcctccaggagccccacttccagtccctcctggagacgcacgactctgtggcctcaaagacctatgagacaccaccccccagccctggcctggaccctacattcagcaaccagcctgtacctcccgatgctgtgcgcatggtgggcatccgcaagacagccggagaacatctgggtgtaacgttccgcgtggagggcggcgagctggtgatcgcgcgcattctgcatgggggcatggtggctcaacaaggcctgctgcatgtgggtgacatcatcaaggaggtgaacgggcagccagtgggcagtgacccccgcgcactgcaggagctcctgcgcaatgccagtggcagtgtcatcctcaagatcctgcccagctaccaggagccccatctgccccgccaggtatttgtgaaatgtcactttgactatgacccggcccgagacagcctcatcccctgcaaggaagcaggcctgcgcttcaacgccggggacttgctccagatcgtaaaccaggatgatgccaactggtggcaggcatgccatgtcgaagggggcagtgctgggctcattcccagccagctgctggaggagaagcggaaagcatttgtcaagagggacctggagctgacaccaaactcagggaccctatgcggcagcctttcaggaaagaaaaagaagcgaatgatgtatttgaccaccaagaatgcagagtttgaccgtcatgagctgctcatttatgaggaggtggcccgcatgcccccgttccgccggaaaaccctggtactgattggggctcagggcgtgggacggcgcagcctgaagaacaagctcatcatgtgggatccagatcgctatggcaccacggtgccctacacctcccggcggccgaaagactcagagcgggaaggtcagggttacagctttgtgtcccgtggggagatggaggctgacgtccgtgctgggcgctacctggagcatggcgaatacgagggcaacctgtatggcacacgtattgactccatccggggcgtggtcgctgctgggaaggtgtgcgtgctggatgtcaacccccaggcggtgaaggtgctacgaacggccgagtttgtcccttacgtggtgttcatcgaggccccagacttcgagaccctgcgggccatgaacagggctgcgctggagagtggaatatccaccaagcagctcacggaggcggacctgagacggacagtggaggagagcagccgcatccagcggggctacgggcactactttgacctctgcctggtcaatagcaacctggagaggaccttccgcgagctccagacagccatggagaagctacggacagagccccagtgggtgcctgtcagctgggtgtactgagcctgttcacctggtctttggctcactctgtgttgaaacccagaacctgaatccatccccctcctgacctgtgaccccctgccacaatccttagcccccatatctggctgtccttgggtaacagctcccagcaggccctaagtctggcttcagcacagaggcgtgcactgccagggaggtgggcattcatggggtaccttgtgcccaggtgctgcccactcctgatgcccattggtcaccagatatctctgagggccaagctatgcccaggaatgtgtcagagtcacctccataatggtcagtacagagaagagaaaagctgctttgggaccacatggtcagtaggcacactgccccctgccacccctccccagtcaccagttctcctctggactggccacacccaccccattcctggactcctcccacctctcacccctgtgtcggaggaacaggccttgggctgtttccgtgtgaccaggggaatgtgtggcccgctggcagccaggcaggcccgggtggtggtgccagcctggtgccatcttgaaggctggaggagtcagagtgagagctagtggccacagctgcagagcactgcagctcccagctcctttggaaagggacagggtcgcagggcagatgctgctcggtccttccctcatccacagcttctcactgccgaagtttctccagatttctccaatgtgtcctgacaggtcagccctgctccccacagggccaggctggcaggggccagtgggctcagcccaggtaggggcaggatggagggctgagccctgtgacaacctgctgttaccaactgaagagccccaagctctccatggcccacagcaggcacaggtctgagctctatgtccttgaccttggtccatttggttttctgtctagccaggtccaggtagcccacttgcatcagggctgctgggttggaggggctaaggaggagtgcagaggggaccttgggagcctgggcttgaaggacagttgccctccaggaggttcctcacacacaactccagaggcgccatttacactgtagtctgtacaacctgtggttccacgtgcatgttcggcacctgtctgtgcctctggcaccaggttgtgtgtatgtgtgtgcgtgtgcacgtgcgtgtgtgtgtgtgtgtgtcaggtttaatttggggaggaagcaaagggttttgttttggaggtcactctttggggcccctttctgggggttccccatcagccctcatttcttataataccctgatcccagactccaaagccctggtcctttcctgatgtctcctcccttgtcttattgtccccctaccctaaatgcccccctgccataacttggggagggcagttttgtaaaataggagactccctttaagaaagaatgctgtcctagatgtacttgggcatctcatccttcattattctctgcattccttccggggggagcctgtcctcagaggggacaacctgtgacaccctgagtccaaacccttgtgcctcccagttcttccaagtgtctaactagtcttcgctgcagcgtcagccaaagctggcccctgaaccactgtgtgcccatttcctagggaaggggaaggagaataaacagaatatttattacaaatgttagaatatatttcttatactaggaatctcatttgcatttgcatagactatacacatggggtggaaaggccaggcctgcccccatctcgttggtgtggctctgcgtatactacacactcattctcctgctcctcttttcccttagtcagtgtcctttcatcctgattcagctctgccttgcatcaccctcagcctaagggagtgggaaggaaatggggtgttttcttgctgacctgaggctatagggtcacttgccatttcctaccttctctgggggatttgagggtagaggcaggggaagatctgttgttgcagctgcttctgcccccttgatccaaatgaccatcatctctgatggagatgggttgggtacctggccttcatggcaccttcactgctagggatgctcaaggggcaggcctggggcccttccctcctgtctcttctcggtctttcctctctgagcagcctcctacctcccctgcctgagccctcactccacagccctcccaggtacctagcagaggctgtcagtccttggctcacctggaacagggctggggctgggttggaacaggtgtgtgcccccaccacagctctatgactctgttctccctccctgccattgtggactcttgtatttgagggacctcaagagagtgaggaccctaccatccactgtccatattcagtcccagccccagtgcgcttcctctgttccctccctcagccatccaattcttgagttttctcactgattggttttctttctttttccttggattaaatgtgaaagc

SEQ ID NO: 152790 - DNA, 2182 bp, Homo sapiens
  Payload ID: 10052
  Gene Symbol: MPP3
  Gene Name: membrane protein, palmitoylated 3 (MAGUK p55 subfamily member 3)
  Uniprot ID: Q13368
  ENST ID: ENST00000398389
  CDS Start-End: 167-1924
ccagcggcggcccaggctctgggcactcgcgcggctcccgttcgcggagcacacatcccggcgcgacgaggttccttcggagagcgagcgggagtcggtgctcggcctcctgcggggagcagcccgaggaatctgcagggagaggtcgggaggtgacaacgccagcatgccagtgctatcggaggactctggtttgcatgaaaccctggccctgctgacctcccagctcagacctgactccaaccacaaggaggagatgggcttcctgagggatgttttcagtgaaaaaagcctcagttacttaatgaagattcatgagaagcttcgctattatgaaaggcaaagtccaaccccagttctgcacagcgctgtggccctcgctgaggacgtgatggaggagttgcaggccgcctccgtgcacagtgatgagagggagctgctccagctgctgtccaccccgcacctgagggctgtgctcatggtacatgacacggttgcccagaagaattttgaccccgttctcccgcctctgcctgacaatatcgatgaggattttgatgaggaatcggtgaagatcgtccgcttggtgaagaacaaggaacccctgggtgccaccatccggcgggacgagcactcaggggctgttgtggtggccaggatcatgcgaggaggcgcagcagacaggagcggcctggtccacgttggagatgagctccgagaagtgaacgggatcgcagtcctgcacaagcggcccgacgagatcagccagattctggcccagtcccagggatccatcaccctaaaaatcatcccagccacccaggaggaagatcgcttaaaggagagcaaggtgttcatgcgcgccctcttccactacaaccctcgggaggaccgggccatcccttgccaggaggcgggcctgcccttccagcgcaggcaggtcctggaggtggtgagccaggacgaccccacgtggtggcaggccaagcgagtcggggacaccaaccttcgagccggcctcatcccctccaaggggttccaggagagacgactaagctaccggagagccgcgggcaccctgccgagcccccagagcctcaggaagcccccctatgatcagccttgtgacaaagagacctgtgactgtgagggctacctcaaagggcactatgtggctggtcttcggaggagcttccggctgggctgtagggagagactgggtggctcgcaggaaggaaagatgtcctccggagctgagtctccggagctgctgacttacgaagaggtggccaggtaccaacaccagcccggagagcggccccgcctggtggttctgatcgggtctctgggagcccgactgcacgagctgaagcaaaaggtggtggctgagaacccacagcactttggcgtcgctgttccacataccaccaggccccgaaagagccatgagaaggaaggagtggaatatcactttgtgtctaagcaagcatttgaggccgacttacatcacaacaagttcctggaacatggtgaatataaggaaaatctgtatggaaccagcctggaggccattcaggctgttatggccaaaaacaaagtttgtttggtggatgtggagccagaagcactgaaacaactgaggacctcagaatttaaaccctatattatatttgtaaagcctgcaattcaggaaaaaagaaaaacgccacctatgtccccagcttgtgaggacacagcagccccatttgatgagcagcagcaagagatggccgcttctgccgccttcatagaccggcattacgggcacctggtagacgccgtgctggtgaaggaggatctccagggtgcctacagccagctcaaagtggtcttagagaagctgagcaaggacactcactgggtacctgttagttgggtcaggtaactttatcccagaacatccaagctggacgggaccttgaagatcatctagtccagactccctcattttaccatcaaggaatctcaagcgcagagagggagagaattctccacaaattccatcatcgagaagagtataagtgggaagtcttgtttgttgttggtttttgtctgttgtttttcactgcacctctttggatcatgatttgaaaggggcatatcagaaaacaacacatttcatttattaaagtatcacaggcaa

SEQ ID NO: 152791 - DNA, 2996 bp, Homo sapiens
  Payload ID: 10052
  Gene Symbol: MPP3
  Gene Name: membrane protein, palmitoylated 3 (MAGUK p55 subfamily member 3)
  ENST ID: ENST00000398393
  CDS Start-End: 262-2094
agcttccacgccgctgtttcttcatcaataaaatgggaacattcgcagtcatttctcaggactttgtgcagacaaaaagtttatcatagaaatcaccccacacaatgcttggcacatcgaggacactcagcacatcttagctttatttccttcctctctgaaaaaagtaagcagagttatttgttcccatcctctctgtccacagcctggtctcagagaacacagtagatgtgtagtcagtttgttcaataaatatgcttgatggagcttcaatacccacctccacccccttctcccagaatctgcagggagaggtcgggaggtgacaacgccagcatgccagtgctatcggaggactctggtttgcatgaaaccctggccctgctgacctcccagctcagacctgactccaaccacaaggaggagatgggcttcctgagggatgttttcagtgaaaaaagcctcagttacttaatgaagattcatgagaagcttcgctattatgaaaggcaaagtccaaccccagttctgcacagcgctgtggccctcgctgaggacgtgatggaggagttgcaggccgcctccgtgcacagtgatgagagggagctgctccagctgctgtccaccccgcacctgagggctgtgctcatggtacatgacacggttgcccagaagaattttgaccccgttctcccgcctctgcctgacaatatcgatgaggattttgatgaggaatcggtgaagatcgtccgcttggtgaagaacaaggaacccctgggtgccaccatccggcgggacgagcactcaggggctgttgtggtggccaggatcatgcgaggaggcgcagcagacaggagcggcctggtccacgttggagatgagctccgagaagtgaacgggatcgcagtcctgcacaagcggcccgacgagatcagccagattctggcccagtcccagggatccatcaccctaaaaatcatcccagccacccaggaggaagatcgcttaaaggagagcaaggtgttcatgcgcgccctcttccactacaaccctcgggaggaccgggccatcccttgccaggaggcgggcctgcccttccagcgcaggcaggtcctggaggtggtgagccaggacgaccccacgtggtggcaggccaagcgagtcggggacaccaaccttcgagccggcctcatcccctccaaggggttccaggagagacgactaagctaccggagagccgcgggcaccctgccgagcccccagagcctcaggaagcccccctatgatcagccttgtgacaaagagacctgtgactgtgagggctacctcaaagggcactatgtggctggtcttcggaggagcttccggctgggctgtagggagagactgggtggctcgcaggaaggaaagatgtcctccggagctgagtctccggagctgctgacttacgaagaggtggccaggtaccaacaccagcccggagagcggccccgcctggtggttctgatcgggtctctgggagcccgactgcacgagctgaagcaaaaggtggtggctgagaacccacagcactttggcgtcgctgttccacataccaccaggccccgaaagagccatgagaaggaaggagtggaatatcactttgtgtctaagcaagcatttgaggccgacttacatcacaacaagttcctggaacatggtgaatataaggaaaatctgtatggaaccagcctggaggccattcaggctgttatggccaaaaacaaagtttgtttggtggatgtggagccagaagcactgaaacaactgaggacctcagaatttaaaccctatattatatttgtaaagcctgcaattcaggaaaaaagaaaaacgccacctatgtccccagcttgtgaggacacagcagccccatttgatgagcagcagcaagagatggccgcttctgccgccttcatagaccggcattacgggcacctggtagacgccgtgctggtgaaggaggatctccagggtgcctacagccagctcaaagtggtcttagagaagctgagcaaggacactcactgggtacctgttagttgggtcaggtaactttatcccagaacatccaagctggacgggaccttgaagatcatctagtccagactccctcattttaccatcaaggaatctcaagcgcagagagggagagaattctccacaaattccatcatcgagaagagtataagtgggaagtcttgtttgttgttggtttttgtctgttgtttttcactgcacctctttggatcatgatttgaaaggggcatatcagaaaacaacacatttcatttattaaagtatcacaggcaagctgaccctgattctttgtaccaaagttaagtagccactgtcttttgtgggtggtagtggttaatttatacagtactgattcgcagaatgtttaagctttttaaacatagtgacgcttagtagtttttttggaagctaacttgttttatccaaggggattttacatgtaactgaagttcccctgtcttcaagcactaaaacgttgatcttaaccttttttttgaagtgcttgcctggtaatagaaaacgggttctctgcctattttaaaatagtgaatatacgtaaattttctctggaaggctgaggcacacttcaccatcaacatgaattactgtactatcctgtactgcagtggtgccttcagggactcgaggaatgtaaggttgcctttcccctttctaaataccctcagattcctaacatcgagcccatgctttgtttgatttgttctattccatccattgtcccttttgttactgacagttgccttggtcctagccagtccctgccatgagatcataggggttcccattgtgctagatcttgggaaaccagatgactctccctgtcaaaactatggctacgtcactgtaaaccatttctgtcaagaataaaagtatgtagacccagagtgtgggcctaa

SEQ ID NO: 152792 - DNA, 2186 bp, Homo sapiens
  Payload ID: 10052
  Gene Symbol: MPP3
  Gene Name: membrane protein, palmitoylated 3 (MAGUK p55 subfamily member 3)
  ENST ID: ENST00000496503
  CDS Start-End: 167-1114
ccagcggcggcccaggctctgggcactcgcgcggctcccgttcgcggagcacacatcccggcgcgacgaggttccttcggagagcgagcgggagtcggtgctcggcctcctgcggggagcagcccgaggaatctgcagggagaggtcgggaggtgacaacgccagcatgccagtgctatcggaggactctggtttgcatgaaaccctggccctgctgacctcccagctcagacctgactccaaccacaaggaggagatgggcttcctgagggatgttttcagtgaaaaaagcctcagttacttaatgaagattcatgagaagcttcgctattatgaaaggcaaagtccaaccccagttctgcacagcgctgtggccctcgctgaggacgtgatggaggagttgcaggccgcctccgtgcacagtgatgagagggagctgctccagctgctgtccaccccgcacctgagggctgtgctcatggtacatgacacggttgcccagaagaattttgaccccgttctcccgcctctgcctgacaatatcgatgaggattttgatgaggaatcggtgaagatcgtccgcttggtgaagaacaaggaacccctgggtgccaccatccggcgggacgagcactcaggggctgttgtggtggccaggatcatgcgaggaggcgcagcagacaggagcggcctggtccacgttggagatgagctccgagaagtgaacgggatcgcagtcctgcacaagcggcccgacgagatcagccagattctggcccagtcccagggatccatcaccctaaaaatcatcccagccacccaggaggaagatcgcttaaaggagagcaaggtgttcatgcgcgccctcttccactacaaccctcgggaggaccgggccatcccttgccaggaggcgggcctgcccttccagcgcaggcaggtcctggaggtggtgagccaggacgaccccacgtggtggcaggccaagcgagtcggggacaccaaccttcgagccggcctcatcccctccaaggggttccaggagagacgactaagctaccggagagccgcgggcaccctgccgagcccccagagcctcaggaagcccccctagacctgtgactgtgagggctacctcaaagggcactatgtggctggtcttcggaggagcttccggctgggctgtagggagagactgggtggctcgcaggaaggaaagatgtcctccggagctgagtctccggagctgctgacttacgaagaggtggccaggtaccaacaccagcccggagagcggccccgcctggtggttctgatcgggtctctgggagcccgactgcacgagctgaagcaaaaggtggtggctgagaacccacagcactttggcgtcgctgttccacataccaccaggccccgaaagagccatgagaaggaaggagtggaatatcactttgtgtctaagcaagcatttgaggccgacttacatcacaacaagttcctggaacatggtgaatataaggaaaatctgtatggaaccagcctggaggccattcaggctgttatggccaaaaacaaagtttgtttggtggatgtggagccagaagcactgaaacaactgaggacctcagaatttaaaccctatattatatttgtaaagcctgcaattcaggaaaaaagaaaaacgccacctatgtccccagcttgtgaggacacagcagccccatttgatgagcagcagcaagagatggccgcttctgccgccttcatagaccggcattacgggcacctggtagacgccgtgctggtgaaggaggatctccagggtgcctacagccagctcaaagtggtcttagagaagctgagcaaggacactcactgggtacctgttagttgggtcaggtaactttatcccagaacatccaagctggacgggaccttgaagatcatctagtccagactccctcattttaccatcaaggaatctcaagcgcagagagggagagaattctccacaaattccatcatcgagaagagtataagtgggaagtcttgtttgttgttggtttttgtctgttgtttttcactgcacctctttggatcatgatttgaaaggggcatatcagaaaacaacacatttcatttattaaagtatcacaggcaagctgaccctgattctttgtaccaaa

SEQ ID NO: 152793 - DNA, 488 bp, Homo sapiens
  Payload ID: 10052
  Gene Symbol: MPP3
  Gene Name: membrane protein, palmitoylated 3 (MAGUK p55 subfamily member 3)
  ENST ID: ENST00000479797
  CDS Start-End: 1-63
ggggacaccaaccttcgagccggcctcatcccctccaaggggttccaggagaggcgattctgagatgccgaagtctgagaacgaagctctgtctcctcgggaaccccagacccatctccattttagggttcacagacgactaagctaccggagagccgcgggcaccctgccgagcccccagagcctcaggaagcccccctagacctgtgactgtgagggctacctcaaagggcactatgtggctggtcttcggaggagcttccggctgggctgtagggagagactgggtggctcgcaggaaggaaagatgtcctccggagctgagtctccggagctgctgacttacgaagaggtggccaggtaccaacaccagcccggagagcggccccgcctggtggttctgatcgggtctctgggagcccgactgcacgagctgaagcaaaaggtggtggctgagaacccacagcactttggcgtcgctgttccac

SEQ ID NO: 152794 - DNA, 2330 bp, Homo sapiens
  Payload ID: 10053
  Gene Symbol: MPP4
  Gene Name: membrane protein, palmitoylated 4 (MAGUK p55 subfamily member 4)
  Uniprot ID: Q96JB8
  ENST ID: ENST00000315506
  CDS Start-End: 209-1990
gagattttatcgggagcagtgaggtgactttggcagctaacaggccactagtatcctactaaagcttttgtctggataggagcaacatgcatgtttacagtcttgcagtgtgctgagagctggtggccagtgggactgagtgagctgtgtgccgtgtattgacccgcttcctagtcctgaattcctttcagaagctccggcagggaggatgatacagtcagacaaaggagcagatccaccagacaagaaggacatgaagctttctacagccaccaatccacagaatggcctctcccagatcctgaggcttgtgctgcaagagctgagtctgttctacggcagagatgtgaatggagtgtgtctcttgtacgatctcctccactcgccgtggcttcaggctctgctaaagatttatgactgcctccaggaatttaaagaaaagaaactagttcctgccacaccacatgcacaggtgttatcctatgaggtagtggagttattacgtgaaacccctacttcccctgagatccaagagctgagacaaatgctccaggctccacacttcaaggccttgctcagtgcccatgacacgatagctcagaaagattttgaaccccttctccctccactgccagacaatatccctgagagtgaggaagcaatgaggattgtttgtttagtgaaaaaccaacagcccctgggagccaccatcaagcgccacgagatgacaggggacatcttggtggccaggatcatccacggtgggctggcggagagaagtgggttgctatatgctggagacaaactggtagaagtgaatggagtttcagttgagggactggaccctgaacaagtgatccatattctggccatgtctcgaggcacaatcatgttcaaggtggttccagtctctgaccctcctgtgaatagccagcagatggatcccgacatcccctgcatggacgctggattgcctttccagaagggggacatcctccagattgtggaccagaatgatgccctctggtggcaggcccgaaaaatctcagaccctgctacctgcgctgggcttgtcccttctaaccaccttctgaagaggaagcaacgggaattctggtggtctcagccgtaccagcctcacacctgcctcaagtcaaccctatacaaggaggagtttgttggctacggtcagaagttctttatagctggcttccgccgcagcatgcgcctttgtcgcaggaagtctcacctcagcccgctgcatgccagtgtgtgctgcaccggcagctgctacagtgcagtgggtgccccttacgaggaggtggtgaggtaccagcgacgcccttcagacaagtaccgcctcatagtgctcatgggaccctctggtgttggagtaaatgagctcagaagacaacttattgaatttaatcccagccattttcaaagtgctgtgccacacactactcgtactaaaaagagttacgaaatgaatgggcgtgagtatcactatgtgtccaaggaaacatttgaaaacctcatatatagtcacaggatgctggagtatggtgagtacaaaggccacctgtatggcactagtgtggatgctgttcaaacagtccttgtcgaaggaaagatctgtgtcatggacctagagcctcaggatattcaaggggttcgaacccatgaactgaagccctatgtcatatttataaagccatcgaatatgaggtgtatgaaacaatctcggaaaaatgccaaggttattactgactactatgtggacatgaagttcaaggatgaagacctacaagagatggaaaatttagcccaaagaatggaaactcagtttggccaattttttgatcatgtgattgtgaatgacagcttgcacgatgcatgtgcccagttgttgtctgccatacagaaggctcaggaggagcctcagtgggtaccagcaacatggatttcctcagatactgagtctcaatgagacttcttgtttaatgctggagttttaacactgtacccttgatacagcgatccatagttgcaatctaaaacaacagtatttgacccattttaatgtgtacaactttaaaagtgcagcaatttattaattaatcttatttgaaaaaaatttttattgtatggttatgtggttacctattttaacttaattttttttcctttacctcatatgcagctgtggtagaaatatgaataatgttaagtcactgagtatgagaacctttcgcagatttcacatgatctttttaagatttaaataaagagctttcctaaataaaataagcaatagttaactttagaaa

SEQ ID NO: 152795 - DNA, 2436 bp, Homo sapiens
  Payload ID: 10053
  Gene Symbol: MPP4
  Gene Name: membrane protein, palmitoylated 4 (MAGUK p55 subfamily member 4)
  ENST ID: ENST00000359962
  CDS Start-End: 209-2101
gagattttatcgggagcagtgaggtgactttggcagctaacaggccactagtatcctactaaagcttttgtctggataggagcaacatgcatgtttacagtcttgcagtgtgctgagagctggtggccagtgggactgagtgagctgtgtgccgtgtattgacccgcttcctagtcctgaattcctttcagaagctccggcagggaggatgatacagtcagacaaaggagcagatccaccagacaagaaggacatgaagctttctacagccaccaatccacagaatggcctctcccagatcctgaggcttgtgctgcaagagctgagtctgttctacggcagagatgtgaatggagtgtgtctcttgtacgatctcctccactcgccgtggcttcaggctctgctaaagatttatgactgcctccaggaatttaaagaaaagaaactagttcctgccacaccacatgcacaggtgttatcctatgaggtagtggagttattacgtgaaacccctacttcccctgagatccaagagctgagacaaatgctccaggctccacacttcaaggccttgctcagtgcccatgacacgatagctcagaaagattttgaaccccttctccctccactgccagacaatatccctgagagtgaggaagcaatgaggattgtttgtttagtgaaaaaccaacagcccctgggagccaccatcaagcgccacgagatgacaggggacatcttggtggccaggatcatccacggtgggctggcggagagaagtgggttgctatatgctggagacaaactggtagaagtgaatggagtttcagttgagggactggaccctgaacaagtgatccatattctggccatgtctcgaggcacaatcatgttcaaggtggttccagtctctgaccctcctgtgaatagccagcagatggtgtacgtccgtgccatgactgagtactggccccaggaggatcccgacatcccctgcatggacgctggattgcctttccagaagggggacatcctccagattgtggaccagaatgatgccctctggtggcaggcccgaaaaatctcagaccctgctacctgcgctgggcttgtcccttctaaccaccttctgaagaggaagcaacgggaattctggtggtctcagccgtaccagcctcacacctgcctcaagtcaaccctatcaatttctatggaagaagaagatgacatgaagattgatgagaaatgtgtggaagcagaggaactttcagaagacaaggaggagtttgttggctacggtcagaagttctttatagctggcttccgccgcagcatgcgcctttgtcgcaggaagtctcacctcagcccgctgcatgccagtgtgtgctgcaccggcagctgctacagtgcagtgggtgccccttacgaggaggtggtgaggtaccagcgacgcccttcagacaagtaccgcctcatagtgctcatgggaccctctggtgttggagtaaatgagctcagaagacaacttattgaatttaatcccagccattttcaaagtgctgtgccacacactactcgtactaaaaagagttacgaaatgaatgggcgtgagtatcactatgtgtccaaggaaacatttgaaaacctcatatatagtcacaggatgctggagtatggtgagtacaaaggccacctgtatggcactagtgtggatgctgttcaaacagtccttgtcgaaggaaagatctgtgtcatggacctagagcctcaggatattcaaggggttcgaacccatgaactgaagccctatgtcatatttataaagccatcgaatatgaggtgtatgaaacaatctcggaaaaatgccaaggttattactgactactatgtggacatgaagttcaaggatgaagacctacaagagatggaaaatttagcccaaagaatggaaactcagtttggccaattttttgatcatgtgattgtgaatgacagcttgcacgatgcatgtgcccagttgttgtctgccatacagaaggctcaggaggagcctcagtgggtaccagcaacatggatttcctcagatactgagtctcaatgagacttcttgtttaatgctggagttttaacactgtacccttgatacagcgatccatagttgcaatctaaaacaacagtatttgacccattttaatgtgtacaactttaaaagtgcagcaatttattaattaatcttatttgaaaaaaatttttattgtatggttatgtggttacctattttaacttaattttttttcctttacctcatatgcagctgtggtagaaatatgaataatgttaagtcactgagtatgagaacctttcgcagatttcacatgatctttttaagatttaaataaagagctttcctaaataaaataagcaatagttaacttt

SEQ ID NO: 152796 - DNA, 2250 bp, Homo sapiens
  Payload ID: 10053
  Gene Symbol: MPP4
  Gene Name: membrane protein, palmitoylated 4 (MAGUK p55 subfamily member 4)
  ENST ID: ENST00000396886
  CDS Start-End: 227-1915
agtccggaattgcatgtggtgggtgcttacttatttgcagtctcaatcaagaattctcactctcaagatagcagaaatagataagcttcaactgacaaatttggtacagaagtcatggaaaggaagtgtgctgagagctggtggccagtgggactgagtgagctgtgtgccgtgtattgacccgcttcctagtcctgaattcctttcagaagctccggcagggaggatgatacagtcagacaaaggagcagatccaccagacaagaaggacatgaagctttctacagccaccaatccacagaatggcctctcccagatcctgaggcttgtgctgcaagagctgagtctgttctacggcagagatgtgaatggagtgtgtctcttgtacgatctcctccactcgccgtggcttcaggctctgctaaagatttatgactgcctccaggaatttaaagaaaagaaactagttcctgccacaccacatgcacaggtgttatcctatgaggtagtggagttattacgtgaaacccctacttcccctgagatccaagagctgagacaaatgctccaggctccacacttcaagggagccaccatcaagcgccacgagatgacaggggacatcttggtggccaggatcatccacggtgggctggcggagagaagtgggttgctatatgctggagacaaactggtagaagtgaatggagtttcagttgagggactggaccctgaacaagtgatccatattctggccatgtctcgaggcacaatcatgttcaaggtggttccagtctctgaccctcctgtgaatagccagcagatggtgtacgtccgtgccatgactgagtactggccccaggaggatcccgacatcccctgcatggacgctggattgcctttccagaagggggacatcctccagattgtggaccagaatgatgccctctggtggcaggcccgaaaaatctcagaccctgctacctgcgctgggcttgtcccttctaaccaccttctgaagaggaagcaacgggaattctggtggtctcagccgtaccagcctcacacctgcctcaagtcaaccctatacaaggaggagtttgttggctacggtcagaagttctttatagctggcttccgccgcagcatgcgcctttgtcgcaggaagtctcacctcagcccgctgcatgccagtgtgtgctgcaccggcagctgctacagtgcagtgggtgccccttacgaggaggtggtgaggtaccagcgacgcccttcagacaagtaccgcctcatagtgctcatgggaccctctggtgttggagtaaatgagctcagaagacaacttattgaatttaatcccagccattttcaaagtgctgtgccacacactactcgtactaaaaagagttacgaaatgaatgggcgtgagtatcactatgtgtccaaggaaacatttgaaaacctcatatatagtcacaggatgctggagtatggtgagtacaaaggccacctgtatggcactagtgtggatgctgttcaaacagtccttgtcgaaggaaagatctgtgtcatggacctagagcctcaggatattcaaggggttcgaacccatgaactgaagccctatgtcatatttataaagccatcgaatatgaggtgtatgaaacaatctcggaaaaatgccaaggttattactgactactatgtggacatgaagttcaaggatgaagacctacaagagatggaaaatttagcccaaagaatggaaactcagtttggccaattttttgatcatgtgattgtgaatgacagcttgcacgatgcatgtgcccagttgttgtctgccatacagaaggctcaggaggagcctcagtgggtaccagcaacatggatttcctcagatactgagtctcaatgagacttcttgtttaatgctggagttttaacactgtacccttgatacagcgatccatagttgcaatctaaaacaacagtatttgacccattttaatgtgtacaactttaaaagtgcagcaatttattaattaatcttatttgaaaaaaatttttattgtatggttatgtggttacctattttaacttaattttttttcctttacctcatatgcagctgtggtagaaatatgaataatgttaagtcactgagtatgagaacctttcgcagatttcacatgatctttttaagatttaaataaagagctttcctaaataaaataagcaatagttaacttt

SEQ ID NO: 152797 - DNA, 1760 bp, Homo sapiens
  Payload ID: 10053
  Gene Symbol: MPP4
  Gene Name: membrane protein, palmitoylated 4 (MAGUK p55 subfamily member 4)
  ENST ID: ENST00000409818
  CDS Start-End: 62-1366
gactttggcagctaacaggccactagtatcctactaaagcttttgtctggataggagcaacatgcatgtttacagtcttgcagaagctccggcagggaggatgatacagtcagacaaaggagcagatccaccagacaagaaggacatgaagctttctacagccaccaatccacagaatggcctctcccagatcctgaggcttgtgctgcaagagctgagtctgttctacggcagagatgtgaatggagtgtgtctcttgtacgatctcctccactcgccgtggcttcaggctctgctaaagatttatgactgcctccaggaatttaaagaaaagaaactagttcctgccacaccacatgcacaggtgttatcctatgaggtagtggagttattacgtgaaacccctacttcccctgagatccaagagctgagacaaatgctccaggctccacacttcaaggccttgctcagtgcccatgacacgatagctcagaaagattttgaaccccttctccctccactgccagacaatatccctgagagtgaggaagcaatgaggattgtttgtttagtgaaaaaccaacagcccctgggagccaccatcaagcgccacgagatgacaggggacatcttggtggccaggatcatccacggtgggctggcggagagaagtgggttgctatatgctggagacaaactggtagaagtgaatggagtttcagttgagggactggaccctgaacaagtgatccatattctggccatgtctcgaggcacaatcatgttcaaggtggttccagtctctgaccctcctgtgaatagccagcagatggtgtacgtccgtgccatgactgagtactggccccaggaggatcccgacatcccctgcatggacgctggattgcctttccagaagggggacatcctccagattgtggaccagaatgatgccctctggtggcaggcccgaaaaatctcagaccctgctacctgcgctgggcttgtcccttctaaccaccttctgaagaggaagcaacgggaattctggtggtctcagccgtaccagcctcacacctgcctcaagtcaaccctatttctgggatacatgtgcagaacgtgcagcaatttctatggaagaagatggagtttcgctcttgttgcccaggctggagtgcaatggcactatctcgactcactgcaacctctgcctcccgggttcaaacgattctcctgcctcagcctcccacgtagctgggattatatagaagatgacatgaagattgatgagaaatgtgtggaagcagctcctgctgcacccctgactgtcatcatggctcaactgccgaataccatgtgtttcatgtaaagctgatatatgccatagagacaccatcgattcgaccttgatttaggaaaaaaactttacaaagatgaagaaacatttgaatctgaggaactttcagaagacaaggaggagtttgttggctacggtcagaagttctttatagctggcttccgccgcagcatgcgcctttgtcgcaggaagtctcacctcagcccgctgcatgccagtgtgtgctgcaccggcagctgctacagtgcagtgggtgccccttacgaggaggtggtgaggtaccagcgacgcccttcagacaagtaccgcctcatagtgctcatgggaccctctggtgttggagtaaatgagctcagaagacaacttattgaatttaatcccagccattttcaaagtgctgtgccac

SEQ ID NO: 152798 - DNA, 2462 bp, Homo sapiens
  Payload ID: 10053
  Gene Symbol: MPP4
  Gene Name: membrane protein, palmitoylated 4 (MAGUK p55 subfamily member 4)
  Uniprot ID: Q96JB8
  ENST ID: ENST00000409474
  CDS Start-End: 209-2122
gagattttatcgggagcagtgaggtgactttggcagctaacaggccactagtatcctactaaagcttttgtctggataggagcaacatgcatgtttacagtcttgcagtgtgctgagagctggtggccagtgggactgagtgagctgtgtgccgtgtattgacccgcttcctagtcctgaattcctttcagaagctccggcagggaggatgatacagtcagacaaaggagcagatccaccagacaagaaggacatgaagctttctacagccaccaatccacagaatggcctctcccagatcctgaggcttgtgctgcaagagctgagtctgttctacggcagagatgtgaatggagtgtgtctcttgtacgatctcctccactcgccgtggcttcaggctctgctaaagatttatgactgcctccaggaatttaaagaaaagaaactagttcctgccacaccacatgcacaggtgttatcctatgaggtagtggagttattacgtgaaacccctacttcccctgagatccaagagctgagacaaatgctccaggctccacacttcaaggccttgctcagtgcccatgacacgatagctcagaaagattttgaaccccttctccctccactgccagacaatatccctgagagtgaggaagcaatgaggattgtttgtttagtgaaaaaccaacagcccctgggagccaccatcaagcgccacgagatgacaggggacatcttggtggccaggatcatccacggtgggctggcggagagaagtgggttgctatatgctggagacaaactggtagaagtgaatggagtttcagttgagggactggaccctgaacaagtgatccatattctggccatgtctcgaggcacaatcatgttcaaggtggttccagtctctgaccctcctgtgaatagccagcagatggtgtacgtccgtgccatgactgagtactggccccaggaggatcccgacatcccctgcatggacgctggattgcctttccagaagggggacatcctccagattgtggaccagaatgatgccctctggtggcaggcccgaaaaatctcagaccctgctacctgcgctgggcttgtcccttctaaccaccttctgaagaggaagcaacgggaattctggtggtctcagccgtaccagcctcacacctgcctcaagtcaaccctatcaatttctatggaagaagaagatgacatgaagattgatgagaaatgtgtggaagcagatgaagaaacatttgaatctgaggaactttcagaagacaaggaggagtttgttggctacggtcagaagttctttatagctggcttccgccgcagcatgcgcctttgtcgcaggaagtctcacctcagcccgctgcatgccagtgtgtgctgcaccggcagctgctacagtgcagtgggtgccccttacgaggaggtggtgaggtaccagcgacgcccttcagacaagtaccgcctcatagtgctcatgggaccctctggtgttggagtaaatgagctcagaagacaacttattgaatttaatcccagccattttcaaagtgctgtgccacacactactcgtactaaaaagagttacgaaatgaatgggcgtgagtatcactatgtgtccaaggaaacatttgaaaacctcatatatagtcacaggatgctggagtatggtgagtacaaaggccacctgtatggcactagtgtggatgctgttcaaacagtccttgtcgaaggaaagatctgtgtcatggacctagagcctcaggatattcaaggggttcgaacccatgaactgaagccctatgtcatatttataaagccatcgaatatgaggtgtatgaaacaatctcggaaaaatgccaaggttattactgactactatgtggacatgaagttcaaggatgaagacctacaagagatggaaaatttagcccaaagaatggaaactcagtttggccaattttttgatcatgtgattgtgaatgacagcttgcacgatgcatgtgcccagttgttgtctgccatacagaaggctcaggaggagcctcagtgggtaccagcaacatggatttcctcagatactgagtctcaatgagacttcttgtttaatgctggagttttaacactgtacccttgatacagcgatccatagttgcaatctaaaacaacagtatttgacccattttaatgtgtacaactttaaaagtgcagcaatttattaattaatcttatttgaaaaaaatttttattgtatggttatgtggttacctattttaacttaattttttttcctttacctcatatgcagctgtggtagaaatatgaataatgttaagtcactgagtatgagaacctttcgcagatttcacatgatctttttaagatttaaataaagagctttcctaaataaaataagcaatagttaactttagaaa

SEQ ID NO: 152799 - DNA, 2082 bp, Homo sapiens
  Payload ID: 10053
  Gene Symbol: MPP4
  Gene Name: membrane protein, palmitoylated 4 (MAGUK p55 subfamily member 4)
  ENST ID: ENST00000409143
  CDS Start-End: 238-1977
tctgtgtactcagtccggaattgcatgtggtgggtgcttacttatttgcagtctcaatcaagaattctcactctcaagatagcagaaatagataagcttcaactgacaaatttggtacagaagtcatggaaaggaagtgtgctgagagctggtggccagtgggactgagtgagctgtgtgccgtgtattgacccgcttcctagtcctgaattcctttcagaagctccggcagggaggatgatacagtcagacaaaggagcagatccaccagacaagaaggacatgaagctttctacagccaccaatccacagaatggcctctcccagatcctgaggcttgtgctgcaagagctgagtctgttctacggcagagatgtgaatggagtgtgtctcttgtacgatctcctccactcgccgtggcttcaggctctgctaaagatttatgactgcctccaggaatttaaagaaaagaaactagttcctgccacaccacatgcacaggtgttatcctatgaggccttgctcagtgcccatgacacgatagctcagaaagattttgaaccccttctccctccactgccagacaatatccctgagagtgaggaagcaatgaggattgtttgtttagtgaaaaaccaacagcccctgggagccaccatcaagcgccacgagatgacaggggacatcttggtggccaggatcatccacggtgggctggcggagagaagtgggttgctatatgctggagacaaactggtagaagtgaatggagtttcagttgagggactggaccctgaacaagtgatccatattctggccatgtctcgaggcacaatcatgttcaaggtggttccagtctctgaccctcctgtgaatagccagcagatggtgtacgtccgtgccatgactgagtactggccccaggaggatcccgacatcccctgcatggacgctggattgcctttccagaagggggacatcctccagattgtggaccagaatgatgccctctggtggcaggcccgaaaaatctcagaccctgctacctgcgctgggcttgtcccttctaaccaccttctgaagaggaagcaacgggaattctggtggtctcagccgtaccagcctcacacctgcctcaagtcaaccctatacaaggaggagtttgttggctacggtcagaagttctttatagctggcttccgccgcagcatgcgcctttgtcgcaggaagtctcacctcagcccgctgcatgccagtgtgtgctgcaccggcagctgctacagtgcagtgggtgccccttacgaggaggtggtgaggtaccagcgacgcccttcagacaagtaccgcctcatagtgctcatgggaccctctggtgttggagtaaatgagctcagaagacaacttattgaatttaatcccagccattttcaaagtgctgtgccacacactactcgtactaaaaagagttacgaaatgaatgggcgtgagtatcactatgtgtccaaggaaacatttgaaaacctcatatatagtcacaggatgctggagtatggtgagtacaaaggccacctgtatggcactagtgtggatgctgttcaaacagtccttgtcgaaggaaagatctgtgtcatggacctagagcctcaggatattcaaggggttcgaacccatgaactgaagccctatgtcatatttataaagccatcgaatatgaggtgtatgaaacaatctcggaaaaatgccaaggttattactgactactatgtggacatgaagttcaaggatgaagacctacaagagatggaaaatttagcccaaagaatggaaactcagtttggccaattttttgatcatgtgattgtgaatgacagcttgcacgatgcatgtgcccagttgttgtctgccatacagaaggctcaggaggagcctcagtgggtaccagcaacatggatttcctcagatactgagtctcaatgagacttcttgtttaatgctggagttttaacactgtacccttgatacagcgatccatagttgcaatctaaaacaacagtatttgacccattttaatgtgtacaactt

SEQ ID NO: 152800 - DNA, 2050 bp, Homo sapiens
  Payload ID: 10053
  Gene Symbol: MPP4
  Gene Name: membrane protein, palmitoylated 4 (MAGUK p55 subfamily member 4)
  ENST ID: ENST00000447335
  CDS Start-End: 104-1996
cagtgtgctgagagctggtggccagtgggactgagtgagctgtgtgccgtgtattgacccgcttcctagtcctgaattcctttcagaagctccggcagggaggatgatacagtcagacaaaggagcagatccaccagacaagaaggacatgaagctttctacagccaccaatccacagaatggcctctcccagatcctgaggcttgtgctgcaagagctgagtctgttctacggcagagatgtgaatggagtgtgtctcttgtacgatctcctccactcgccgtggcttcaggctctgctaaagatttatgactgcctccaggaatttaaagaaaagaaactagttcctgccacaccacatgcacaggtgttatcctatgaggtagtggagttattacgtgaaacccctacttcccctgagatccaagagctgagacaaatgctccaggctccacacttcaaggccttgctcagtgcccatgacacgatagctcagaaagattttgaaccccttctccctccactgccagacaatatccctgagagtgaggaagcaatgaggattgtttgtttagtgaaaaaccaacagcccctgggagccaccatcaagcgccacgagatgacaggggacatcttggtggccaggatcatccacggtgggctggcggagagaagtgggttgctatatgctggagacaaactggtagaagtgaatggagtttcagttgagggactggaccctgaacaagtgatccatattctggccatgtctcgaggcacaatcatgttcaaggtggttccagtctctgaccctcctgtgaatagccagcagatggtgtacgtccgtgccatgactgagtactggccccaggaggatcccgacatcccctgcatggacgctggattgcctttccagaagggggacatcctccagattgtggaccagaatgatgccctctggtggcaggcccgaaaaatctcagaccctgctacctgcgctgggcttgtcccttctaaccaccttctgaagaggaagcaacgggaattctggtggtctcagccgtaccagcctcacacctgcctcaagtcaaccctatcaatttctatggaagaagaagatgacatgaagattgatgagaaatgtgtggaagcagaggaactttcagaagacaaggaggagtttgttggctacggtcagaagttctttatagctggcttccgccgcagcatgcgcctttgtcgcaggaagtctcacctcagcccgctgcatgccagtgtgtgctgcaccggcagctgctacagtgcagtgggtgccccttacgaggaggtggtgaggtaccagcgacgcccttcagacaagtaccgcctcatagtgctcatgggaccctctggtgttggagtaaatgagctcagaagacaacttattgaatttaatcccagccattttcaaagtgctgtgccacacactactcgtactaaaaagagttacgaaatgaatgggcgtgagtatcactatgtgtccaaggaaacatttgaaaacctcatatatagtcacaggatgctggagtatggtgagtacaaaggccacctgtatggcactagtgtggatgctgttcaaacagtccttgtcgaaggaaagatctgtgtcatggacctagagcctcaggatattcaaggggttcgaacccatgaactgaagccctatgtcatatttataaagccatcgaatatgaggtgtatgaaacaatctcggaaaaatgccaaggttattactgactactatgtggacatgaagttcaaggatgaagacctacaagagatggaaaatttagcccaaagaatggaaactcagtttggccaattttttgatcatgtgattgtgaatgacagcttgcacgatgcatgtgcccagttgttgtctgccatacagaaggctcaggaggagcctcagtgggtaccagcaacatggatttcctcagatactgagtctcaatgagacttcttgtttaatgctggagttttaacactgtacccttgatacagcgatcca

SEQ ID NO: 152801 - DNA, 2320 bp, Homo sapiens
  Payload ID: 10053
  Gene Symbol: MPP4
  Gene Name: membrane protein, palmitoylated 4 (MAGUK p55 subfamily member 4)
  ENST ID: ENST00000428900
  CDS Start-End: 166-2007
ctcaagatagcagaaatagataagcttcaactgacaaatttggtacagaagtcatggaaaggaagtgtgctgagagctggtggccagtgggactgagtgagctgtgtgccgtgtattgacccgcttcctagtcctgaattcctttcagaagctccggcagggaggatgatacagtcagacaaaggagcagatccaccagacaagaaggacatgaagctttctacagccaccaatccacagaatggcctctcccagatcctgaggcttgtgctgcaagagctgagtctgttctacggcagagatgtgaatggagtgtgtctcttgtacgatctcctccactcgccgtggcttcaggctctgctaaagatttatgactgcctccaggaatttaaagaaaagaaactagttcctgccacaccacatgcacaggtgttatcctatgaggtagtggagttattacgtgaaacccctacttcccctgagatccaagagctgagacaaatgctccaggctccacacttcaaggccttgctcagtgcccatgacacgatagctcagaaagattttgaaccccttctccctccactgccagacaatatccctgagagtgaggaagcaatgaggattgtttgtttagtgaaaaaccaacagcccctgggagccaccatcaagcgccacgagatgacaggggacatcttggtggccaggatcatccacggtgggctggcggagagaagtgggttgctatatgctggagacaaactggtagaagtgaatggagtttcagttgagggactggaccctgaacaagtgatccatattctggccatgtctcgaggcacaatcatgttcaaggtggttccagtctctgaccctcctgtgaatagccagcagatggtgtacgtccgtgccatgactgagtactggccccaggaggatcccgacatcccctgcatggacgctggattgcctttccagaagggggacatcctccagattgtggaccagaatgatgccctctggtggcaggcccgaaaaatctcagaccctgctacctgcgctgggcttgtcccttctaaccaccttctgaagaggaagcaacgggaattctggtggtctcagccgtaccagcctcacacctgcctcaagtcaaccctatatgaagaaacatttgaatctgacaaggaggagtttgttggctacggtcagaagttctttatagctggcttccgccgcagcatgcgcctttgtcgcaggaagtctcacctcagcccgctgcatgccagtgtgtgctgcaccggcagctgctacagtgcagtgggtgccccttacgaggaggtggtgaggtaccagcgacgcccttcagacaagtaccgcctcatagtgctcatgggaccctctggtgttggagtaaatgagctcagaagacaacttattgaatttaatcccagccattttcaaagtgctgtgccacacactactcgtactaaaaagagttacgaaatgaatgggcgtgagtatcactatgtgtccaaggaaacatttgaaaacctcatatatagtcacaggatgctggagtatggtgagtacaaaggccacctgtatggcactagtgtggatgctgttcaaacagtccttgtcgaaggaaagatctgtgtcatggacctagagcctcaggatattcaaggggttcgaacccatgaactgaagccctatgtcatatttataaagccatcgaatatgaggtgtatgaaacaatctcggaaaaatgccaaggttattactgactactatgtggacatgaagttcaaggatgaagacctacaagagatggaaaatttagcccaaagaatggaaactcagtttggccaattttttgatcatgtgattgtgaatgacagcttgcacgatgcatgtgcccagttgttgtctgccatacagaaggctcaggaggagcctcagtgggtaccagcaacatggatttcctcagatactgagtctcaatgagacttcttgtttaatgctggagttttaacactgtacccttgatacagcgatccatagttgcaatctaaaacaacagtatttgacccattttaatgtgtacaactttaaaagtgcagcaatttattaattaatcttatttgaaaaaaatttttattgtatggttatgtggttacctattttaacttaattttttttcctttacctcatatgcagctgtggtagaaatatgaataatgttaagtcactgagtatgagaacctttcgcagatttcacatgatctttttaagatttaaataaagagctttcctaaat

SEQ ID NO: 152802 - DNA, 540 bp, Homo sapiens
  Payload ID: 10053
  Gene Symbol: MPP4
  Gene Name: membrane protein, palmitoylated 4 (MAGUK p55 subfamily member 4)
  ENST ID: ENST00000602867
  CDS Start-End: 26-540
aagcttttgtctggataggagcaacatgcatgtttacagtcttgcagaagctccggcagggaggatgatacagtcagacaaaggagcagatccaccagacaagaaggacatgaagctttctacagccaccaatccacagaatggcctctcccagatcctgaggcttgtgctgcaagagctgagtctgttctacggcagagatgtgaatggagtgtgtctcttgtacgatctcctccactcgccgtggcttcaggctctgctaaagatttatgactgcctccaggaatttaaagaaaagaaactagttcctgccacaccacatgcacaggtgttatcctatgaggtagtggagttattacgtgaaacccctacttcccctgagatccaagagctgagacaaatgctccaggctccacacttcaaggccttgctcagtgcccatgacacgatagctcagaaagattttgaaccccttctccctccactgccagacaatatccctgagagtgaggaagcaatgaggattgtttgtttagtgaa

SEQ ID NO: 152803 - DNA, 2364 bp, Homo sapiens
  Payload ID: 10053
  Gene Symbol: MPP4
  Gene Name: membrane protein, palmitoylated 4 (MAGUK p55 subfamily member 4)
  ENST ID: ENST00000620095
  CDS Start-End: 209-2029
gagattttatcgggagcagtgaggtgactttggcagctaacaggccactagtatcctactaaagcttttgtctggataggagcaacatgcatgtttacagtcttgcagtgtgctgagagctggtggccagtgggactgagtgagctgtgtgccgtgtattgacccgcttcctagtcctgaattcctttcagaagctccggcagggaggatgatacagtcagacaaaggagcagatccaccagacaagaaggacatgaagctttctacagccaccaatccacagaatggcctctcccagatcctgaggcttgtgctgcaagagctgagtctgttctacggcagagatgtgaatggagtgtgtctcttgtacgatctcctccactcgccgtggcttcaggctctgctaaagatttatgactgcctccaggaatttaaagaaaagaaactagttcctgccacaccacatgcacaggtgttatcctatgaggtagtggagttattacgtgaaacccctacttcccctgagatccaagagctgagacaaatgctccaggctccacacttcaaggccttgctcagtgcccatgacacgatagctcagaaagattttgaaccccttctccctccactgccagacaatatccctgagagtgaggaagcaatgaggattgtttgtttagtgaaaaaccaacagcccctgggagccaccatcaagcgccacgagatgacaggggacatcttggtggccaggatcatccacggtgggctggcggagagaagtgggttgctatatgctggagacaaactggtagaagtgaatggagtttcagttgagggactggaccctgaacaagtgatccatattctggccatgtctcgaggcacaatcatgttcaaggtggttccagtctctgaccctcctgtgaatagccagcagatggtgtacgtccgtgccatgactgagtactggccccaggaggatcccgacatcccctgcatggacgctggattgcctttccagaagggggacatcctccagattgtggaccagaatgatgccctctggtggcaggcccgaaaaatctcagaccctgctacctgcgctgggcttgtcccttctaaccaccttctgaagaggaagcaacgggaattctggtggtctcagccgtaccagcctcacacctgcctcaagtcaaccctatacaaggaggagtttgttggctacggtcagaagttctttatagctggcttccgccgcagcatgcgcctttgtcgcaggaagtctcacctcagcccgctgcatgccagtgtgtgctgcaccggcagctgctacagtgcagtgggtgccccttacgaggaggtggtgaggtaccagcgacgcccttcagacaagtaccgcctcatagtgctcatgggaccctctggtgttggagtaaatgagctcagaagacaacttattgaatttaatcccagccattttcaaagtgctgtgccacacactactcgtactaaaaagagttacgaaatgaatgggcgtgagtatcactatgtgtccaaggaaacatttgaaaacctcatatatagtcacaggatgctggagtatggtgagtacaaaggccacctgtatggcactagtgtggatgctgttcaaacagtccttgtcgaaggaaagatctgtgtcatggacctagagcctcaggatattcaaggggttcgaacccatgaactgaagccctatgtcatatttataaagccatcgaatatgaggtgtatgaaacaatctcggaaaaatgccaaggttattactgactactatgtggacatgaagttcaaggatgaagacctacaagagatggaaaatttagcccaaagaatggaaactcagtttggccaattttttgatcatgtgattgtgaatgacagcttgcacgatgcatgtgcccagttgttgtctgccatacagaaggctcaggaggagcctcagtgggtaccagcaacatggatttcctcagatactgagtctcaatgagacttcttgtttaatgctggagttttaacactgtacccttgatacagcgatccatagttgcaatctaaaacaacagtatttgacccattttaatgtgtacaactttaaaagtgcagcaatttattaattaatcttatttgaaaaaaatttttattgtatggttatgtggttacctattttaacttaattttttttcctttacctcatatgcagctgtggtagaaatatgaataatgttaagtcactgagtatgagaacctttcgcagatttcacatgatctttttaagatttaaataaagagctttcctaaataaaataagcaatagttaacttt

SEQ ID NO: 152804 - DNA, 5552 bp, Homo sapiens
  Payload ID: 10054
  Gene Symbol: MPP5
  Gene Name: membrane protein, palmitoylated 5 (MAGUK p55 subfamily member 5)
  Uniprot ID: Q8N3R9
  ENST ID: ENST00000261681
  CDS Start-End: 662-2689
gttttagacttagaggcgcgcgactgcgcgcacccggctggagctgcggagaggaccaatgagcgggcgctctctccgctccggctcgggattgggcaagccgcgccagcctctcacgggcggggtgggactcggatccgcgcgcccactgcgccagagtcccgggggcgcgtgcgcggtctcgcggcggccgcaggggccggtctcgcgcggtctagaagtggagttgctggcggctgcggcggtgacggcggcgacggaggaggcaggcggtggggcgggggcggggactaaggattctgaggtggggagtcgggagtttctggattctttatccggaatttcaagggccgccggagggctgtcgcttctgcagtgcgtaggagcggccggggcgggaggctccgcggagccgaggcgtggagaataagaaagccttgagttttgtgaaaaaccggagaagagaaactaaaaggacagtagaaaaggcttttccagtttgcataatatttccttcatggatactttttcatagcattattatgtgatgtgagaagtttttttttttgaagtaacatggattttatactacagaatcaagagaattggcttataggaaaaattgatttataaaaagtggtacaggttttcatagataaccatgacaacatcccatatgaatgggcatgttacagaggaatcagacagcgaagtaaaaaatgttgatcttgcatcaccagaggaacatcagaagcaccgagagatggctgttgactgccctggagatttgggcaccaggatgatgccaatacgtcgaagtgcacagttggagcgtattcggcaacaacaggaggacatgaggcgtaggagagaggaagaagggaaaaagcaagaacttgaccttaattcttccatgagacttaagaaactagcccaaattcctccaaagaccggaatagataaccctatgtttgatacagaggaaggaattgtcttagaaagtcctcattatgctgtgaaaatattagaaatagaagacttgttttcttcacttaaacatatccaacatactttggtagattctcagagccaggaggatatttcactgcttttacaacttgttcaaaataaggatttccagaatgcatttaagatacacaatgccatcacagtacacatgaacaaggccagtcctccatttcctcttatctccaacgcacaagatcttgctcaagaggtacaaactgttttgaagccagttcatcataaggaaggacaagaactaactgctttgctgaatactccacatattcaggcacttttactggcccacgataaggttgctgagcaggaaatgcagctagagcccattacagatgagagagtttatgaaagtattggccagtatggaggagaaactgtaaaaatagttcgtatagaaaaggctcgtgatattccgttgggtgctacagttcgtaatgaaatggactctgtcatcattagccggatagtaaaagggggtgctgcagagaaaagtggtctgttgcatgaaggagatgaagttctagagattaatggcattgaaattcgggggaaagatgtcaatgaggtttttgacttgttgtctgatatgcatggtactttgacttttgtcctgattcccagtcaacagatcaagccgcctcctgccaaggaaacagtaatccatgtaaaagctcattttgactatgacccctcagatgacccttatgttccatgtcgagagttaggtctgtcttttcaaaaaggtgatatacttcatgtgatcagtcaagaagatccaaactggtggcaggcctacagggaaggggacgaagataatcaacctctagccgggcttgttccagggaaaagctttcagcagcaaagggaagccatgaaacaaaccatagaagaagataaggagccagaaaaatcaggaaaactgtggtgtgcaaagaagaataaaaagaagaggaaaaaggttttatataatgccaataaaaatgatgattatgacaacgaggagatcttaacctatgaggaaatgtcactttatcatcagccagcaaataggaagagacctatcatcttgattggtccacagaactgtggccagaatgaattgcgtcagaggctcatgaacaaagaaaaggaccgctttgcatctgcagttcctcatacaacccggagtaggcgagaccaagaagtagccggtagagattaccactttgtttcgcggcaagcattcgaggcagacatagcagctggaaagttcattgagcatggtgaatttgagaagaatttgtatggaactagcatagattctgtacggcaagtgatcaactctggcaaaatatgtcttttaagtcttcgtacacagtcattgaagactctccggaattcagatttgaaaccatatattatcttcattgcacccccttcacaagaaagacttcgggcattattggccaaagaaggcaagaatccaaagcctgaagagttgagagaaatcattgagaagacaagagagatggagcagaacaatggccactactttgatacggcaattgtgaattccgatcttgataaagcctatcaggaattgcttaggttaattaacaaacttgatactgaacctcagtgggtaccatccacttggctgaggtgaaagaaacatccattctgtggcatgttggacttgatctggcaaaaactgccaataggaggactgcccgacactgcagcaagattgaggataagatggaaggcagcagtataagctgtagatctgttcttagatctcttgaattagtgagacgacagttcccttaggcagtttgtgcatggcatcctttattctctatacatggctttagcggttcttgcctcattttgggattctaaatggaagctttcaacagagcattccattttgtcctgttaaaaccttttgttttcacctaaaccctttctgcttagttgtatctctgtgaaaaacttgtatacacaagcgtccatgtctcacacaaatattgatgtgattattcttaagtgttaaatcattaacacttaaatgacttcattgggaatattgagcagagggactgtgcttctatgcactgggcaaggcagtatttgcttaggaaactaatttagtcatcagagatactttcctaaaaaggaaaaataaaaaacaaaatggtgccactttgggttgaagctactttgttaggcttgaattcatttatatgtcttttgattcttaaaaaaacaaaaaacattccattagaagcaccagtttttttgctcagactttgtggatcagactctacactcaacacactctaatctacttaaaggtatacaaaatatgctgatcttttttaaattatgatttcctgaatttttttcttaagtcgtctcaactgatttactcacttagcttcccttccctcatcagcatagtataatagaatgtatgttacatttttatgaatggcaggtgttcattataatctgtattgacttaaaaagtttcttcctcatgatgctaatagttttttgtatacatgggaggatagcacatttgacagtttttgcatttttatgtatgagcacagtatcctatgactgtgctacgtatatataggtaataaactggaattctgttgatgaatatagctgctgtactgtatattaatatttaatagatcaacaaatggtcattgaaaacacttgtttagcattagaataaaattatatatgtccttgggaaatattatgacagttgactttaagatcaaaaggaagggaagacctgaaagtcatttgaacattttaggaaaagaatattggagagaaaaaggtattaaatatatagaaataggtttttaacctaacaaggtctgcctcttatgacgagaatgcaacagcttggtaaatcataaaagaaacatttaagctaataggattttcgtactgtctctatagctgtagctttaaaattcaacgtatataattggcatggaaacttaatttgcagtcttttcaagcctttaggatagtgtgatgtgtaacaaacaacctcaaatgtgaatgccttgattttatttttatggtgactttagctacagcatttcctatacccagagctaaacactggaataatactgacatcatttaatttaacataagcaattatgtttaaggagtaatttgtgtcatgtacatatttgattgattttttttcttctacataattttatttgaacaaatgtagacagtttatatgtcgcctttttctgttcaaatttgcatggcctattaagttggctggagagtgttttatgtggaaatattttcaagataatgttccttaggaagaaaataacattcttgggttgagggaaggaatgccatacactactgtctcttcagatctgaaatactccagtttagagccaggaaatttcacaggtcacaccgatttttagcattaaaaactaaggaatatacttagcacttacttaatcttttcagttttccagtttacgtctcaggaatgaagtgtagtctatggttgacaatggagttttgtgatcctgcttattgtaactgacaactgttttcaactccaagagctaaactattggcagttcatgttaagttagagtgagggtgtaggtagtgtcagtgagtggctcttgtgcctgctgtagacattaggcctgcactagggccatgtgctgtcaagattcaggaacatggctttaacaagcagatcttgtatcaaggcagaggtgatgccatgccatacttttaggaagtctgagatgataaatatttcaaggtcagtgaagtctatcaatcattctccccttcctcatcagcaatggtagatagaaatgtcctaaacttttctaaatcctagtgatgaggatgtgctgatattcaacatagtccttaaagtgaaaactgagttgttgctgacctccacaaaagaatatggaaaaaagccttgctgtacacctagttgtacagccactctggccaattccatttcctgtccctctgtggttctgactggagaccccagtgtgggggaggtcttaccatttaatatagaaatgatatcaataactaatgctatgtacttggaaaatccaaataaggaagttttaggttggtgcataactttgtttctcaaattttcgttgtcagaacaaatggaaggagaatattatttagactaatccagatttgctttctatgaaaatctaatgtctggattatcttccttttctcatggcctaagaaataaggatcaataaggaatgatttgaatgtaattttgtgaatgtgtggaaaatataaagcagggatttagccttaataaaggtaaccttctgacatctgttgttaatccccctttgtactcttttcctgtatctgcactgttattttgagatgtcatactgtacactgtattgtaaaaataaaaagtaaaattatatttcaaattttaaaagcca

SEQ ID NO: 152805 - DNA, 1163 bp, Homo sapiens
  Payload ID: 10054
  Gene Symbol: MPP5
  Gene Name: membrane protein, palmitoylated 5 (MAGUK p55 subfamily member 5)
  ENST ID: ENST00000556345
  CDS Start-End: 348-722
gggagtttctggattctttatccggaatttcaagggccgccggagggctgtcgcttctgcagtgcgtaggagcggccggggcgggaggctccgcggagccgaggcgtggagaataagaaagccttgagttttgtgaaaaaccggagaagagaaactaaaaggacagtagaaaaggcttttccagtttgcataatatttccttcatggatactttttcatagcattattatgtgatgtgagaagtttttttttttgaagtaacatggattttatactacagaatcaagagaattggcttataggaaaaattgatttataaaaagtggtacaggttttcatagataaccatgacaacatcccatatgaatgggcatgttacagaggaatcagacagcgaagtaaaaaatgttgatcttgcatcaccagaggaacatcagaagcaccgagagatggctgttgactgccctggagatttgggcaccaggatgatgccaatacgtcgaagtgcacagttggagcgtattcggcaacaacaggaggacatgaggcgtaggagagaggaagaagggaaaaagcaagaacttgaccttaattcttccatgagacttaagaaactagcccaaattcctccaaagaccggaatagataaccctatgtttgatacagaggaaggaattgtcttagaaagtcctcattatgctgtgaaaatattaggtaagtaaaaatagaggtataacagaaaacattttgctttaatttatctgtgccttataatgtatatgagaaggaagagggtttaagagaatgtaagtaatgacagtttgaattccagaccaagatcctttgttttcgtggaaacgccgtataactattgtttactgttaccaacatagagctaaaagcatgtggcttaaatgttaagtcactataacatgtttttttagatattaaagagttctgcatgggccctaacatttaaagccttgaaatttaccttttatatcaaaccacaaactttatgcaaaatactaaaaaagaattttcagattttgaatttctgatttccttaaagttttgtaaaatagtaataaatttgtaactacagtttaaattctttgatttttttaaattaatgattgtcaataaaaagaactggtattgtt

SEQ ID NO: 152806 - DNA, 567 bp, Homo sapiens
  Payload ID: 10054
  Gene Symbol: MPP5
  Gene Name: membrane protein, palmitoylated 5 (MAGUK p55 subfamily member 5)
  ENST ID: ENST00000557783
  CDS Start-End: 120-567
ctttatccggaatttcaagggccgccggagggctgtcgcttctgcagtgcgtaggagcggccggggcgggaggctccgcggagccgaggcgtggagaggaacatcagaagcaccgagagatggctgttgactgccctggagatttgggcaccaggatgatgccaatacgtcgaagtgcacagttggagcgtattcggcaacaacaggaggacatgaggcgtaggagagaggaagaagggaaaaagcaagaacttgaccttaattcttccatgagacttaagaaactagcccaaattcctccaaagaccggaatagataaccctatgtttgatacagaggaaggaattgtcttagaaagtcctcattatgctgtgaaaatattagaaatagaagacttgttttcttcacttaaacatatccaacatactttggtagattctcagagccaggaggatatttcactgcttttacaacttgttcaaaataaggatttccagaatgcatttaagatacacaatgccatcacagtacacatgaacaaggccagtcctccatttcctcttatct

SEQ ID NO: 152807 - DNA, 5006 bp, Homo sapiens
  Payload ID: 10054
  Gene Symbol: MPP5
  Gene Name: membrane protein, palmitoylated 5 (MAGUK p55 subfamily member 5)
  Uniprot ID: Q8N3R9
  ENST ID: ENST00000555925
  CDS Start-End: 218-2143
gggagtttctggattctttatccggaatttcaagggccgccggagggctgtcgcttctgcagtgcgtaggagcggccggggcgggaggctccgcggagccgaggcgtggagaataagaaagccttgagttttgtgaaaaaccggagaagagaaactaaaaggacagtagaaaaggcttttccagtttgcataataggaacatcagaagcaccgagagatggctgttgactgccctggagatttgggcaccaggatgatgccaatacgtcgaagtgcacagttggagcgtattcggcaacaacaggaggacatgaggcgtaggagagaggaagaagggaaaaagcaagaacttgaccttaattcttccatgagacttaagaaactagcccaaattcctccaaagaccggaatagataaccctatgtttgatacagaggaaggaattgtcttagaaagtcctcattatgctgtgaaaatattagaaatagaagacttgttttcttcacttaaacatatccaacatactttggtagattctcagagccaggaggatatttcactgcttttacaacttgttcaaaataaggatttccagaatgcatttaagatacacaatgccatcacagtacacatgaacaaggccagtcctccatttcctcttatctccaacgcacaagatcttgctcaagaggtacaaactgttttgaagccagttcatcataaggaaggacaagaactaactgctttgctgaatactccacatattcaggcacttttactggcccacgataaggttgctgagcaggaaatgcagctagagcccattacagatgagagagtttatgaaagtattggccagtatggaggagaaactgtaaaaatagttcgtatagaaaaggctcgtgatattccgttgggtgctacagttcgtaatgaaatggactctgtcatcattagccggatagtaaaagggggtgctgcagagaaaagtggtctgttgcatgaaggagatgaagttctagagattaatggcattgaaattcgggggaaagatgtcaatgaggtttttgacttgttgtctgatatgcatggtactttgacttttgtcctgattcccagtcaacagatcaagccgcctcctgccaaggaaacagtaatccatgtaaaagctcattttgactatgacccctcagatgacccttatgttccatgtcgagagttaggtctgtcttttcaaaaaggtgatatacttcatgtgatcagtcaagaagatccaaactggtggcaggcctacagggaaggggacgaagataatcaacctctagccgggcttgttccagggaaaagctttcagcagcaaagggaagccatgaaacaaaccatagaagaagataaggagccagaaaaatcaggaaaactgtggtgtgcaaagaagaataaaaagaagaggaaaaaggttttatataatgccaataaaaatgatgattatgacaacgaggagatcttaacctatgaggaaatgtcactttatcatcagccagcaaataggaagagacctatcatcttgattggtccacagaactgtggccagaatgaattgcgtcagaggctcatgaacaaagaaaaggaccgctttgcatctgcagttcctcatacaacccggagtaggcgagaccaagaagtagccggtagagattaccactttgtttcgcggcaagcattcgaggcagacatagcagctggaaagttcattgagcatggtgaatttgagaagaatttgtatggaactagcatagattctgtacggcaagtgatcaactctggcaaaatatgtcttttaagtcttcgtacacagtcattgaagactctccggaattcagatttgaaaccatatattatcttcattgcacccccttcacaagaaagacttcgggcattattggccaaagaaggcaagaatccaaagcctgaagagttgagagaaatcattgagaagacaagagagatggagcagaacaatggccactactttgatacggcaattgtgaattccgatcttgataaagcctatcaggaattgcttaggttaattaacaaacttgatactgaacctcagtgggtaccatccacttggctgaggtgaaagaaacatccattctgtggcatgttggacttgatctggcaaaaactgccaataggaggactgcccgacactgcagcaagattgaggataagatggaaggcagcagtataagctgtagatctgttcttagatctcttgaattagtgagacgacagttcccttaggcagtttgtgcatggcatcctttattctctatacatggctttagcggttcttgcctcattttgggattctaaatggaagctttcaacagagcattccattttgtcctgttaaaaccttttgttttcacctaaaccctttctgcttagttgtatctctgtgaaaaacttgtatacacaagcgtccatgtctcacacaaatattgatgtgattattcttaagtgttaaatcattaacacttaaatgacttcattgggaatattgagcagagggactgtgcttctatgcactgggcaaggcagtatttgcttaggaaactaatttagtcatcagagatactttcctaaaaaggaaaaataaaaaacaaaatggtgccactttgggttgaagctactttgttaggcttgaattcatttatatgtcttttgattcttaaaaaaacaaaaaacattccattagaagcaccagtttttttgctcagactttgtggatcagactctacactcaacacactctaatctacttaaaggtatacaaaatatgctgatcttttttaaattatgatttcctgaatttttttcttaagtcgtctcaactgatttactcacttagcttcccttccctcatcagcatagtataatagaatgtatgttacatttttatgaatggcaggtgttcattataatctgtattgacttaaaaagtttcttcctcatgatgctaatagttttttgtatacatgggaggatagcacatttgacagtttttgcatttttatgtatgagcacagtatcctatgactgtgctacgtatatataggtaataaactggaattctgttgatgaatatagctgctgtactgtatattaatatttaatagatcaacaaatggtcattgaaaacacttgtttagcattagaataaaattatatatgtccttgggaaatattatgacagttgactttaagatcaaaaggaagggaagacctgaaagtcatttgaacattttaggaaaagaatattggagagaaaaaggtattaaatatatagaaataggtttttaacctaacaaggtctgcctcttatgacgagaatgcaacagcttggtaaatcataaaagaaacatttaagctaataggattttcgtactgtctctatagctgtagctttaaaattcaacgtatataattggcatggaaacttaatttgcagtcttttcaagcctttaggatagtgtgatgtgtaacaaacaacctcaaatgtgaatgccttgattttatttttatggtgactttagctacagcatttcctatacccagagctaaacactggaataatactgacatcatttaatttaacataagcaattatgtttaaggagtaatttgtgtcatgtacatatttgattgattttttttcttctacataattttatttgaacaaatgtagacagtttatatgtcgcctttttctgttcaaatttgcatggcctattaagttggctggagagtgttttatgtggaaatattttcaagataatgttccttaggaagaaaataacattcttgggttgagggaaggaatgccatacactactgtctcttcagatctgaaatactccagtttagagccaggaaatttcacaggtcacaccgatttttagcattaaaaactaaggaatatacttagcacttacttaatcttttcagttttccagtttacgtctcaggaatgaagtgtagtctatggttgacaatggagttttgtgatcctgcttattgtaactgacaactgttttcaactccaagagctaaactattggcagttcatgttaagttagagtgagggtgtaggtagtgtcagtgagtggctcttgtgcctgctgtagacattaggcctgcactagggccatgtgctgtcaagattcaggaacatggctttaacaagcagatcttgtatcaaggcagaggtgatgccatgccatacttttaggaagtctgagatgataaatatttcaaggtcagtgaagtctatcaatcattctccccttcctcatcagcaatggtagatagaaatgtcctaaacttttctaaatcctagtgatgaggatgtgctgatattcaacatagtccttaaagtgaaaactgagttgttgctgacctccacaaaagaatatggaaaaaagccttgctgtacacctagttgtacagccactctggccaattccatttcctgtccctctgtggttctgactggagaccccagtgtgggggaggtcttaccatttaatatagaaatgatatcaataactaatgctatgtacttggaaaatccaaataaggaagttttaggttggtgcataactttgtttctcaaattttcgttgtcagaacaaatggaaggagaatattatttagactaatccagatttgctttctatgaaaatctaatgtctggattatcttccttttctcatggcctaagaaataaggatcaataaggaatgatttgaatgtaattttgtgaatgtgtggaaaatataaagcagggatttagccttaataaaggtaaccttctgacatctgttgttaatccccctttgtactcttttcctgtatctgcactgttattttgagatgtcatactgtacactgtattgtaaaaataaaaagtaaaattatatttcaaattttaaaagcca

SEQ ID NO: 152808 - DNA, 479 bp, Homo sapiens
  Payload ID: 10054
  Gene Symbol: MPP5
  Gene Name: membrane protein, palmitoylated 5 (MAGUK p55 subfamily member 5)
  ENST ID: ENST00000557237
  CDS Start-End: 466-479
cttcccccacacgctgcgcaaactccggccagcgggagacccctggcagccaggcgggcttcctcaggcgcgcgagctgcggccgtggagggtgtgagcccaacctttgtccctcggagcaacgctgcctgcgcggtgcccgctccttctgcttggctgggcatgcaccttggcgcgggccacagccagccgagcccgaggtgcagggggcgcggcggggagtcgtctgccccctgcgccctctctccgaggtcgcgacgcgcgggactctcccggccgggtctgggaaatcggcgagggaacgctttcctttagaagtcagaatgtagtcagcgttcctctgcctgactcagctgctgaataagaaagccttgagttttgtgaaaaaccggagaagagaaactaaaaggacagtagaaaaggcttttccagtttgcataataggaacatcagaagcaccgagagatggctgttgactg

SEQ ID NO: 152809 - DNA, 8452 bp, Homo sapiens
  Payload ID: 10055
  Gene Symbol: MPP6
  Gene Name: membrane protein, palmitoylated 6 (MAGUK p55 subfamily member 6)
  Uniprot ID: Q9NZW5
  ENST ID: ENST00000222644
  CDS Start-End: 251-1873
ggctggctgcgcgcgcggaggcagcggcgggggcgaccggagctggggcagagtggggagcgagggagggggaggagagagagggaggcggagggcagtgagagacgcatttccagttctcaactacgagccacgagtttgcagatggggctgctcggcggcgcctgtggctgagggagagcagcggcggcggggagcgaccgggagcggcggcagcggcggcgcggaggcggctgaggtgcgagccgcaatgcagcaagtcttggaaaaccttacggagctgccctcgtctactggagcagaagaaatagacctaattttcctcaagggaattatggagaatcctattgtaaaatcacttgctaaggctcatgagaggctagaagattccaaactagaagctgtcagtgacaataacttggaattagtcaatgaaattcttgaagacatcactcctctaataaatgtggatgaaaatgtggcagaattggttggtatactcaaagaacctcacttccagtcactgttggaggcccatgatattgtggcatcaaagtgttatgattcacctccatcaagcccagaaatgaataattcttctatcaataatcagttattaccagtagatgccattcgtattcttggtattcacaaaagagctggggaaccactgggtgtgacatttagggttgaaaataatgatctggtaattgcccgaatcctccatgggggaatgatagatcgacaaggtctacttcatgtgggagatataattaaagaagtcaatggccatgaggttggaaataatccaaaggaattacaagaattactgaaaaatattagtggaagtgtcaccctaaaaatcttaccaagttatagagataccattactcctcaacaggtatttgtgaagtgtcattttgattataatccatacaatgacaacctaataccttgcaaagaagcaggattgaagttttccaaaggagagattcttcagattgtaaatagagaagatccaaattggtggcaggctagccatgtaaaagagggaggaagcgctggtctcattccaagccagttcctggaagagaagagaaaggcatttgttagaagagactgggacaattcaggacctttttgtggaactataagtagcaaaaaaaagaaaaagatgatgtatctcacaaccagaaatgcagaatttgatcgtcatgaaatccagatatatgaggaggtagccaaaatgcctcccttccagagaaaaacattagtattgataggagctcaaggtgtaggccgaagaagcttgaaaaacaggttcatagtattgaatcccactagatttggaactacggtgccatttacttcacggaaaccaagggaagatgaaaaagatggccaggcatataagtttgtgtcacgatctgagatggaagcagatattaaagctggaaagtatttggaacatggggaatatgaaggaaatctctatggaaccaaaattgattctattcttgaggttgtccaaactggacggacttgcattctggatgtcaacccacaagcactgaaagtattgaggacatcagagtttatgccctatgtggtatttattgcggctccggagctagagacgttacgtgccatgcacaaggctgtggtggatgcaggaatcactaccaagcttctgaccgactctgacttgaagaaaacagtggatgaaagtgcacggattcagagagcatacaaccactattttgatttgatcatcataaatgataatctagacaaagcctttgaaaaactgcaaactgccatagagaaactgagaatggaaccacagtgggtcccaatcagctgggtttactgatgattcagtaaggttaacaatgaaaattaaactcttaaaaagtgactgcaacaaataaaccttctactgagaaaatacatcacagatagaagattatctgctaagtccaggcatttttatggtgtagattgaaataatagtacacttctgaatttttatataaaatgtggttggaaggtgtactaatatataatttatcttaatttttctaactttgtatggataatctttctattcatatcacataaagaaatgcgttgaagcattttgtatatgttttgatttagtacccttgcctttttcatcaaaggaattttcaaatcattcactctaacattggtctcatattttcactgtgataatgaatattacttgaaatagttttgtaaagctgtcatttagttcagtattcaaatagtgaagggttagtcttaatagaagaaaatatagttattgaccttccttcttataaatttcttacaaaagcagaattttaagtcagtgttatagctagtctactaccatctaaatctgacatcaaaagtctgatcagtttacgtattttcattatttcggagatgtatggctatccattctaatttatacagctatattagttttgtctcttcatttctatctttactgaaaaattgaagagcaataccttgcactctcttttgaggttattctttttatttgttgcagtgatatgatgctaactaatttaacatgtacacagtaagctctggggctggaagcaaggtcatgcagactgagagagtgccttatcctgtaaaaccttacagcaaaatgacacttgaagaaagtttattttcacatgtaaaattttgactgacaaaaggaacctactactttaaacaatggttttattagaacatggtcagcaaatgtatcatgcctctgcaaattttagtgatgtttagagatgcctctaagtttgcagttggaggtttttgtgcttttagaaatgtgatgtgatccttagggtacctgttttgtctgttgtgttgagaaccaaacccattgaacaacttaaaaaattgggaaataattgtcagctattttgtatacatacacacaaaatatatacattatataatatgtatattatgtattatataatatatataaaatgttttgtatattttttacatatctgttaaaaaatgtactttgtttttttgtttgtttgttttgagatggagtctctctctgtcacccatgctggagtacagtggcgcgatctcagcccgctgcaacctctgcctcctgggttcatgcgactctcgtgcctcagcctcccaagtaattgagattacagttgggtgccaccatgtccggctaatttttgtatttttagtacagatggggtttcaccatgttggccagggtggtctcgagctcctgacctcaagtgatccacccaccttggcctcccaaagtgctgagattacaagcatgagccactgcacctagccaagaagtgtactttttgtttaatgattaccgaaagaagttctcctttagaagcattgacttatacaaattcccacattcacctcagttaatatcttcctttaggattcttggataatagaaattcttcctaaaacatactcagagatgcagctcattattaaattaaggtaaccacattctgtattgttgctagcttttcatgtaaacattattcacactttaaaggattaggtgtttaaatattgatggtcatctttgtctggtgttaggtgccagacacctggctgctgaatttgttttttccctcaccaaagttgtcatttggaacgccagctgggaggactttgaaggaaaagaaaatatatgacaataggcagtattgacacattgtttaaaatctttttcacaataaaacaaaacacccaagttgtcatattgttaaagttggaaatctataggtttttctttttttttttttttttctttttttgattctagatttcatggccagaacacaaattcacgtttcttgtcctaggacagggaattggtgacaaaatggattatactattttaataacagtggaaactttcaaactacatgtgtttacaccaaattcttggcttctcaaagcaacatgaattaaagcacagtatcaaggtgatgccctatgacaatgtttcaacacacacttgaaattttaagagaaatttcagttcttcactcaggaaatgtgctgtattctctaatgtactttcatgctgcagcatggagcctctttaaacagctttgggataattatagcagcacaagaagtttatctgcaaaatatttcaatcatcttggtacaatagatgacttttacatcatgtatattagccttatgtgatataaaatgtattacttagaaaatatacttaaaggaattatttctattataaatggtattcatgattgactacttaattaatgcacattagatttctcctaatataaaatgaaatgatgcagtttagttcatttcagtctagatgcccgtactaacaagaatacagttagataagttcattgtatctcaatgaagaatcattgaacttgaaacccaagtcccaaatgaatctgcaggaatgagcagtgctctgcgggggcaaacagccccagaggtcccagggttcttcctaggtaatgagagtatagctgtgatcaaggaaatgtgaacttctcttttgggaagatctgcgataattagctttatggaagcgaaaatggtttagagtggtgttgagcaattgttaagagttgaaatagacacacacatgcatgtgcttttgggaaacatgatgtgccaacgtattaatgtgcctgagggctccttgtggataggtcagtgtccacatttcagcactcagggcatgactgtacacaacctaagactatatatatattttttcattttcaaatgtacaaatacccatagaggtgatgtgcctggataagtcatttaaccatagcttagtgaaataaatgtgatggccctaaaaagtagaattttcactttcattacagccatgcctttattatgcagtctccatttctgtgtgatatttggtaatatcacatgtcaaatacatcaggactttgtttattttggctaactctaactatacaattgctgaacatagctttctgaaatagaaattataagagaaacccagtatgcctacagcattagtagcctaaatcctagattctagaatccaataaatttatagtagttcttaagaagtttcctttaaagcaacaaatagattattaaggcaaatttagataataacccaagttagcaataaaaccatgtgacattatagattatgtccagatactaactgctttgaccataatatcccaatgacaataaaaaatgatccttggtttaaaaattattaaatggtacttatttttatgtataacaagtgtcatgatcccagtgactggagttgattttcaaggtggatagccatagagttaggtaaaattattttgaattggcaaactaaagataacaattttgaaaattgctcaaaataataatctacttaaattttacttttgtaacttctgaaacagtactccattatccagaaatcacaggctagagagccaataattttgtagtaatgaaccttaactaaacatgaaaaaggcaatcctgaagttttatgtacatagatagcagttcattttttaaatgttcgagttgccatatattatgtatgtgtgtgtgtgtgtgtatatatatatatatatatatatatatatatatatatatacagctatgtgtataatatgtaaaattctcccaaaatgtatgaatataaaactgaatgtattcattcatgtaattataactagcattctaaaatttttaattactcccatttctttgacattctgaaactttttttagattgttttaaaacgctctggttccaccttgaagctgataatctttctgaaaaatatatgagaaactcagaaagtagtcattattataataaatttaattttcttagggaaaaagggcagggttctggatggaaacccctttggaaattcttatttaaacttttgaatgaatctttaatatgattcaggctgagattatgatacctgcccttgtcttatttcaagaggtttgctgtgagaattcatgtaataacatctgtaatgtatttggaatttttgggagaaattcattcttttaaataatgggattattgtatatagtacaaatgaatactcacaaaatttaagaatacatttgactaataattgagcatcttgtcagtttttatgcaagcatatattgtatacctgaggaagatgacagttctataatttttttaaggtaaggttatttttaaattgcatttttgttctaacgttttgcaatttatattctttttaaaatatttcccataattcatcatgctagcttctgtgttcttggaatagtttttgaaaaatgcagagattcgaacatgagtccttaatatactaaacagtgaaagaatgatgatatctcatttctaaagtaagcatggttcacaccactttggcaatacactgcagtactttttaaaaaatattctctagtgataaaagtaaagacagggtactggccaagatcctaattctgacttctgactgtgtgatcttcgatgaaatttatatttccctttatcattactattctacttgttaagtaaggctaagttaatatttgtcttcgccttaaattctgatttgtaatttgtaactctgatgtggtagctgtgatatggtgaactgaaaaatccttattaggctactttatctgttctcttttagttattttaaagtgtacctgtttctgaagtaatgtagtgaatggtgaatacttttcaggaattcttccagttttaaaatagccccaaagatacagtttcagctggtggaaggtctgttctgctctcttagtcctaatcagaaagtcccttttatcttataatcccatactaaatccaaacccttagcaaatccttgctgccaaccagaccactcacaaatcaaacaaaatgtaagcaagcaatccagtactcggttacaccagaagactctgatctttgcccccgaaaactgtcctactttatccttatacctgaaatcactgcatacctgaaatcactgcagccctactgttttacccataccattaatttaaaaaggcatctatttctttatagaaagaaacattcacagtgaggtcttagtttgtgaacctcaaaatccagatattaatccactttagttattactttgtaattgcttctcagtcattggctgataatgcaatggtgtgataaatttgacttatctccacatacaaaagtcgatcagaagggatagttctcttcctttttttcccctcctactggctcttactgttttctaatctccagtgtaaatggaatgaacacatctatagttaaggtaaatgccaccaatcagaagattgagtgatttactgcttgtaaagcaactgtctttgaatcttatgaaataggtggtgttgctaccacagaagccaaaaaggtcttaaaattggaaatagatgtctttattgtacttcagccaacagcaagccaggggaaggaacatacataaatatgacaggtcatatatgaaatttggctctcctcctatcaaagtagcctaggagcttggaggaagcctaattaactaaaacaggaaaaaagcatactcatctgatgtaaaaactcatcagctgtaaattaccaacattaaaccagaagtcattaccagttaaaatgtgtggttttcatcttattcttaaataggagaggtggacagtagtgtaagtaacattgctttaaagacataaagcttgtcctggtaaacatggtctaaatgagaaatgcctccatcttttcaggtagaaccagatttcaggcatagctcagctacatctgtatttgaaatacaataaaaatatttcttatgtctctgtattctcttttaaaaagaactgctgactggctcctgtctcttcagtaacactgatttttttttaaagaagtgatatgttggactctgttgtagaagaatgagcactagtattcagcaacaagtgcaatttctccatgttatgttgagctctgttggagcctatggtgagtatttgatgtgaaaaccttgctgtgggaattttttattcttccttttccccccacgccagttcgttttggtaagtcttttatttgaacacaagacgcatgcttttttaaacctctagtttttgaagtaactgtagaagagaatctttaaaaaaaaaaatggagggcagaatgcttgttagcaatctgaaaatcaaagctgaacaagctgcttaaagtttctgattaagaagtttaaaaagaaaaattaattgctactgctttccaggtaattgtattattagtttctgtataaaagaaacattattgctgttgtataaataaaattttcctgtggtacaa

SEQ ID NO: 152810 - DNA, 3848 bp, Homo sapiens
  Payload ID: 10055
  Gene Symbol: MPP6
  Gene Name: membrane protein, palmitoylated 6 (MAGUK p55 subfamily member 6)
  Uniprot ID: Q9NZW5
  ENST ID: ENST00000396475
  CDS Start-End: 300-1922
caactacgagccacgagtttgcagatggggctgctcggcggcgcctgtggctgagggagagcagcggcggcggggagcgaccgggagcggcggcagcggcggcgcggaggcggctgaggtgcgagccggactaaatcattttgctactttaaaaaaatcacgaaagtacattatttgaagtttggagaagaaagggatttggtaacaaaggacagccatttccattttaagcagctaaacagcaggagagatttctgtaagaaggtaccagctcagattccattgttcatcattttgcaatgcagcaagtcttggaaaaccttacggagctgccctcgtctactggagcagaagaaatagacctaattttcctcaagggaattatggagaatcctattgtaaaatcacttgctaaggctcatgagaggctagaagattccaaactagaagctgtcagtgacaataacttggaattagtcaatgaaattcttgaagacatcactcctctaataaatgtggatgaaaatgtggcagaattggttggtatactcaaagaacctcacttccagtcactgttggaggcccatgatattgtggcatcaaagtgttatgattcacctccatcaagcccagaaatgaataattcttctatcaataatcagttattaccagtagatgccattcgtattcttggtattcacaaaagagctggggaaccactgggtgtgacatttagggttgaaaataatgatctggtaattgcccgaatcctccatgggggaatgatagatcgacaaggtctacttcatgtgggagatataattaaagaagtcaatggccatgaggttggaaataatccaaaggaattacaagaattactgaaaaatattagtggaagtgtcaccctaaaaatcttaccaagttatagagataccattactcctcaacaggtatttgtgaagtgtcattttgattataatccatacaatgacaacctaataccttgcaaagaagcaggattgaagttttccaaaggagagattcttcagattgtaaatagagaagatccaaattggtggcaggctagccatgtaaaagagggaggaagcgctggtctcattccaagccagttcctggaagagaagagaaaggcatttgttagaagagactgggacaattcaggacctttttgtggaactataagtagcaaaaaaaagaaaaagatgatgtatctcacaaccagaaatgcagaatttgatcgtcatgaaatccagatatatgaggaggtagccaaaatgcctcccttccagagaaaaacattagtattgataggagctcaaggtgtaggccgaagaagcttgaaaaacaggttcatagtattgaatcccactagatttggaactacggtgccatttacttcacggaaaccaagggaagatgaaaaagatggccaggcatataagtttgtgtcacgatctgagatggaagcagatattaaagctggaaagtatttggaacatggggaatatgaaggaaatctctatggaaccaaaattgattctattcttgaggttgtccaaactggacggacttgcattctggatgtcaacccacaagcactgaaagtattgaggacatcagagtttatgccctatgtggtatttattgcggctccggagctagagacgttacgtgccatgcacaaggctgtggtggatgcaggaatcactaccaagcttctgaccgactctgacttgaagaaaacagtggatgaaagtgcacggattcagagagcatacaaccactattttgatttgatcatcataaatgataatctagacaaagcctttgaaaaactgcaaactgccatagagaaactgagaatggaaccacagtgggtcccaatcagctgggtttactgatgattcagtaaggttaacaatgaaaattaaactcttaaaaagtgactgcaacaaataaaccttctactgagaaaatacatcacagatagaagattatctgctaagtccaggcatttttatggtgtagattgaaataatagtacacttctgaatttttatataaaatgtggttggaaggtgtactaatatataatttatcttaatttttctaactttgtatggataatctttctattcatatcacataaagaaatgcgttgaagcattttgtatatgttttgatttagtacccttgcctttttcatcaaaggaattttcaaatcattcactctaacattggtctcatattttcactgtgataatgaatattacttgaaatagttttgtaaagctgtcatttagttcagtattcaaatagtgaagggttagtcttaatagaagaaaatatagttattgaccttccttcttataaatttcttacaaaagcagaattttaagtcagtgttatagctagtctactaccatctaaatctgacatcaaaagtctgatcagtttacgtattttcattatttcggagatgtatggctatccattctaatttatacagctatattagttttgtctcttcatttctatctttactgaaaaattgaagagcaataccttgcactctcttttgaggttattctttttatttgttgcagtgatatgatgctaactaatttaacatgtacacagtaagctctggggctggaagcaaggtcatgcagactgagagagtgccttatcctgtaaaaccttacagcaaaatgacacttgaagaaagtttattttcacatgtaaaattttgactgacaaaaggaacctactactttaaacaatggttttattagaacatggtcagcaaatgtatcatgcctctgcaaattttagtgatgtttagagatgcctctaagtttgcagttggaggtttttgtgcttttagaaatgtgatgtgatccttagggtacctgttttgtctgttgtgttgagaaccaaacccattgaacaacttaaaaaattgggaaataattgtcagctattttgtatacatacacacaaaatatatacattatataatatgtatattatgtattatataatatatataaaatgttttgtatattttttacatatctgttaaaaaatgtactttgtttttttgtttgtttgttttgagatggagtctctctctgtcacccatgctggagtacagtggcgcgatctcagcccgctgcaacctctgcctcctgggttcatgcgactctcgtgcctcagcctcccaagtaattgagattacagttgggtgccaccatgtccggctaatttttgtatttttagtacagatggggtttcaccatgttggccagggtggtctcgagctcctgacctcaagtgatccacccaccttggcctcccaaagtgctgagattacaagcatgagccactgcacctagccaagaagtgtactttttgtttaatgattaccgaaagaagttctcctttagaagcattgacttatacaaattcccacattcacctcagttaatatcttcctttaggattcttggataatagaaattcttcctaaaacatactcagagatgcagctcattattaaattaaggtaaccacattctgtattgttgctagcttttcatgtaaacattattcacactttaaaggattaggtgtttaaatattgatggtcatctttgtctggtgttaggtgccagacacctggctgctgaatttgttttttccctcaccaaagttgtcatttggaacgccagctgggaggactttgaaggaaaagaaaatatatgacaataggcagtattgacacattgtttaaaatctttttcacaataaaacaaaacacccaa

SEQ ID NO: 152811 - DNA, 1703 bp, Homo sapiens
  Payload ID: 10055
  Gene Symbol: MPP6
  Gene Name: membrane protein, palmitoylated 6 (MAGUK p55 subfamily member 6)
  ENST ID: ENST00000409761
  CDS Start-End: 399-1685
gggaggagagagagggaggcggagggcagtgagagacgcatttccagttctcaactacgagccacgagtttgcagatggggctgctcggcggcgcctgtggctgagggagagcagcggcggcggggagcgaccgggagcggcggcagcggcggcgcggaggcggctgaggtgcgagccggctcatgagaggctagaagattccaaactagaagctgtcagtgacaataacttggaattagtcaatgaaattcttgaagacatcactcctctaataaatgtggatgaaaatgtggcagaattggttggtatactcaaagaacctcacttccagtcactgttggaggcccatgatattgtggcatcaaagtgttatgattcacctccatcaagcccagaaatgaataattcttctatcaataatcagttattaccagtagatgccattcgtattcttggtattcacaaaagagctggggaaccactgggtgtgacatttagggttgaaaataatgatctggtaattgcccgaatcctccatgggggaatgatagatcgacaaggtctacttcatgtgggagatataattaaagaagtcaatggccatgaggttggaaataatccaaaggaattacaagaattactgaaaaatattagtggaagtgtcaccctaaaaatcttaccaagttatagagataccattactcctcaacaggtatttgtgaagtgtcattttgattataatccatacaatgacaacctaataccttgcaaagaagcaggattgaagttttccaaaggagagattcttcagattgtaaatagagaagatccaaattggtggcaggctagccatgtaaaagagggaggaagcgctggtctcattccaagccagttcctggaagagaagagaaaggcatttgttagaagagactgggacaattcaggacctttttgtggaactataagtagcaaaaaaaagaaaaagatgatgtatctcacaaccagaaatgcagaatttgatcgtcatgaaatccagatatatgaggaggtagccaaaatgcctcccttccagagaaaaacattagtattgataggagctcaaggtgtaggccgaagaagcttgaaaaacaggttcatagtattgaatcccactagatttggaactacggtgccatttacttcacggaaaccaagggaagatgaaaaagatggccaggcatataagtttgtgtcacgatctgagatggaagcagatattaaagctggaaagtatttggaacatggggaatatgaaggaaatctctatggaaccaaaattgattctattcttgaggttgtccaaactggacggacttgcattctggatgtcaacccacaagcactgaaagtattgaggacatcagagtttatgccctatgtggtatttattgcggctccggagctagagacgttacgtgccatgcacaaggctgtggtggatgcaggaatcactaccaagcttctgaccgactctgacttgaagaaaacagtggatgaaagtgcacggattcagagagcatacaaccactattttgatttgatcatcataaatgataatctagacaaagcctttgaaaaactgcaaactgccatagagaaactgagaatggaaccacagtgggtcccaatcagctgggtttactgatgattcagtaaggttaac

SEQ ID NO: 152812 - DNA, 1191 bp, Homo sapiens
  Payload ID: 10055
  Gene Symbol: MPP6
  Gene Name: membrane protein, palmitoylated 6 (MAGUK p55 subfamily member 6)
  ENST ID: ENST00000430180
  CDS Start-End: 269-1191
gggagtcgcggtggagcctgaatggagagccggcctgggggcggcgttgctgtgactgacacctccggggtctgtcccgagagggggtgattccgccggctcccggttctctcccgagctcggagttggtaggggaggaggctttctccaactaccgccgctacttccgaggtacgagactccagttgtttggccaaagtggctgtgggccgagcacaggctgccgcgggggcgttcgctgctgagatcgtgctcgcggattctcgcaatgcagcaagtcttggaaaaccttacggagctgccctcgtctactggagcagaagaaatagacctaattttcctcaagggaattatggagaatcctattgtaaaatcacttgctaaggctcatgagaggctagaagattccaaactagaagctgtcagtgacaataacttggaattagtcaatgaaattcttgaagacatcactcctctaataaatgtggatgaaaatgtggcagaattggttggtatactcaaagaacctcacttccagtcactgttggaggcccatgatattgtggcatcaaagtgttatgattcacctccatcaagcccagaaatgaataattcttctatcaataatcagttattaccagtagatgccattcgtattcttggtattcacaaaagagctggggaaccactgggtgtgacatttagggttgaaaataatgatctggtaattgcccgaatcctccatgggggaatgatagatcgacaaggtctacttcatgtgggagatataattaaagaagtcaatggccatgaggttggaaataatccaaaggaattacaagaattactgaaaaatattagtggaagtgtcaccctaaaaatcttaccaagttatagagataccattactcctcaacaggtatttgtgaagtgtcattttgattataatccatacaatgacaacctaataccttgcaaagaagcaggattgaagttttccaaaggagagattcttcagattgtaaatagagaagatccaaattggtggcaggctagccatgtaaaagagggaggaagcgctggtctcattccaagccagttcctggaagagaagagaaaggcatttgttagaagagactgggacaattcaggacctttttgtggaactataagtagcaaaaaaaagaaaaa

SEQ ID NO: 152813 - DNA, 982 bp, Homo sapiens
  Payload ID: 10055
  Gene Symbol: MPP6
  Gene Name: membrane protein, palmitoylated 6 (MAGUK p55 subfamily member 6)
  ENST ID: ENST00000432190
  CDS Start-End: 332-982
cgcgcccaagcggcggcggcggcggcggctggaggaggaggaggaggaggaggaggaggaggagggcggctgaggcgcggctggctgcgcgcgcggaggcagcggcgggggcgaccggagctggggcagagtggggagcgagggagggggaggagagagagggaggcggagggcagtgagagacgcatttccagttctcaactacgagccacgagtttgcagatggggctgctcggcggcgcctgtggctgagggagagcagcggcggcggggagcgaccgggagcggcggcagcggcggcgcggaggcggctgaggtgcgagccgcagcaatgcagcaagtcttggaaaaccttacggagctgccctcgtctactggagcagaagaaatagacctaattttcctcaagggaattatggagaatcctattgtaaaatcacttgctaaggctcatgagaggctagaagattccaaactagaagctgtcagtgacaataacttggaattagtcaatgaaattcttgaagacatcactcctctaataaatgtggatgaaaatgtggcagaattggttggtatactcaaagaacctcacttccagtcactgttggaggcccatgatattgtggcatcaaagtgttatgattcacctccatcaagcccagaaatgaataattcttctatcaataatcagttattaccagtagatgccattcgtattcttggtattcacaaaagagctggggaaccactgggtgtgacatttagggttgaaaataatgatctggtaattgcccgaatcctccatgggggaatgatagatcgacaaggtctacttcatgtgggagatataattaaagaagtcaatggccatgaggttggaaataatccaaaggaattacaagaattactgaaaaatattagtggaagtgtcaccctaaaaatcttaccaagttatagagataccattactcctcaacag

SEQ ID NO: 152814 - DNA, 552 bp, Homo sapiens
  Payload ID: 10055
  Gene Symbol: MPP6
  Gene Name: membrane protein, palmitoylated 6 (MAGUK p55 subfamily member 6)
  ENST ID: ENST00000426450
  CDS Start-End: 244-369
caaaatggtaaattaaaggcaccatctttgggactccctggggaaaaacgtaaagaaggcagttgaagaaaggactaaatcattttgctactttaaaaaaatcacgaaagtacattatttgaagtttggagaagaaagggatttggtaacaaaggacagccatttccattttaagcagctaaacagcaggagagatttctgtaagaaggtaccagctcagattccattgttcatcattttgcaatgcagcaagtcttggaaaaccttacggagctgccctcgtctactggagcagaagaaatagacctaattttcctcaagggaattatggagaatcctattgtaaaatcacttgctaagggcctgtgaaaaagatcctgatcctatttccattttcaacaatggcaaagtactgattttcttcttttgcattagactgtgtacctacttttcatgctcatgagaggctagaagattccaaactagaagctgtcagtgacaataacttggaattagtcaatgaaattcttgaagacatcactcctctaataa

SEQ ID NO: 152815 - DNA, 1125 bp, Homo sapiens
  Payload ID: 10055
  Gene Symbol: MPP6
  Gene Name: membrane protein, palmitoylated 6 (MAGUK p55 subfamily member 6)
  ENST ID: ENST00000464384
  CDS Start-End: 1-193
ttcaggacctttttgtggaactataagtagcaaaaaaaagaaaaagatgatgtatctcacaaccagaaatgcagttgcagaggatgacagaaataaaaaacagctctatgaatcagaaatttctggaggcttaatcaaaggagttggcaattttaaaagtactttcttgacttcagagctacctctatgctgaatttgatcgtcatgaaatccagatatatgaggaggtagccaaaatgcctcccttccagagaaaaacattagtattgataggagctcaaggtgtaggccgaagaagcttgaaaaacaggttcatagtattgaatcccactagatttggaactacggtgccatttacttcacggaaaccaagggaagatgaaaaagatggccaggcatataagtttgtgtcacgatctgagatggaagcagatattaaagctggaaagtatttggaacatggggaatatgaaggaaatctctatggaaccaaaattgattctattcttgaggttgtccaaactggacggacttgcattctggatgtcaacccacaagcactgaaagtattgaggacatcagagtttatgccctatgtggtatttattgcggctccggagctagagacgttacgtgccatgcacaaggctgtggtggatgcaggaatcactaccaagcttctgaccgactctgacttgaagaaaacagtggatgaaagtgcacggattcagagagcatacaaccactattttgatttgatcatcataaatgataatctagacaaagcctttgaaaaactgcaaactgccatagagaaactgagaatggaaccacagtgggtcccaatcagctgggtttactgatgattcagtaaggttaacaatgaaaattaaactcttaaaaagtgactgcaacaaataaaccttctactgagaaaatacatcacagatagaagattatctgctaagtccaggcatttttatggtgtagattgaaataatagtacacttctgaatttttatataaaatgtggttggaaggtgtactaatatataatttatcttaatttttctaactttgtatggataatctttctattcatatcacataaagaaatgcgttgaa

SEQ ID NO: 152816 - DNA, 126 bp, Homo sapiens
  Payload ID: 10055
  Gene Symbol: MPP6
  Gene Name: membrane protein, palmitoylated 6 (MAGUK p55 subfamily member 6)
  ENST ID: ENST00000625307
  CDS Start-End: 1-126
atgcagcaagtcttggaaaaccttacggagctgccctcgtctactggagcagaagaaatagacctaattttcctcaagggaattatggagaatcctattgtaaaatcacttgctaagggcctgtga

SEQ ID NO: 152817 - DNA, 5080 bp, Homo sapiens
  Payload ID: 10056
  Gene Symbol: MPP7
  Gene Name: membrane protein, palmitoylated 7 (MAGUK p55 subfamily member 7)
  Uniprot ID: Q5T2T1
  ENST ID: ENST00000337532
  CDS Start-End: 278-2008
aggtatagcagtcttggcagttgctgaactgaattcctggctgatttccttactgcataaactcaactgctctcactgaggtcgtcattaagtcctgtgtgtgtttgggcaggccgacttgatttacagccagcactccactgcggaaacggcttacaaaatatacagatcttggtagacaacgtggctgcaggctgttgaattggaattccctgtggctgtccgaaggcagggtgtccggagagcggtgggctgacctgttcctacaccttgcatcatgccagctttgtcaacgggatctgggagtgacactggtctgtatgagctgttggctgctctgccagcccagctgcagccacatgtggatagccaggaagacctgaccttcctctgggatatgtttggtgaaaaaagcctgcattcattggtaaagattcatgaaaaactacactactatgagaagcagagtccggtgcccattctccatggtgcggcggccttggccgatgatctggccgaagagcttcagaacaagccattaaacagtgagatcagagagctgttgaaactactgtcaaaacccaatgtgaaggctttgctctctgtacatgatactgtggctcagaagaattacgacccagtgttgcctcctatgcctgaagatattgacgatgaggaagactcagtaaaaataatccgtctggtcaaaaatagagaaccactgggagctaccattaagaaggatgaacagaccggggcgatcattgtggccagaatcatgagaggaggagctgcagatagaagtggtcttattcatgttggtgatgaacttagggaagtcaacgggataccagtggaggataaaaggcctgaggaaataatacagattttggctcagtctcagggagcaattacatttaagattatacccggcagcaaagaggagacaccatcaaaagaaggcaagatgtttatcaaagccctctttgactataatcctaatgaggataaggcaattccatgtaaggaagctgggctttctttcaaaaagggagatattcttcagattatgagccaagatgatgcaacttggtggcaagcgaaacacgaagctgatgccaaccccagggcaggcttgatcccctcaaagcatttccaggaaaggagattggctttgagacgaccagaaatattggttcagcccctgaaagtttccaacaggaaatcatctggttttagaaaaagttttcgtcttagtagaaaagataagaaaacaaataaatccatgtatgaatgcaagaagagtgatcagtacgacacagctgacgtacccacatacgaagaagtgacaccgtatcggcgacaaactaatgaaaaatacagactcgttgtcttggttggtcccgtgggagtagggctgaatgaactgaaacgaaagctgctgatcagtgacacccagcactatggcgtgacagtgccccataccaccagagcaagaagaagccaggagagtgatggtgttgaatacattttcatttccaagcatttgtttgagacagatgtacaaaataacaagtttattgaatatggagaatataaaaacaactactacggcacaagtatagactcagttcggtctgtccttgctaaaaacaaagtttgtttgttggatgttcagcctcatacagtgaagcatttaaggacactagaatttaagccctatgtgatatttataaagcctccatcaatagagcgtttgagagaaacaagaaaaaatgcaaagattatttcaagcagagatgaccaaggtgctgcaaaacccttcacagaagaagattttcaagaaatgattaaatctgcacagataatggaaagtcaatatggtcatctttttgacaaaattataataaatgatgacctcactgtggcattcaatgagctcaaaacaacttttgacaaattagagacagagacccattgggtgccagtgagctggttacattcataactaagagaaatttccataattgtctttttctatagagtgcatgatgaaatcaattacagttttggtagtagggtttttaaatctatatcactgtcatagatgtacaatcttggttcaagttgaatgctggttttgtttgtatctttttacagccttatttcaaacgccatgtgttagtataagatccgaaatcaaaatatgcacagtactgtattctaagcaaaacctcaaaccttctcgttgtcttcaataccgctctatctccaagatgaggctgaaattttcagagagacttagctagaggcttagtatgtatgggagttcagcgcttctgctggtctcaggtgtggctgctgctgtcgagtttgaatgttagctgttgaaggtatcaattcagcagccatgagcagctccagacagacaggtgagctctgctgtttctgggtggatcatcacagatttagccgggcaggcagtaaggtgtcctcttactattcaaaaagtgtagactttcttacatattcgcaatacgttcacagtgtgtgcattttaaaataattcttaaaggagtaactgaaattttaccttgagtgaatggccttcataatatagcttgagaagtccttttgagtacctgtcagtgactcaacaacatttaataagggaaagtagacttttaacagttattatatatgtaacgaaaagcctttcctttgggattaatataagtaagaatggtagccttgtggcaagaaatgattacaaaggatatttttatttgtaattcctcagaagacaatttatgaagtcacccaaaatgttattttagctggttttggatttttccaataaattagaagaaggatttctattctaaaacatgtaaaacctgttttacatattactgatacaattaaagattatttttcatctatgtgcaatagatcacccctctttaaattgctctaagatttattttagaaaacttttcatgtgatgttatttctttgtcatcaaaatgcttgttaacactgtccagacaccatcctaaccttgccattgttaaagaagtttaggaaagactcttatattgtaaatatttagatgggttctctcacttttctttgatactactgattttcagcaagtgaattatataattcaaaatgctagaaatgtctatccgttctataagagagcatatcctgccgttcttgcatgcagtgaagccctgcccgtcgaaaatcattgcatctgtgactttcaaagtggaaaaaaaaatgttatttttttgttgatttgtaaagagagtttaaatgtcatgtgaaaaaaaatagaatgtagtaaaattctatatatttatgaaatattttaaaggcatatttttttaaatatcaaacggggctattcataaaataaactgattgtatgtcaagatgtcctaatttaaaagagtagttttataaatcatggtcaacattccatgtaaatatttgagctttacaaagatagatccaagtgtgcgatctgtgcactgcacatttgatagcattattcactggttttccttcatacttgtcaagttcatattagaagcagagacaaaaaccactccaatggccttgacacatagtcacaccaaaatagataatcagactaagtattatataacaacgtgatccagacagtgagttctaagtgtattaattaaatagcaaaaaattttgtttttaaaaaatgaaagagggagggttgccaacctgaagtcttaagtagattgtttgggtagcatatttccttctttgaacattgtctgaaattttctataaatcaagacttcttgtacaaagaatgatgggacatatgtaataattcaggcaatcacctgagtaatttaggcagtccaaattctttaccctgaaatacccacattttaaaaaaattgcagataattgcttcagttatttactttggggacagagatatagtgtaaagtgggagaaactgagtccttttttggtggtggtaataataagatgttataaaaatataacattttaaaaaagaaaggtccagaccttaagcgcagagctagaacaatattttttaaataatggggggaaaagggggcactttggtaattttagaaatcaggtagtatacttttttttttttttttgagacagggtcttgccatgttgctcaggctggtcttgaactcctgggctcaagcaatcctcctgccttggcctcccaaagtgctgggattacaggcatgatccaccgtgcccagccggtagacgtggtcttaaaaacagtgtttacatggccatcttgatgcttagaaagataattgattaaaatttaataaggcagggccaactccgagagttcattgacaacggcagcaaaaaggccctgaattctgtactttcttcccccagcctccttctccagcaaggagaatagcactcctccctccagaagccagctccctaagttggagccactatgtaagagaagaggaacgttcactttttaaaattcatatatttaaaaatcaagaccaaaaagtaaattctgtactcctattattgactgtagtcaatcaaacataaaaaggtgaaagtaaaatttaattttttacccttattttactgaccaatatggaagttcttggtatctttaaggctgaccttcctggtattgtgtaatgattgaatgtatctaaactgtaataatttgaaactgacaaacataaccttctcagacttacaaaactatgttctttctaaagatacagatttttattattttattttgactaggaaggatttataaataaatgtaatgaaaaatctttgatcttaataaagtaccttcaaacagtgtgtgtacttacttgaaaattgtttttgcacttggatattctattttattatactactattgtgatctattccattatactatttcccatggtagaacaaattatattttctactgtgatatgaagtgatgtaattgaacttgccatgtctaaaattaaatttcatatttttttcaatcaaa

SEQ ID NO: 152818 - DNA, 2090 bp, Homo sapiens
  Payload ID: 10056
  Gene Symbol: MPP7
  Gene Name: membrane protein, palmitoylated 7 (MAGUK p55 subfamily member 7)
  Uniprot ID: Q5T2T1
  ENST ID: ENST00000375719
  CDS Start-End: 356-2086
ataaacagcaggttctcctaggctttgaacaaaatttagcttctccaaggccaaaagcctcattgtgaagagaaagaaaggtatagcagtcttggcagttgctgaactgaattcctggctgatttccttactgcataaactcaactgctctcactgaggtcgtcattaagtcctgtgtgtgtttgggcaggccgacttgatttacagccagcactccactgcggaaacggcttacaaaatatacagatcttggtagacaacgtggctgcaggctgttgaattggaattccctgtggctgtccgaaggcagggtgtccggagagcggtgggctgacctgttcctacaccttgcatcatgccagctttgtcaacgggatctgggagtgacactggtctgtatgagctgttggctgctctgccagcccagctgcagccacatgtggatagccaggaagacctgaccttcctctgggatatgtttggtgaaaaaagcctgcattcattggtaaagattcatgaaaaactacactactatgagaagcagagtccggtgcccattctccatggtgcggcggccttggccgatgatctggccgaagagcttcagaacaagccattaaacagtgagatcagagagctgttgaaactactgtcaaaacccaatgtgaaggctttgctctctgtacatgatactgtggctcagaagaattacgacccagtgttgcctcctatgcctgaagatattgacgatgaggaagactcagtaaaaataatccgtctggtcaaaaatagagaaccactgggagctaccattaagaaggatgaacagaccggggcgatcattgtggccagaatcatgagaggaggagctgcagatagaagtggtcttattcatgttggtgatgaacttagggaagtcaacgggataccagtggaggataaaaggcctgaggaaataatacagattttggctcagtctcagggagcaattacatttaagattatacccggcagcaaagaggagacaccatcaaaagaaggcaagatgtttatcaaagccctctttgactataatcctaatgaggataaggcaattccatgtaaggaagctgggctttctttcaaaaagggagatattcttcagattatgagccaagatgatgcaacttggtggcaagcgaaacacgaagctgatgccaaccccagggcaggcttgatcccctcaaagcatttccaggaaaggagattggctttgagacgaccagaaatattggttcagcccctgaaagtttccaacaggaaatcatctggttttagaaaaagttttcgtcttagtagaaaagataagaaaacaaataaatccatgtatgaatgcaagaagagtgatcagtacgacacagctgacgtacccacatacgaagaagtgacaccgtatcggcgacaaactaatgaaaaatacagactcgttgtcttggttggtcccgtgggagtagggctgaatgaactgaaacgaaagctgctgatcagtgacacccagcactatggcgtgacagtgccccataccaccagagcaagaagaagccaggagagtgatggtgttgaatacattttcatttccaagcatttgtttgagacagatgtacaaaataacaagtttattgaatatggagaatataaaaacaactactacggcacaagtatagactcagttcggtctgtccttgctaaaaacaaagtttgtttgttggatgttcagcctcatacagtgaagcatttaaggacactagaatttaagccctatgtgatatttataaagcctccatcaatagagcgtttgagagaaacaagaaaaaatgcaaagattatttcaagcagagatgaccaaggtgctgcaaaacccttcacagaagaagattttcaagaaatgattaaatctgcacagataatggaaagtcaatatggtcatctttttgacaaaattataataaatgatgacctcactgtggcattcaatgagctcaaaacaacttttgacaaattagagacagagacccattgggtgccagtgagctggttacattcataactaa

SEQ ID NO: 152819 - DNA, 5063 bp, Homo sapiens
  Payload ID: 10056
  Gene Symbol: MPP7
  Gene Name: membrane protein, palmitoylated 7 (MAGUK p55 subfamily member 7)
  Uniprot ID: Q5T2T1
  ENST ID: ENST00000375732
  CDS Start-End: 261-1991
aatggaactaacaggaaccacctgtgcacttccttttacaggaatgttcataaacagcaggttctcctaggctttgaacaaaatttagcttctccaaggccaaaagcctcattgtgaagagaaagaaagaaacggcttacaaaatatacagatcttggtagacaacgtggctgcaggctgttgaattggaattccctgtggctgtccgaaggcagggtgtccggagagcggtgggctgacctgttcctacaccttgcatcatgccagctttgtcaacgggatctgggagtgacactggtctgtatgagctgttggctgctctgccagcccagctgcagccacatgtggatagccaggaagacctgaccttcctctgggatatgtttggtgaaaaaagcctgcattcattggtaaagattcatgaaaaactacactactatgagaagcagagtccggtgcccattctccatggtgcggcggccttggccgatgatctggccgaagagcttcagaacaagccattaaacagtgagatcagagagctgttgaaactactgtcaaaacccaatgtgaaggctttgctctctgtacatgatactgtggctcagaagaattacgacccagtgttgcctcctatgcctgaagatattgacgatgaggaagactcagtaaaaataatccgtctggtcaaaaatagagaaccactgggagctaccattaagaaggatgaacagaccggggcgatcattgtggccagaatcatgagaggaggagctgcagatagaagtggtcttattcatgttggtgatgaacttagggaagtcaacgggataccagtggaggataaaaggcctgaggaaataatacagattttggctcagtctcagggagcaattacatttaagattatacccggcagcaaagaggagacaccatcaaaagaaggcaagatgtttatcaaagccctctttgactataatcctaatgaggataaggcaattccatgtaaggaagctgggctttctttcaaaaagggagatattcttcagattatgagccaagatgatgcaacttggtggcaagcgaaacacgaagctgatgccaaccccagggcaggcttgatcccctcaaagcatttccaggaaaggagattggctttgagacgaccagaaatattggttcagcccctgaaagtttccaacaggaaatcatctggttttagaaaaagttttcgtcttagtagaaaagataagaaaacaaataaatccatgtatgaatgcaagaagagtgatcagtacgacacagctgacgtacccacatacgaagaagtgacaccgtatcggcgacaaactaatgaaaaatacagactcgttgtcttggttggtcccgtgggagtagggctgaatgaactgaaacgaaagctgctgatcagtgacacccagcactatggcgtgacagtgccccataccaccagagcaagaagaagccaggagagtgatggtgttgaatacattttcatttccaagcatttgtttgagacagatgtacaaaataacaagtttattgaatatggagaatataaaaacaactactacggcacaagtatagactcagttcggtctgtccttgctaaaaacaaagtttgtttgttggatgttcagcctcatacagtgaagcatttaaggacactagaatttaagccctatgtgatatttataaagcctccatcaatagagcgtttgagagaaacaagaaaaaatgcaaagattatttcaagcagagatgaccaaggtgctgcaaaacccttcacagaagaagattttcaagaaatgattaaatctgcacagataatggaaagtcaatatggtcatctttttgacaaaattataataaatgatgacctcactgtggcattcaatgagctcaaaacaacttttgacaaattagagacagagacccattgggtgccagtgagctggttacattcataactaagagaaatttccataattgtctttttctatagagtgcatgatgaaatcaattacagttttggtagtagggtttttaaatctatatcactgtcatagatgtacaatcttggttcaagttgaatgctggttttgtttgtatctttttacagccttatttcaaacgccatgtgttagtataagatccgaaatcaaaatatgcacagtactgtattctaagcaaaacctcaaaccttctcgttgtcttcaataccgctctatctccaagatgaggctgaaattttcagagagacttagctagaggcttagtatgtatgggagttcagcgcttctgctggtctcaggtgtggctgctgctgtcgagtttgaatgttagctgttgaaggtatcaattcagcagccatgagcagctccagacagacaggtgagctctgctgtttctgggtggatcatcacagatttagccgggcaggcagtaaggtgtcctcttactattcaaaaagtgtagactttcttacatattcgcaatacgttcacagtgtgtgcattttaaaataattcttaaaggagtaactgaaattttaccttgagtgaatggccttcataatatagcttgagaagtccttttgagtacctgtcagtgactcaacaacatttaataagggaaagtagacttttaacagttattatatatgtaacgaaaagcctttcctttgggattaatataagtaagaatggtagccttgtggcaagaaatgattacaaaggatatttttatttgtaattcctcagaagacaatttatgaagtcacccaaaatgttattttagctggttttggatttttccaataaattagaagaaggatttctattctaaaacatgtaaaacctgttttacatattactgatacaattaaagattatttttcatctatgtgcaatagatcacccctctttaaattgctctaagatttattttagaaaacttttcatgtgatgttatttctttgtcatcaaaatgcttgttaacactgtccagacaccatcctaaccttgccattgttaaagaagtttaggaaagactcttatattgtaaatatttagatgggttctctcacttttctttgatactactgattttcagcaagtgaattatataattcaaaatgctagaaatgtctatccgttctataagagagcatatcctgccgttcttgcatgcagtgaagccctgcccgtcgaaaatcattgcatctgtgactttcaaagtggaaaaaaaaatgttatttttttgttgatttgtaaagagagtttaaatgtcatgtgaaaaaaaatagaatgtagtaaaattctatatatttatgaaatattttaaaggcatatttttttaaatatcaaacggggctattcataaaataaactgattgtatgtcaagatgtcctaatttaaaagagtagttttataaatcatggtcaacattccatgtaaatatttgagctttacaaagatagatccaagtgtgcgatctgtgcactgcacatttgatagcattattcactggttttccttcatacttgtcaagttcatattagaagcagagacaaaaaccactccaatggccttgacacatagtcacaccaaaatagataatcagactaagtattatataacaacgtgatccagacagtgagttctaagtgtattaattaaatagcaaaaaattttgtttttaaaaaatgaaagagggagggttgccaacctgaagtcttaagtagattgtttgggtagcatatttccttctttgaacattgtctgaaattttctataaatcaagacttcttgtacaaagaatgatgggacatatgtaataattcaggcaatcacctgagtaatttaggcagtccaaattctttaccctgaaatacccacattttaaaaaaattgcagataattgcttcagttatttactttggggacagagatatagtgtaaagtgggagaaactgagtccttttttggtggtggtaataataagatgttataaaaatataacattttaaaaaagaaaggtccagaccttaagcgcagagctagaacaatattttttaaataatggggggaaaagggggcactttggtaattttagaaatcaggtagtatacttttttttttttttttgagacagggtcttgccatgttgctcaggctggtcttgaactcctgggctcaagcaatcctcctgccttggcctcccaaagtgctgggattacaggcatgatccaccgtgcccagccggtagacgtggtcttaaaaacagtgtttacatggccatcttgatgcttagaaagataattgattaaaatttaataaggcagggccaactccgagagttcattgacaacggcagcaaaaaggccctgaattctgtactttcttcccccagcctccttctccagcaaggagaatagcactcctccctccagaagccagctccctaagttggagccactatgtaagagaagaggaacgttcactttttaaaattcatatatttaaaaatcaagaccaaaaagtaaattctgtactcctattattgactgtagtcaatcaaacataaaaaggtgaaagtaaaatttaattttttacccttattttactgaccaatatggaagttcttggtatctttaaggctgaccttcctggtattgtgtaatgattgaatgtatctaaactgtaataatttgaaactgacaaacataaccttctcagacttacaaaactatgttctttctaaagatacagatttttattattttattttgactaggaaggatttataaataaatgtaatgaaaaatctttgatcttaataaagtaccttcaaacagtgtgtgtacttacttgaaaattgtttttgcacttggatattctattttattatactactattgtgatctattccattatactatttcccatggtagaacaaattatattttctactgtgatatgaagtgatgtaattgaacttgccatgtctaaaattaaatttcatatttttttcaatcaaa

SEQ ID NO: 152820 - DNA, 1210 bp, Homo sapiens
  Payload ID: 10056
  Gene Symbol: MPP7
  Gene Name: membrane protein, palmitoylated 7 (MAGUK p55 subfamily member 7)
  ENST ID: ENST00000441595
  CDS Start-End: 275-1210
gcaaaacagtagcttcactcagacaccgtaaccatcatctcatcctggatgcaattgctgtggttaacacaggaagaaaaggagaagtatcactctttttgctgcacaaatgtgaaaactcacaataaagagaagggagaaagaaacggcttacaaaatatacagatcttggtagacaacgtggctgcaggctgttgaattggaattccctgtggctgtccgaaggcagggtgtccggagagcggtgggctgacctgttcctacaccttgcatcatgccagctttgtcaacgggatctgggagtgacactggtctgtatgagctgttggctgctctgccagcccagctgcagccacatgtggatagccaggaagacctgaccttcctctgggatatgtttggtgaaaaaagcctgcattcattggtaaagcatttccaggaaaggagattggctttgagacgaccagaaatattggttcagcccctgaaagtttccaacaggaaatcatctggttttagaaaaagttttcgtcttagtagaaaagataagaaaacaaataaatccatgtatgaatgcaagaagagtgatcagtacgacacagctgacgtacccacatacgaagaagtgacaccgtatcggcgacaaactaatgaaaaatacagactcgttgtcttggttggtcccgtgggagtagggctgaatgaactgaaacgaaagctgctgatcagtgacacccagcactatggcgtgacagtgccccataccaccagagcaagaagaagccaggagagtgatggtgttgaatacattttcatttccaagcatttgtttgagacagatgtacaaaataacaagtttattgaatatggagaatataaaaacaactactacggcacaagtatagactcagttcggtctgtccttgctaaaaacaaagtttgtttgttggatgttcagcctcatacagtgaagcatttaaggacactagaatttaagccctatgtgatatttataaagcctccatcaatagagcgtttgagagaaacaagaaaaaatgcaaagattatttcaagcagagatgaccaaggtgctgcaaaacccttcacagaagaagattttcaagaaatgattaaatctgcacagataatggaaagtcaatatggtcatctttttgacaaaattataataaatgatgacctcactgtggca

SEQ ID NO: 152821 - DNA, 4895 bp, Homo sapiens
  Payload ID: 10056
  Gene Symbol: MPP7
  Gene Name: membrane protein, palmitoylated 7 (MAGUK p55 subfamily member 7)
  ENST ID: ENST00000496637
  CDS Start-End: 134-1498
agaaacggcttacaaaatatacagatcttggtagacaacgtggctgcaggctgttgaattggaattccctgtggctgtccgaaggcagggtgtccggagagcggtgggctgacctgttcctacaccttgcatcatgccagctttgtcaacgggatctgggagtgacactggtctgtatgagctgttggctgctctgccagcccagctgcagccacatgtggatagccaggaagacctgaccttcctctgggatatgtttggtgaaaaaagcctgcattcattggtaaagattcatgaaaaactacactactatgagaagcagagtccggtgcccattctccatggtgcggcggccttggccgatgatctggccgaagagcttcagaacaagccattaaacagtgagatcagagagctgttgaaactactgtcaaaacccaatgtgaaggctttgctctctgtacatgatactgtggctcagaagaattacgacccagtgttgcctcctatgcctgaagatattgacgatgaggaagactcagtaaaaataatccgtctggtcaaaaatagagaaccactgggagctaccattaagaaggatgaacagaccggggcgatcattgtggccagaatcatgagaggaggagctgcagatagaagtggtcttattcatgttggtgatgaacttagggaagtcaacgggataccagtggaggataaaaggcctgaggaaataatacagattttggctcagtctcagggagcaattacatttaagattatacccggcagcaaagaggagacaccatcaaaagaaggcaagatgtttatcaaagccctctttgactataatcctaatgaggataaggcaattccatgtaaggaagctgggctttctttcaaaaagggagatattcttcagattatgagccaagatgatgcaacttggtggcaagcgaaacacgaagctgatgccaaccccagggcaggcttgatcccctcaaagcatttccaggaaaggagattggctttgagacgaccagaaatattggttcagcccctgaaagtttccaacaggaaatcatctggttttagaaaaagttttcgtcttagtagaaaagataagaaaacaaataaatccatgtatgaatgcaagaagagtgatcagtacgacacagctgacgtacccacatacgaagaagtgacaccgtatcggcgacaaactaatgaaaaatacagactcgttgtcttggttggtcccgtgggagtagggctgaatgaactgaaacgaaagctgctgatcagtgacacccagcactatggcgtgacagtgccccataccaccagagcaagaagaagccaggagagtgatggtgttgaatacattttcatttccaagcatttgtttgagacagatgtacaaaataacaagtatgtggacatttttgagaattttcatgtgactgttttttataagcacatgcctgtcccgttttagacaactgagagttctccatttgaagtgtattttaattatcataataatatttgaaacagatgaaaaggtttattgaatatggagaatataaaaacaactactacggcacaagtatagactcagttcggtctgtccttgctaaaaacaaagtttgtttgttggatgttcagcctcatacagtgaagcatttaaggacactagaatttaagccctatgtgatatttataaagcctccatcaatagagcgtttgagagaaacaagaaaaaatgcaaagattatttcaagcagagatgaccaaggtgctgcaaaacccttcacagaagaagattttcaagaaatgattaaatctgcacagataatggaaagtcaatatggtcatctttttgacaaaattataataaatgatgacctcactgtggcattcaatgagctcaaaacaacttttgacaaattagagacagagacccattgggtgccagtgagctggttacattcataactaagagaaatttccataattgtctttttctatagagtgcatgatgaaatcaattacagttttggtagtagggtttttaaatctatatcactgtcatagatgtacaatcttggttcaagttgaatgctggttttgtttgtatctttttacagccttatttcaaacgccatgtgttagtataagatccgaaatcaaaatatgcacagtactgtattctaagcaaaacctcaaaccttctcgttgtcttcaataccgctctatctccaagatgaggctgaaattttcagagagacttagctagaggcttagtatgtatgggagttcagcgcttctgctggtctcaggtgtggctgctgctgtcgagtttgaatgttagctgttgaaggtatcaattcagcagccatgagcagctccagacagacaggtgagctctgctgtttctgggtggatcatcacagatttagccgggcaggcagtaaggtgtcctcttactattcaaaaagtgtagactttcttacatattcgcaatacgttcacagtgtgtgcattttaaaataattcttaaaggagtaactgaaattttaccttgagtgaatggccttcataatatagcttgagaagtccttttgagtacctgtcagtgactcaacaacatttaataagggaaagtagacttttaacagttattatatatgtaacgaaaagcctttcctttgggattaatataagtaagaatggtagccttgtggcaagaaatgattacaaaggatatttttatttgtaattcctcagaagacaatttatgaagtcacccaaaatgttattttagctggttttggatttttccaataaattagaagaaggatttctattctaaaacatgtaaaacctgttttacatattactgatacaattaaagattatttttcatctatgtgcaatagatcacccctctttaaattgctctaagatttattttagaaaacttttcatgtgatgttatttctttgtcatcaaaatgcttgttaacactgtccagacaccatcctaaccttgccattgttaaagaagtttaggaaagactcttatattgtaaatatttagatgggttctctcacttttctttgatactactgattttcagcaagtgaattatataattcaaaatgctagaaatgtctatccgttctataagagagcatatcctgccgttcttgcatgcagtgaagccctgcccgtcgaaaatcattgcatctgtgactttcaaagtggaaaaaaaaatgttatttttttgttgatttgtaaagagagtttaaatgtcatgtgaaaaaaaatagaatgtagtaaaattctatatatttatgaaatattttaaaggcatatttttttaaatatcaaacggggctattcataaaataaactgattgtatgtcaagatgtcctaatttaaaagagtagttttataaatcatggtcaacattccatgtaaatatttgagctttacaaagatagatccaagtgtgcgatctgtgcactgcacatttgatagcattattcactggttttccttcatacttgtcaagttcatattagaagcagagacaaaaaccactccaatggccttgacacatagtcacaccaaaatagataatcagactaagtattatataacaacgtgatccagacagtgagttctaagtgtattaattaaatagcaaaaaattttgtttttaaaaaatgaaagagggagggttgccaacctgaagtcttaagtagattgtttgggtagcatatttccttctttgaacattgtctgaaattttctataaatcaagacttcttgtacaaagaatgatgggacatatgtaataattcaggcaatcacctgagtaatttaggcagtccaaattctttaccctgaaatacccacattttaaaaaaattgcagataattgcttcagttatttactttggggacagagatatagtgtaaagtgggagaaactgagtccttttttggtggtggtaataataagatgttataaaaatataacattttaaaaaagaaaggtccagaccttaagcgcagagctagaacaatattttttaaataatggggggaaaagggggcactttggtaattttagaaatcaggtagtatacttttttttttttttttgagacagggtcttgccatgttgctcaggctggtcttgaactcctgggctcaagcaatcctcctgccttggcctcccaaagtgctgggattacaggcatgatccaccgtgcccagccggtagacgtggtcttaaaaacagtgtttacatggccatcttgatgcttagaaagataattgattaaaatttaataaggcagggccaactccgagagttcattgacaacggcagcaaaaaggccctgaattctgtactttcttcccccagcctccttctccagcaaggagaatagcactcctccctccagaagccagctccctaagttggagccactatgtaagagaagaggaacgttcactttttaaaattcatatatttaaaaatcaagaccaaaaagtaaattctgtactcctattattgactgtagtcaatcaaacataaaaaggtgaaagtaaaatttaattttttacccttattttactgaccaatatggaagttcttggtatctttaaggctgaccttcctggtattgtgtaatgattgaatgtatctaaactgtaataatttgaaactgacaaacataaccttctcagacttacaaaactatgttctttctaaagatacagatttttattattttattttgactaggaaggatttataaataaatgtaatgaaaaatctttgatcttaataaagtaccttcaaacagtgtgtgta

SEQ ID NO: 152822 - DNA, 5367 bp, Homo sapiens
  Payload ID: 10057
  Gene Symbol: MARCH1
  Gene Name: membrane-associated ring finger (C3HC4) 1, E3 ubiquitin protein ligase
  Uniprot ID: Q8TCQ1
  ENST ID: ENST00000274056
  CDS Start-End: 48-917
tattttcagaatttcagaaattgaaaagggataagaggaaggagaaaatgctgggctggtgtgaagcgatagcccgtaaccctcacagaattccaaacaacacgcgaacacccgagatctcaggggatttggctgacgcctcacaaacctccacattgaatgaaaaatccccagggcgatctgcaagtcgatcaagtaacatttcaaaagcaagcagcccaacaacagggacagctcccaggagccagtcaaggttgtctgtctgtccatccactcaggacatctgcagaatctgtcactgcgaaggggatgaagagagccccctcatcacaccctgtcgctgcactgggacactgcgctttgtccaccagtcctgcctccaccagtggataaagagctcagatacacgctgctgtgagctctgcaagtatgacttcataatggagaccaagctcaaacccctccggaagtgggagaaactacagatgaccacaagtgaaaggaggaaaatattctgctctgtcacattccacgtaatcgcgatcacctgtgtggtttggtctttgtatgtattgatagaccggacagcggaggaaatcaagcaaggcaatgacaatggtgtccttgaatggccattttggacaaaactggttgtggtagccattggcttcacaggaggtcttgtcttcatgtacgtacagtgtaaagtctatgttcagttgtggcgcaggctgaaggcctacaaccgtgtgatctttgtacaaaattgcccagacactgccaaaaaactggagaagaacttctcatgtaatgtaaacacagacatcaaagatgctgtggtagtgcctgtaccacaaacaggtgcaaattcactgccatctgcagagggtggcccccctgaagttgtatcagtctgatggaacctgttgggagtttcttcaccgaagaatatctttctagccctcagccactacaaatgacagaagtgatcttgaattatttactcccttcagctcctcctttctcctactgacacatttttcctgactttgttcaaagaggaaaggagaaaaacaaacagaccaaatgcccaggagcccatgaagtaatagcgtaaagtaaagtatgatatggaaatgtgaagtttgcaagagaatgatttccaagacaattaagaactactggggcaatgaatgcttttaggcagtaatcaaagattaaatggacccatgatactcttcttcacagtaacaggggaaaagttcaagaatacagacttgaattgcgatgtgtattacttctagggccttgtaatgttaactgtctcatctggaaataactaacatatttggttttaagcctgaaattgtctgcattatccctaagtcacattggaagtgaacttggaggatgcatattttgatatgctttgacagctaacagatttgtatggtttagtggagtctggttattttgacagatgcatgttttttttaaatagatgcaatatacatttgaagacattgatatttggaattaattacgtttgtttaagtcacgcaaaagattttcagaaaatgttcggatataattagctctgttaaatacccacagaactgttatcaggtcttatatttattttcatctggttcctctaatacagtgctgtccaatagaaacacaacagccacaaatgcaggccacagatgcaaatatttaacttcccagtagccctattttaaaaagtaaaaataaatgtttgtttgttaaaatgaattttgattttttaaaaacactatatgttatttcaacatgtcatcaatataaaaaattgattgattgattgatagtttacatctgtttcttgaaccaagttttcaaaatccagttggtaatttaaaagtacacttcaacttgaattaactatattggatagcacagccgtaaaattagagactaagcttctgctttatttaacagttgttgagtatttcaaaacagtttaattcattcttttatttcaaagtcacaaaagttagttatgatttttaaaagcattaaattaagtgtcctcattttaaagtcagatgaagttcacatctctaaagggtaaaaatccaaaagtatagaaagataaaacaatcaatctgcctatagcagagttgtgaaataaataaattgttactatgaagtacttacaataggggaataaaattacctatttttgttattaaatcaaatgtgtaaggcttatttcatccatatgaggtgtcaacttgacagatgatgagtaattatgactaagaatctagcccttacttttaaaagctgacaggatttcccttgctcagttagaaaacaaaaatattcaacagattctgtgataagtaattaatcgtttaggtttgacagttgattattgtgttctttgcatattcatgtaaaactgatgtgtgaatgacattgcagtgagctagattaacggtgattatagatacagtagcctgtcaaagaaagatgtcctacattaaaaaaggtgacttatttttgttagctgtcattatttattaacatgaaaaggcaatgatggccataagaaccaaagcatgagtatcacactgcacaaatctgggtatcacatggatgcactttgtaattatcagtgtgcttgttcttcacagatcataggaaaaagggaaaaaaaaaacaaacctttaaatgaggagaaagatggtataaatattagtagtggctgacactgagtccagatagtcttgattcctagaaataaacaaaaggtaaacaatgtcaattttgtgtgtgtgtatggcgtgtgtgtagtcatgtatatatgcggggaaaatgttaaggtattcagtcaggaaacaaaaggtttaaaactcatctttcttaaaacttgttataagcacagggaaagcaaagttgaggtaactaaactgaaccaaaaattctgtataaataaggatataagtaattaacgttttaaaaaacatgtggaccttaaacaaactgtatattaaattcctcttaaatgcccattttaaatatttaagataaatacatttatgaataacaaatctgtgggtgatttaaccatggcaccatatccaagggattaaccttaatgcaattttcctgttaattgtcctaagctttttactaatccattttccctgtgggttagtaatggcaacatgctgcttacagatattcccggggaaaaacatccagacaccagcaaacaaagaaatgttgatttctcttttgtttgctctgaaagtaaaataattatttactttaattaacatggaaaatattgtttaaattctgtacgaacctaaacaagatacgttgcagggctgatttcacagtggaggatgatcggctaaaataaagcctcatttattaagggctacacttttaacactaagaaaacatttctagaataaaaagcaaaggtaagcattattctattaatagtaaaagaggacatgggattttaaaactatacctaaattcttgcaattaacttttatgggcttggacattgttgaaatgagaaaataatataatatagcttcctggcaggttaaaagtcaacacttgattttgctattcttctgactttttgaaaccctgaagttctgaatttcaagcttttaagaagcttttcagcaatggttgtttgtttatggttcaaacatctgaaataactacctgcatttaaaatctaatgttgattattttctttttacattctgtgtggcaatggaacatttgccctttcaaacaataaaacgatttagctttgtggcagtgcttttttgtagactgactgactatacccttcaaaaagaaaaactgctctacggaatgcaaattttgaggcatgtttacctgctcgtggaagaaataaaatggaattgaaaaaaaaaggactaaaattgaagaatgaaattacagttgtgttaaaaaccttggctctttataatcatgaatcttcagtattaaaccagacattgatgctgttaatttttttaaagaactatcactcttatcgtacaggagtaaagattaaattgtaaaagaaagaaattccaattttttaaaaagtaaagcccaaaaggcaattaagcttaagtacaaaaacaaaataaaaatgaacaaaatctaaactaaagtgagcccaacaacctgagatacagcaatgtgtaacctgaaggaagataggtgtagactgaaggagtctttcaaaacaccccagcattaaatctcactctgcgctgcttctacacgtgattatagtcccagacagacgacctcatggttttttatcttgttttacaaaaggtccttgggtactctttaaaacatctattctttggcaggaaaattagctcattagaacaatgacaccattaagggacattataagggtcctggggctgaggtgggaagatttttctatctgccccatatagtttacccttccttgccttgaaaatgaatattatagaacagagtacagctcttaaaagttattagtatcattattattatagttgttatataatactttaattaagaaagatgaaaaccttttttctttcctaagtcagcccaatggtgctattttacatatcaacacagttgaaaggaagtactgttattttgggctgcagtgtttcctccacatctaaagaaagcccattttgaaactggatactgcattaaaacaaagaaggaaaaattattttaactgtgtgcagtttttgaaattaggcatttgtactattttggttttacataattctcttgcattaacaatttactgttttgtgaatcatgtgtactaaagcaaattaagaaaaagaaaataattatctgtgaaagactttgtatattaaacaagtgacgcaaaccttagttgtggtttccacaatttttgcctaacagactgatatttgtatttgcaacatccaaacacacatacattttttaagattttacaagggtctgaacatataattattttaaagcaaacctacgttgactaactcatgacatggtacaaataaataaatacacaaacagagggaaaccaatgaaaataaactatgtggactttcaaacctgctttaaaaaaagagttcaagagaaatcacaatgtaatctaaagcgggactgtctcaagaataagtcttggatatagaaaaataagcatataacagcatttttctgttcagagataatagtggattcagataattgcatggataataaacattaaaagcaagatattagaatctaagaggtttggtgatagcaaaaaacaaagctgtttcc

SEQ ID NO: 152823 - DNA, 2476 bp, Homo sapiens
  Payload ID: 10057
  Gene Symbol: MARCH1
  Gene Name: membrane-associated ring finger (C3HC4) 1, E3 ubiquitin protein ligase
  Uniprot ID: Q8TCQ1
  ENST ID: ENST00000339875
  CDS Start-End: 31-849
ctatattctctgttctgcattataagcaacatgaccagcagccacgtttgttgtaattttttaaatatgtggaaaaaaagcaagatatcaaccatgtattaccttaaccaagatgccaaattatctaacttgtttctccaggcaagcagcccaacaacagggacagctcccaggagccagtcaaggttgtctgtctgtccatccactcaggacatctgcagaatctgtcactgcgaaggggatgaagagagccccctcatcacaccctgtcgctgcactgggacactgcgctttgtccaccagtcctgcctccaccagtggataaagagctcagatacacgctgctgtgagctctgcaagtatgacttcataatggagaccaagctcaaacccctccggaagtgggagaaactacagatgaccacaagtgaaaggaggaaaatattctgctctgtcacattccacgtaatcgcgatcacctgtgtggtttggtctttgtatgtattgatagaccggacagcggaggaaatcaagcaaggcaatgacaatggtgtccttgaatggccattttggacaaaactggttgtggtagccattggcttcacaggaggtcttgtcttcatgtacgtacagtgtaaagtctatgttcagttgtggcgcaggctgaaggcctacaaccgtgtgatctttgtacaaaattgcccagacactgccaaaaaactggagaagaacttctcatgtaatgtaaacacagacatcaaagatgctgtggtagtgcctgtaccacaaacaggtgcaaattcactgccatctgcagagggtggcccccctgaagttgtatcagtctgatggaacctgttgggagtttcttcaccgaagaatatctttctagccctcagccactacaaatgacagaagtgatcttgaattatttactcccttcagctcctcctttctcctactgacacatttttcctgactttgttcaaagaggaaaggagaaaaacaaacagaccaaatgcccaggagcccatgaagtaatagcgtaaagtaaagtatgatatggaaatgtgaagtttgcaagagaatgatttccaagacaattaagaactactggggcaatgaatgcttttaggcagtaatcaaagattaaatggacccatgatactcttcttcacagtaacaggggaaaagttcaagaatacagacttgaattgcgatgtgtattacttctagggccttgtaatgttaactgtctcatctggaaataactaacatatttggttttaagcctgaaattgtctgcattatccctaagtcacattggaagtgaacttggaggatgcatattttgatatgctttgacagctaacagatttgtatggtttagtggagtctggttattttgacagatgcatgttttttttaaatagatgcaatatacatttgaagacattgatatttggaattaattacgtttgtttaagtcacgcaaaagattttcagaaaatgttcggatataattagctctgttaaatacccacagaactgttatcaggtcttatatttattttcatctggttcctctaatacagtgctgtccaatagaaacacaacagccacaaatgcaggccacagatgcaaatatttaacttcccagtagccctattttaaaaagtaaaaataaatgtttgtttgttaaaatgaattttgattttttaaaaacactatatgttatttcaacatgtcatcaatataaaaaattgattgattgattgatagtttacatctgtttcttgaaccaagttttcaaaatccagttggtaatttaaaagtacacttcaacttgaattaactatattggatagcacagccgtaaaattagagactaagcttctgctttatttaacagttgttgagtatttcaaaacagtttaattcattcttttatttcaaagtcacaaaagttagttatgatttttaaaagcattaaattaagtgtcctcattttaaagtcagatgaagttcacatctctaaagggtaaaaatccaaaagtatagaaagataaaacaatcaatctgcctatagcagagttgtgaaataaataaattgttactatgaagtacttacaataggggaataaaattacctatttttgttattaaatcaaatgtgtaaggcttatttcatccatatgaggtgtcaacttgacagatgatgagtaattatgactaagaatctagcccttacttttaaaagctgacaggatttcccttgctcagttagaaaacaaaaatattcaacagattctgtgataagtaattaatcgtttaggtttgacagttgattattgtgttctttgcatattcatgtaaaactgatgtgtgaatgacattgcagtgagctagattaacggtgattatagatacagtagcctgtcaaagaaagatgtcctacattaaaaaaggtgactta

SEQ ID NO: 152824 - DNA, 3903 bp, Homo sapiens
  Payload ID: 10057
  Gene Symbol: MARCH1
  Gene Name: membrane-associated ring finger (C3HC4) 1, E3 ubiquitin protein ligase
  ENST ID: ENST00000514618
  CDS Start-End: 489-2126
actggggagccgagccagagccgggctgcctgccacccggctgctcgtccgctagctggggaggagcgctccacccgcaactgacaaaggatgggagaatgcccgcgccccgggatgccggccgcacgcagcctggcggccgcctgagctacttcaccctccgccggaaatgtaccccaaaagaactctgagagaatatactcaactgtcctgctgtgattaaacaagactgctgtattttacctgagcttggcaaagcaaggatatgaacaattgtgcaggtgggctactcagggcgagtgaagagataaggcatccaatcagggattggccacctgcagccctgccaatatgcccctccaccagatttccgtaatcccagcacgggagactgccagcaatgggagaaattcaatgggcagaaacaaagagaagaacaaggaagtcgagaatttcagaaattgaaaagggataagaggaaggagaaaatgctgggctggtgtgaagcgatagcccgtaaccctcacagaattccaaacaacacgcgaacacccgagatctcaggggatttggctgacgcctcacaaacctccacattgaatgaaaaatccccagggcgatctgcaagtcgatcaagtaacatttcaaaagcaagcagcccaacaacagggacagctcccaggagccagtcaaggttgtctgtctgtccatccactcaggacatctgcagatctgccatcttgcatgacatgtcagaagagtcatttgagtattgcacccctgtcatggtgctgagccctgctaggaaggagtctggtaagaaatcagtaatacaaagacctaggaggaggagaaaagcctctgagagatatgagcatgctgcagaagaacaaataagagggagaaaaaatgactttcaccttcaaatctcaagccccaggtggagggagctttacacagattcttcagattcatcttccacagatgagagtcattggattcaggcaaaaagaagagcccaggttaaattcagactgtcaagaagaaggaggagaaataataataagccgtgtgaaaacttagctgggtcttccactcctaacggaattgagctcgttgatctgggatccaaaggtaaagagcaacaagagctgattgaatgtgagagttgctctttaaatctccacagaggaaaacatacaaggtaccaagaatgcaacccttctctgactcaagggtcctctgaaattaagagatcctcaaggaatcatgagaagagcaaaggcagatatcaccacagagatcctcagctcttgcaaagtcttaggaaaaatgaaataatgaagaagacattttcagaaacagattccagcactgaaatactgggagttccagaaggcagcaaggacatgaatgatgcagggctccaggtgaataaccctgttcagaagcctcctgccacctatgacgatgggtctgataatttagaagtatgcagaatctgtcactgcgaaggggatgaagagagccccctcatcacaccctgtcgctgcactgggacactgcgctttgtccaccagtcctgcctccaccagtggataaagagctcagatacacgctgctgtgagctctgcaagtatgacttcataatggagaccaagctcaaacccctccggaagtgggagaaactacagatgaccacaagtgaaaggaggaaaatattctgctctgtcacattccacgtaatcgcgatcacctgtgtggtttggtctttgtatgtattgatagaccggacagcggaggaaatcaagcaaggcaatgacaatggtgtccttgaatggccattttggacaaaactggttgtggtagccattggcttcacaggaggtcttgtcttcatgtacgtacagtgtaaagtctatgttcagttgtggcgcaggctgaaggcctacaaccgtgtgatctttgtacaaaattgcccagacactgccaaaaaactggagaagaacttctcatgtaatgtaaacacagacatcaaagatgctgtggtagtgcctgtaccacaaacaggtgcaaattcactgccatctgcagagggtggcccccctgaagttgtatcagtctgatggaacctgttgggagtttcttcaccgaagaatatctttctagccctcagccactacaaatgacagaagtgatcttgaattatttactcccttcagctcctcctttctcctactgacacatttttcctgactttgttcaaagaggaaaggagaaaaacaaacagaccaaatgcccaggagcccatgaagtaatagcgtaaagtaaagtatgatatggaaatgtgaagtttgcaagagaatgatttccaagacaattaagaactactggggcaatgaatgcttttaggcagtaatcaaagattaaatggacccatgatactcttcttcacagtaacaggggaaaagttcaagaatacagacttgaattgcgatgtgtattacttctagggccttgtaatgttaactgtctcatctggaaataactaacatatttggttttaagcctgaaattgtctgcattatccctaagtcacattggaagtgaacttggaggatgcatattttgatatgctttgacagctaacagatttgtatggtttagtggagtctggttattttgacagatgcatgttttttttaaatagatgcaatatacatttgaagacattgatatttggaattaattacgtttgtttaagtcacgcaaaagattttcagaaaatgttcggatataattagctctgttaaatacccacagaactgttatcaggtcttatatttattttcatctggttcctctaatacagtgctgtccaatagaaacacaacagccacaaatgcaggccacagatgcaaatatttaacttcccagtagccctattttaaaaagtaaaaataaatgtttgtttgttaaaatgaattttgattttttaaaaacactatatgttatttcaacatgtcatcaatataaaaaattgattgattgattgatagtttacatctgtttcttgaaccaagttttcaaaatccagttggtaatttaaaagtacacttcaacttgaattaactatattggatagcacagccgtaaaattagagactaagcttctgctttatttaacagttgttgagtatttcaaaacagtttaattcattcttttatttcaaagtcacaaaagttagttatgatttttaaaagcattaaattaagtgtcctcattttaaagtcagatgaagttcacatctctaaagggtaaaaatccaaaagtatagaaagataaaacaatcaatctgcctatagcagagttgtgaaataaataaattgttactatgaagtacttacaataggggaataaaattacctatttttgttattaaatcaaatgtgtaaggcttatttcatccatatgaggtgtcaacttgacagatgatgagtaattatgactaagaatctagcccttacttttaaaagctgacaggatttcccttgctcagttagaaaacaaaaatattcaacagattctgtgataagtaattaatcgtttaggtttgacagttgattattgtgttctttgcatattcatgtaaaactgatgtgtgaatgacattgcagtgagctagattaacggtgattatagatacagtagcctgtcaaagaaagatgtcctacattaaaaaaggtgacttatttttgttagctgtcattatttattaacatgaaaaggcaatgatggccataagaaccaaagcatgagtatcacactgcacaaatctgggtatcacatggatgcactttgtaattatcagtgtgcttgttcttcacagatcataggaaaaa

SEQ ID NO: 152825 - DNA, 1051 bp, Homo sapiens
  Payload ID: 10057
  Gene Symbol: MARCH1
  Gene Name: membrane-associated ring finger (C3HC4) 1, E3 ubiquitin protein ligase
  ENST ID: ENST00000510786
  CDS Start-End: 10-444
ataagcaacatgaccagcagccacgtttgttgtaattttttaaatatgtggaaaaaaagcaagatatcaaccatgtattaccttaaccaagatgccaaattatctaacttgtttctccaggcaagcagcccaacaacagggacagctcccaggagccagtcaaggttgtctgtctgtccatccactcaggacatctgcagaatctgtcactgcgaaggggatgaagagagccccctcatcacaccctgtcgctgcactgggacactgcgctttgtccaccagtcctgcctccaccagtggataaagagctcagatacacgctgctgtgagctctgcaagtatgacttcataatggagaccaagctcaaacccctccggaagtgtctgtgcttctgcttagtacacgagcactgtctcctaaacggcaaggctatgatcacttaggcacagagagtgaccacagacctgtgcagattccacgtgtgccatagctgttcactgaagagtgggagaaactacagatgaccacaagtgaaaggaggaaaatattctgctctgtcacattccacgtaatcgcgatcacctgtgtggtttggtctttgtatgtattgatagaccggacagcggaggaaatcaagcaaggcaatgacaatggtgtccttgaatggccattttggacaaaactggttgtggtagccattggcttcacaggaggtcttgtcttcatgtacgtacagtgtaaagtctatgttcagttgtggcgcaggctgaaggcctacaaccgtgtgatctttgtacaaaattgcccagacactgccaaaaaactggagaagaacttctcatgtaatgtaaacacagacatcaaagatgctgtggtagtgcctgtaccacaaacaggtgcaaattcactgccatctgcagagggtggcccccctgaagttgtatcagtctgatggaacctgttgggagtttcttcaccgaagaatatctttctagccctcagccactacaaatgacagaagtgatcttgaattatttactcccttcagct

SEQ ID NO: 152826 - DNA, 656 bp, Homo sapiens
  Payload ID: 10057
  Gene Symbol: MARCH1
  Gene Name: membrane-associated ring finger (C3HC4) 1, E3 ubiquitin protein ligase
  ENST ID: ENST00000507270
  CDS Start-End: 234-656
gtccgctagctggggaggagcgctccacccgcaactgacaaaggatgggagaatgcccgcgccccgggatgccggccgcacgcagcctggcggccgcctgagctacttcaccctccgccggaaatgtaccccaaaagaactctgagagaatatactcaactgtcctgctgtgattaaacaagactgctgtattttaatttcagaaattgaaaagggataagaggaaggagaaaatgctgggctggtgtgaagcgatagcccgtaaccctcacagaattccaaacaacacgcgaacacccgagatctcaggggatttggctgacgcctcacaaacctccacattgaatgaaaaatccccagggcgatctgcaagtcgatcaagtaacatttcaaaagcaagcagcccaacaacagggacagctcccaggagccagtcaaggttgtctgtctgtccatccactcaggacatctgcagaatctgtcactgcgaaggggatgaagagagccccctcatcacaccctgtcgctgcactgggacactgcgctttgtccaccagtcctgcctccaccagtggataaagagctcagatacacgctgctgtgagctctgcaagtatgacttcataatggagaccaagctcaaacccctccggaag

SEQ ID NO: 152827 - DNA, 5877 bp, Homo sapiens
  Payload ID: 10057
  Gene Symbol: MARCH1
  Gene Name: membrane-associated ring finger (C3HC4) 1, E3 ubiquitin protein ligase
  Uniprot ID: Q8TCQ1
  ENST ID: ENST00000503008
  CDS Start-End: 978-1847
agaggaggggagaggactggggagccgagccagagccgggctgcctgccacccggctgctcgtccgctagctggggaggagcgctccacccgcaactgacaaaggatgggagaatgcccgcgccccgggatgccggccgcacgcagcctggcggccgcctgagctacttcaccctccgccggtaagtgactgcaaacatcattcattcaatcagcctcactgggagccccttctctccggctggtagtcctgggcggcttgtccctgatcccgagcggggcttggcacagcatcagccctggagggcaggcagcaggtgcctttgcctggtgggtccactggggagcgtggctggggttcgcggcgggtgctgccacccaacctgcgggcggcgggctcgcccagtaggcgcctctctggtgagaggaggcggctccagcccgcagcctggggtagttgctactattggcccccagcgcccgctctgcgcgcgcgccgtttctggcggatccccagtgcgcggcgcgctgtttacaccggcgtggtactagtcacggagccgcacccctcggaaagcgcggagtcgatgacagccacttcacaggctcacgcgctcctagtgtgggcttgaaggggacggggaccgattaccaaaggagagcgctgagtacggaagacacagggcagcctttgtcttgggtttagcgctgatgcgctcaaccctgagtcgggttcactgcaactgttgtgtccgatttcggttccctgcaaccgccctcctgggcgagagatgtcattgtgttcctgcggccagcgggactgagagctgggacttaagacgccaggagggtcctgcgctcacgggaaatgtaccccaaaagaactctgagagaatatactcaactgtcctgctgtgattaaacaagactgctgtattttaatttcagaaattgaaaagggataagaggaaggagaaaatgctgggctggtgtgaagcgatagcccgtaaccctcacagaattccaaacaacacgcgaacacccgagatctcaggggatttggctgacgcctcacaaacctccacattgaatgaaaaatccccagggcgatctgcaagtcgatcaagtaacatttcaaaagcaagcagcccaacaacagggacagctcccaggagccagtcaaggttgtctgtctgtccatccactcaggacatctgcagaatctgtcactgcgaaggggatgaagagagccccctcatcacaccctgtcgctgcactgggacactgcgctttgtccaccagtcctgcctccaccagtggataaagagctcagatacacgctgctgtgagctctgcaagtatgacttcataatggagaccaagctcaaacccctccggaagtgggagaaactacagatgaccacaagtgaaaggaggaaaatattctgctctgtcacattccacgtaatcgcgatcacctgtgtggtttggtctttgtatgtattgatagaccggacagcggaggaaatcaagcaaggcaatgacaatggtgtccttgaatggccattttggacaaaactggttgtggtagccattggcttcacaggaggtcttgtcttcatgtacgtacagtgtaaagtctatgttcagttgtggcgcaggctgaaggcctacaaccgtgtgatctttgtacaaaattgcccagacactgccaaaaaactggagaagaacttctcatgtaatgtaaacacagacatcaaagatgctgtggtagtgcctgtaccacaaacaggtgcaaattcactgccatctgcagagggtggcccccctgaagttgtatcagtctgatggaacctgttgggagtttcttcaccgaagaatatctttctagccctcagccactacaaatgacagaagtgatcttgaattatttactcccttcagctcctcctttctcctactgacacatttttcctgactttgttcaaagaggaaaggagaaaaacaaacagaccaaatgcccaggagcccatgaagtaatagcgtaaagtaaagtatgatatggaaatgtgaagtttgcaagagaatgatttccaagacaattaagaactactggggcaatgaatgcttttaggcagtaatcaaagattaaatggacccatgatactcttcttcacagtaacaggggaaaagttcaagaatacagacttgaattgcgatgtgtattacttctagggccttgtaatgttaactgtctcatctggaaataactaacatatttggttttaagcctgaaattgtctgcattatccctaagtcacattggaagtgaacttggaggatgcatattttgatatgctttgacagctaacagatttgtatggtttagtggagtctggttattttgacagatgcatgttttttttaaatagatgcaatatacatttgaagacattgatatttggaattaattacgtttgtttaagtcacgcaaaagattttcagaaaatgttcggatataattagctctgttaaatacccacagaactgttatcaggtcttatatttattttcatctggttcctctaatacagtgctgtccaatagaaacacaacagccacaaatgcaggccacagatgcaaatatttaacttcccagtagccctattttaaaaagtaaaaataaatgtttgtttgttaaaatgaattttgattttttaaaaacactatatgttatttcaacatgtcatcaatataaaaaattgattgattgattgatagtttacatctgtttcttgaaccaagttttcaaaatccagttggtaatttaaaagtacacttcaacttgaattaactatattggatagcacagccgtaaaattagagactaagcttctgctttatttaacagttgttgagtatttcaaaacagtttaattcattcttttatttcaaagtcacaaaagttagttatgatttttaaaagcattaaattaagtgtcctcattttaaagtcagatgaagttcacatctctaaagggtaaaaatccaaaagtatagaaagataaaacaatcaatctgcctatagcagagttgtgaaataaataaattgttactatgaagtacttacaataggggaataaaattacctatttttgttattaaatcaaatgtgtaaggcttatttcatccatatgaggtgtcaacttgacagatgatgagtaattatgactaagaatctagcccttacttttaaaagctgacaggatttcccttgctcagttagaaaacaaaaatattcaacagattctgtgataagtaattaatcgtttaggtttgacagttgattattgtgttctttgcatattcatgtaaaactgatgtgtgaatgacattgcagtgagctagattaacggtgattatagatacagtagcctgtcaaagaaagatgtcctacattaaaaaaggtgacttatttttgttagctgtcattatttattaacatgaaaaggcaatgatggccataagaaccaaagcatgagtatcacactgcacaaatctgggtatcacatggatgcactttgtaattatcagtgtgcttgttcttcacagatcataggaaaaagggaaaaaaaaaacaaacctttaaatgaggagaaagatggtataaatattagtagtggctgacactgagtccagatagtcttgattcctagaaataaacaaaaggtaaacaatgtcaattttgtgtgtgtgtatggcgtgtgtgtagtcatgtatatatgcggggaaaatgttaaggtattcagtcaggaaacaaaaggtttaaaactcatctttcttaaaacttgttataagcacagggaaagcaaagttgaggtaactaaactgaaccaaaaattctgtataaataaggatataagtaattaacgttttaaaaaacatgtggaccttaaacaaactgtatattaaattcctcttaaatgcccattttaaatatttaagataaatacatttatgaataacaaatctgtgggtgatttaaccatggcaccatatccaagggattaaccttaatgcaattttcctgttaattgtcctaagctttttactaatccattttccctgtgggttagtaatggcaacatgctgcttacagatattcccggggaaaaacatccagacaccagcaaacaaagaaatgttgatttctcttttgtttgctctgaaagtaaaataattatttactttaattaacatggaaaatattgtttaaattctgtacgaacctaaacaagatacgttgcagggctgatttcacagtggaggatgatcggctaaaataaagcctcatttattaagggctacacttttaacactaagaaaacatttctagaataaaaagcaaaggtaagcattattctattaatagtaaaagaggacatgggattttaaaactatacctaaattcttgcaattaacttttatgggcttggacattgttgaaatgagaaaataatataatatagcttcctggcaggttaaaagtcaacacttgattttgctattcttctgactttttgaaaccctgaagttctgaatttcaagcttttaagaagcttttcagcaatggttgtttgtttatggttcaaacatctgaaataactacctgcatttaaaatctaatgttgattattttctttttacattctgtgtggcaatggaacatttgccctttcaaacaataaaacgatttagctttgtggcagtgcttttttgtagactgactgactatacccttcaaaaagaaaaactgctctacggaatgcaaattttgaggcatgtttacctgctcgtggaagaaataaaatggaattgaaaaaaaaaggactaaaattgaagaatgaaattacagttgtgttaaaaaccttggctctttataatcatgaatcttcagtattaaaccagacattgatgctgttaatttttttaaagaactatcactcttatcgtacaggagtaaagattaaattgtaaaagaaagaaattccaattttttaaaaagtaaagcccaaaaggcaattaagcttaagtacaaaaacaaaataaaaatgaacaaaatctaaactaaagtgagcccaacaacctgagatacagcaatgtgtaacctgaaggaagataggtgtagactgaaggagtctttcaaaacaccccagcattaaatctcactctgcgctgcttctacacgtgattatagtcccagacagacgacctcatggttttttatcttgttttacaaaaggtccttgggtactctttaaaacatctattctttggcaggaaaattagctcattagaacaatgacaccattaagggacattataagggtcctggggctgaggtgggaagatttttctatctgccccatatagtttacccttccttgccttgaaaatgaatattatagaacagagtacagctcttaaaagttattagtatcattattattatagttgttatataatactttaattaagaaagatgaaaaccttttttctttcctaagtcagcccaatggtgctattttacatatcaacacagttgaaaggaagtactgttattttgggctgcagtgtttcctccacatctaaagaaagcccattttgaaactggatactgcattaaaacaaagaaggaaaaattattttaactgtgtgcagtttttgaaattaggcatttgtactattttggttttacataattctcttgcattaacaatttactgttttgtgaatcatgtgtactaaagcaaattaagaaaaagaaaataattatctgtgaaagactttgtatattaaacaagtgacgcaaacctta

SEQ ID NO: 152828 - DNA, 3090 bp, Homo sapiens
  Payload ID: 10058
  Gene Symbol: MARCH10
  Gene Name: membrane-associated ring finger (C3HC4) 10, E3 ubiquitin protein ligase
  Uniprot ID: Q8NA82
  ENST ID: ENST00000311269
  CDS Start-End: 276-2702
gaaaccggaggacgcccggtagccgcccccaccgcctccgccccaggcaaggccggccggcgccgcggaaagcagcctcggggaaggaggaggaagaggggcaggtgtagggagtgaagaagcaaaaagaggaggaggaagaggagctcagggccgtccccgcgcaattaatgggcggctcctgcgccctggaccggcccgcccgcccagcccctcgacccctgtagccccggcaggggaggaagggcagacccacaggtcagggattaggaatcatgttgcatgacgcaagggacaggcagaagttcttcagcgatgttcagtatctgcgggacatgcagcataaggtggactctgagtatcaggcttgtctgagacgacaggaatatagaagagacccaaatgagaagaaacgcgatcagttttgggggcaagagacaagttttgagagatcccggttttctagcaggtcatcttccaaacagagttctagtgaggaggatgctctaactgaaccaaggtcatctatcaagatatctgcatttaagtgtgactccaaacttccagcaattgaccaaacatcagtcaagcagaaacataaaagtaccatgactgtaaggaaagcagagaaagtggaccccagcgaaccctctccagcagaccaagcaccaatggttttattaagaaagaggaagccaaacctgaggagatttacagtcagcccagaatcgcacagcccgagagcatctggggacagaagcagacagaaacagcagtggcctgcaaaggtgccggttcccaggggagcagatcaagtagttcaacaagaaggcctgatgtgtaacactaagctgaagaggccaaatcaagagagaagaaacttggtcccatcgtcacagccaatgactgagaacgcccctgatagagccaaaaaaggagacccgagtgctccttcccagagtgagctgcatccagccctgtcccaggccttccaaggaaaaaatagtcctcaagtattgagtgagttctcggggccaccactcacacccaccactgtaggagggccaagaaaggcatcatttaggttccgagatgaagacttttattccattttgtcattgaacagcagaagagaaagcgatgacactgaagaggaaacccagtctgaagaatgtctgtgggttggtgtgcgctcaccctgttctccttcccatcacaaaagaagtagatttggggggacatcgacccctcaggccaaaaataaaaattttgaagaaaatgctgaaaattgcagaggtcattcttcaagaagaagtgagcccagtcatggctcattgagaataagcaatgcaatggagccagcaacagagcggccttctgctgggcaaaggttgtcccaagaccccgggctgcctgatagggaatctgctacagagaaggacagaggtggcagtgaaaatgcgaaaaagagccctctttcgtgggacaccaaatccgagcccagacaagaggttggtgtcaatgctgaaaatgtatggagtgattgtatttctgtggaacataggcctggcacccatgattctgaaggatactggaaagactatttaaacagttctcaaaattctcttgactactttatttctggcagaccaatatctccaagatcatcagtgaattcatcctataaccctcctgcatcattcatgcattctgctctgagagatgatattccagtagacttgtcaatgtcatcgacttcagttcacagctcagactcagagggaaactcagggtttcatgtttgccaaccactgtctcccattagaaataggactccatttgccagtgccgaaaaccataattatttcccagtaaacagtgcacacgaatttgctgtcagggaagcagaagatactactttaacaagccagcctcagggggctccactatatacagatctcttactaaatccacagggcaatttgtccttagtggattcttccagctcctctccatcaagaatgaactcagaaggccatttgcatgtgtctgggtctctgcaagaaaatacaccatttactttctttgcagtgtctcatttcccaaatcaaaatgataatgggagcaggatggcagcctctggtttcacagatgaaaaggaaaccagtaagataaaggcagaccctgagaaactcaagaaattgcaagaaagtctcctggaggaggactccgaggaggagggagacttgtgtcgcatctgtcagatagccgggggttccccaagcaaccccctcctggagccttgcggctgtgtgggaagcctgcagtttgttcatcaagagtgcctgaaaaagtggctgaaagtgaaaataacatcaggagcagatcttggtgccgtgaagacctgtgagatgtgtaagcaaggcctgctggttgacctgggtgactttaacatgattgagttctaccagaagcaccagcaatctcaggcacaaaacgagctgatgaattcaggcttgtacctggtgctgctgcttcacctctatgagcagaggtttgcagaactcatgaggctcaaccacaaccaggtggaaagagagaggttgtcaagaaattacccacaacccagaacagaggaaaatgaaaattcggagttgggagatggaaatgaaggcagcatttctcaaagccaggtcgtctagcaaggaagccaactgtggagctcggcggagacctctcccgccagcccttctttctacgtccccaagtgcctccctccctcctcctctttactgaaactgaaaccaaagcgttcacagttagattttcacctcgtgccactctcttttggggtctggcttgagcatctatgggcagccacagcgaccagtctagtcccagacagcacaggtcaagcagcgtgggactgtggagcccctggcaggctggcctggtgctgcccccttagcccagaagccctgccaggtccagtggcctggggtcccactgctgagggcacctgccaggcctcactccaccctgaatggactcgagccatgtattcattcagtaaactgacattattctccc

SEQ ID NO: 152829 - DNA, 3057 bp, Homo sapiens
  Payload ID: 10058
  Gene Symbol: MARCH10
  Gene Name: membrane-associated ring finger (C3HC4) 10, E3 ubiquitin protein ligase
  Uniprot ID: Q8NA82
  ENST ID: ENST00000456609
  CDS Start-End: 242-2668
gaggccaagaagaattactcgctcttgctttcagcaaggcaggaccccctccttccttctccacctgcctccaactccctcctcctttctctctccctacttaatatggcttcttatgttgatttctaaagcacagatttggcacaagacattatcaccagaaagacttaaaacagaagtgtgcataaccatgagtgggttttaaattaagaagcagttcaaaggtcagggattaggaatcatgttgcatgacgcaagggacaggcagaagttcttcagcgatgttcagtatctgcgggacatgcagcataaggtggactctgagtatcaggcttgtctgagacgacaggaatatagaagagacccaaatgagaagaaacgcgatcagttttgggggcaagagacaagttttgagagatcccggttttctagcaggtcatcttccaaacagagttctagtgaggaggatgctctaactgaaccaaggtcatctatcaagatatctgcatttaagtgtgactccaaacttccagcaattgaccaaacatcagtcaagcagaaacataaaagtaccatgactgtaaggaaagcagagaaagtggaccccagcgaaccctctccagcagaccaagcaccaatggttttattaagaaagaggaagccaaacctgaggagatttacagtcagcccagaatcgcacagcccgagagcatctggggacagaagcagacagaaacagcagtggcctgcaaaggtgccggttcccaggggagcagatcaagtagttcaacaagaaggcctgatgtgtaacactaagctgaagaggccaaatcaagagagaagaaacttggtcccatcgtcacagccaatgactgagaacgcccctgatagagccaaaaaaggagacccgagtgctccttcccagagtgagctgcatccagccctgtcccaggccttccaaggaaaaaatagtcctcaagtattgagtgagttctcggggccaccactcacacccaccactgtaggagggccaagaaaggcatcatttaggttccgagatgaagacttttattccattttgtcattgaacagcagaagagaaagcgatgacactgaagaggaaacccagtctgaagaatgtctgtgggttggtgtgcgctcaccctgttctccttcccatcacaaaagaagtagatttggggggacatcgacccctcaggccaaaaataaaaattttgaagaaaatgctgaaaattgcagaggtcattcttcaagaagaagtgagcccagtcatggctcattgagaataagcaatgcaatggagccagcaacagagcggccttctgctgggcaaaggttgtcccaagaccccgggctgcctgatagggaatctgctacagagaaggacagaggtggcagtgaaaatgcgaaaaagagccctctttcgtgggacaccaaatccgagcccagacaagaggttggtgtcaatgctgaaaatgtatggagtgattgtatttctgtggaacataggcctggcacccatgattctgaaggatactggaaagactatttaaacagttctcaaaattctcttgactactttatttctggcagaccaatatctccaagatcatcagtgaattcatcctataaccctcctgcatcattcatgcattctgctctgagagatgatattccagtagacttgtcaatgtcatcgacttcagttcacagctcagactcagagggaaactcagggtttcatgtttgccaaccactgtctcccattagaaataggactccatttgccagtgccgaaaaccataattatttcccagtaaacagtgcacacgaatttgctgtcagggaagcagaagatactactttaacaagccagcctcagggggctccactatatacagatctcttactaaatccacagggcaatttgtccttagtggattcttccagctcctctccatcaagaatgaactcagaaggccatttgcatgtgtctgggtctctgcaagaaaatacaccatttactttctttgcagtgtctcatttcccaaatcaaaatgataatgggagcaggatggcagcctctggtttcacagatgaaaaggaaaccagtaagataaaggcagaccctgagaaactcaagaaattgcaagaaagtctcctggaggaggactccgaggaggagggagacttgtgtcgcatctgtcagatagccgggggttccccaagcaaccccctcctggagccttgcggctgtgtgggaagcctgcagtttgttcatcaagagtgcctgaaaaagtggctgaaagtgaaaataacatcaggagcagatcttggtgccgtgaagacctgtgagatgtgtaagcaaggcctgctggttgacctgggtgactttaacatgattgagttctaccagaagcaccagcaatctcaggcacaaaacgagctgatgaattcaggcttgtacctggtgctgctgcttcacctctatgagcagaggtttgcagaactcatgaggctcaaccacaaccaggtggaaagagagaggttgtcaagaaattacccacaacccagaacagaggaaaatgaaaattcggagttgggagatggaaatgaaggcagcatttctcaaagccaggtcgtctagcaaggaagccaactgtggagctcggcggagacctctcccgccagcccttctttctacgtccccaagtgcctccctccctcctcctctttactgaaactgaaaccaaagcgttcacagttagattttcacctcgtgccactctcttttggggtctggcttgagcatctatgggcagccacagcgaccagtctagtcccagacagcacaggtcaagcagcgtgggactgtggagcccctggcaggctggcctggtgctgcccccttagcccagaagccctgccaggtccagtggcctggggtcccactgctgagggcacctgccaggcctcactccaccctgaatggactcgagccatgtattcattcagtaaactgacattattctccca

SEQ ID NO: 152830 - DNA, 3338 bp, Homo sapiens
  Payload ID: 10058
  Gene Symbol: MARCH10
  Gene Name: membrane-associated ring finger (C3HC4) 10, E3 ubiquitin protein ligase
  ENST ID: ENST00000544856
  CDS Start-End: 380-2779
aggcaaggccggccggcgccgcggaaagcagcctcggggaaggaggaggaagaggggcaggtgtagggagtgaagaagcaaaaagaggaggaggaagaggagctcagggccgtccccgcgcaattaatgggcggctcctgcgccctggaccggcccgcccgcccagcccctcgacccctgtagccccggcaggggaggaagggcagacccacagggccagatgataaaccatgtgagatttcataactaccagaccagacgctgggtcaccatgagtccggggcggcctgactctgccaatatctgcacaactgaataaacaggaggagcgagggaatgccgcagaacgtatacacctgaaggtcagggattaggaatcatgttgcatgacgcaagggacaggcagaagttcttcagcgatgttcagtatctgcgggacatgcagcataaggtggactctgagtatcaggcttgtctgagacgacaggaatatagaagagacccaaatgagaagaaacgcgatcagttttgggggcaagagacaagttttgagagatcccggttttctagcaggtcatcttccaaacagagttctagtgaggaggatgctctaactgaaccaaggtcatctatcaagatatctgcatttaagtgtgactccaaacttccagcaattgaccaaacatcagtcaagcagaaacataaaagtaccatgactgtaaggaaagcagagaaagtggaccccagcgaaccctctccagaccaagcaccaatggttttattaagaaagaggaagccaaacctgaggagatttacagtcagcccagaatcgcacagcccgagagcatctggggacagaagcagacagaaacagcagtggcctgcaaaggtgccggttcccaggggagcagatcaagtagttcaacaagaaggcctgatgtgtaacactaagctgaagaggccaaatcaagagagaagaaacttggtcccatcgtcacagccaatgactgagaacgcccctgatagagccaaaaaaggagacccgagtgctccttcccagagtgagctgcatccagccctgtcccaggccttccaaggaaaaaatagtcctcaagtattgagtgagttctcggggccaccactcacacccaccactgtaggagggccaagaaaggcatcatttaggttccgagatgaagacttttattccattttgtcattgaacagcagaagagaaagcgatgacactgaagaggaaacccagtctgaagaatgtctgtgggttggtgtgcgctcaccctgttctccttcccatcacaaaagaagtagatttggggggacatcgacccctcaggccaaaaataaaaattttgaagaaaatgctgaaaattgcagaggtcattcttcaagaagaagtgagcccagtcatggctcattgagaataagcaatgcaatggagccagcaacagagcggccttctgctgggcaaaggttgtcccaagaccccgggctgcctgatagggaatctgctacagagaaggacagaggtggcagtgaaaatgcgaaaaagagccctctttcgtgggacaccaaatccgagcccagacaagaggttggtgtcaatgctgaaaatgtatggagtgattgtatttctgtggaacataggcctggcacccatgattctgaaggatactggaaagactatttaaacagttctcaaaattctcttgactactttatttctggcagaccaatatctccaagatcatcagtgaattcatcctataaccctcctgcatcattcatgcattctgctctgagagatgatattccagtagacttgtcaatgtcatcgacttcagttcacagctcagactcagagggaaactcagggtttcatgtttgccaaccactgtctcccattagaaataggactccatttgccagtgccgaaaaccataattatttcccagtaaacagtgcacacgaatttgctgtcagggaagcagaagatactactttaacaagccagcctcagggggctccactatatacagatctcttactaaatccacagggcaatttgtccttagtggattcttccagctcctctccatcaagaatgaactcagaaggccatttgcatgtgtctgggtctctgcaagaaaatacaccatttactttctttgcagtgtctcatttcccaaatcaaaatgataatgggagcaggatggcagcctctggtttcacagatgaaaaggaaaccagtaagataaaggcagaccctgagaaactcaagaaattgcaagaaagtctcctggaggaggactccgaggaggagggagacttgtgtcgcatctgtcagatagccgggggttccccaagcaaccccctcctggagccttgcggctgtgtgggaagcctgcagtttgttcatcaagagtgcctgaaaaagtggctgaaagtgaaaataacatcaggagcagatcttggtgccgtgaagacctgtgagatgtgtaagcaaggcctgctggttgacctgggtgactttaacatgattgagttctaccagaagcaccagcaatctcaggcacaaaacgagctgatgaattcaggcttgtacctggtgctgctgcttcacctctatgagcagaggtttgcagaactcatgaggctcaaccacaaccaggtggaaagagagaggttgtcaagaaattacccacaacccagaacagaggaaaatgaaagtaggttttgggggccagtcctgccattttgagggtgtttgctaaattactctttttctgtgactgtgtggaaccaaatgccatggaaggaaggaatgaccaccacccagaggcaaaaataaccccgcaaagcttgggaaagtcagccgcagcaaacaatcaggaaggcgaggccaagttcactggatgcagagcagataagaattttaattcatcctgaacgcaaggaaaggcgccaacaaagggaagaggttatcttccggcatgagataagatttgttccttttccttgctgggattctccagcgtccagcacttggagagtttgggggttggtttttttactgccaggattcctctaggaaaaccctccccaagccctggcaggggctgtctggcccttacctgaagggaccacattcactcacaagctagtggccttggtggatttggggtctgctgaattcagaggttgaacaaagcaaacaggtctcccaagaaagggccctcaaagcgggcaagacggctctctgcaaacaggttcgagaaaagccttctccctgttcctttttccattaaaaaaaaaaaaaa

SEQ ID NO: 152831 - DNA, 559 bp, Homo sapiens
  Payload ID: 10058
  Gene Symbol: MARCH10
  Gene Name: membrane-associated ring finger (C3HC4) 10, E3 ubiquitin protein ligase
  ENST ID: ENST00000583803
  CDS Start-End: 377-559
attactcgctcttgctttcagcaaggcaggaccccctccttccttctccacctgcctccaactccctcctcctttctctctccctacttaatatggcttcttatgttgatttctaaagcacagatttggcacaagacattatcaccagaaagacttaaaacagaagtgtgcataaccatgagtgggttttaaattaagaagcagttcaaagggccagatgataaaccatgtgagatttcataactaccagaccagacgctgggtcaccatgagtccggggcggcctgactctgccaatatctgcacaactgaataaacaggaggagcgagggaatgccgcagaacgtatacacctgaaggtcagggattaggaatcatgttgcatgacgcaagggacaggcagaagttcttcagcgatgttcagtatctgcgggacatgcagcataaggtggactctgagtatcaggcttgtctgagacgacaggaatatagaagagacccaaatgagaagaaacgcgatcagttttgggggcaagagacaagttttgagagatcccgg

SEQ ID NO: 152832 - DNA, 3214 bp, Homo sapiens
  Payload ID: 10058
  Gene Symbol: MARCH10
  Gene Name: membrane-associated ring finger (C3HC4) 10, E3 ubiquitin protein ligase
  ENST ID: ENST00000583600
  CDS Start-End: 286-2826
ggttgctagggaaaccggaggacgcccggtagccgcccccaccgcctccgccccaggcaaggccggccggcgccgcggaaagcagcctcggggaaggaggaggaagaggggcaggtgtagggagtgaagaagcaaaaagaggaggaggaagaggagctcagggccgtccccgcgcaattaatgggcggctcctgcgccctggaccggcccgcccgcccagcccctcgacccctgtagccccggcaggggaggaagggcagacccacaggtcagggattaggaatcatgttgcatgacgcaagggacaggcagaagttcttcagcgatgttcagtatctgcgggacatgcagcataaggtggactctgagtatcaggcttgtctgagacgacaggaatatagaagagacccaaatgagaagaaacgcgatcagttttgggggcaagagacaagttttgagagatcccggttttctagcaggtcatcttccaaacagagttctagtgaggaggatgctctaactgaaccaaggtcatctatcaagatatctgcatttaagtgtgactccaaacttccagcaattgaccaaacatcagtcaagcagaaacataaaagtaccatgactgtaaggaaagcagagaaagtggaccccagcgaaccctctccagcagagtcagagccgacttggtggaataaaccggaaacagacctcggaggaccttctggctggtgcagtctggggaagaaaggtcccatgagcagaagcatccctccctgtgaagcagaccaagcaccaatggttttattaagaaagaggaagccaaacctgaggagatttacagtcagcccagaatcgcacagcccgagagcatctggggacagaagcagacagaaacagcagtggcctgcaaaggtgccggttcccaggggagcagatcaagtagttcaacaagaaggcctgatgtgtaacactaagctgaagaggccaaatcaagagagaagaaacttggtcccatcgtcacagccaatgactgagaacgcccctgatagagccaaaaaaggagacccgagtgctccttcccagagtgagctgcatccagccctgtcccaggccttccaaggaaaaaatagtcctcaagtattgagtgagttctcggggccaccactcacacccaccactgtaggagggccaagaaaggcatcatttaggttccgagatgaagacttttattccattttgtcattgaacagcagaagagaaagcgatgacactgaagaggaaacccagtctgaagaatgtctgtgggttggtgtgcgctcaccctgttctccttcccatcacaaaagaagtagatttggggggacatcgacccctcaggccaaaaataaaaattttgaagaaaatgctgaaaattgcagaggtcattcttcaagaagaagtgagcccagtcatggctcattgagaataagcaatgcaatggagccagcaacagagcggccttctgctgggcaaaggttgtcccaagaccccgggctgcctgatagggaatctgctacagagaaggacagaggtggcagtgaaaatgcgaaaaagagccctctttcgtgggacaccaaatccgagcccagacaagaggttggtgtcaatgctgaaaatgtatggagtgattgtatttctgtggaacataggcctggcacccatgattctgaaggatactggaaagactatttaaacagttctcaaaattctcttgactactttatttctggcagaccaatatctccaagatcatcagtgaattcatcctataaccctcctgcatcattcatgcattctgctctgagagatgatattccagtagacttgtcaatgtcatcgacttcagttcacagctcagactcagagggaaactcagggtttcatgtttgccaaccactgtctcccattagaaataggactccatttgccagtgccgaaaaccataattatttcccagtaaacagtgcacacgaatttgctgtcagggaagcagaagatactactttaacaagccagcctcagggggctccactatatacagatctcttactaaatccacagggcaatttgtccttagtggattcttccagctcctctccatcaagaatgaactcagaaggccatttgcatgtgtctgggtctctgcaagaaaatacaccatttactttctttgcagtgtctcatttcccaaatcaaaatgataatgggagcaggatggcagcctctggtttcacagatgaaaaggaaaccagtaagataaaggcagaccctgagaaactcaagaaattgcaagaaagtctcctggaggaggactccgaggaggagggagacttgtgtcgcatctgtcagatagccgggggttccccaagcaaccccctcctggagccttgcggctgtgtgggaagcctgcagtttgttcatcaagagtgcctgaaaaagtggctgaaagtgaaaataacatcaggagcagatcttggtgccgtgaagacctgtgagatgtgtaagcaaggcctgctggttgacctgggtgactttaacatgattgagttctaccagaagcaccagcaatctcaggcacaaaacgagctgatgaattcaggcttgtacctggtgctgctgcttcacctctatgagcagaggtttgcagaactcatgaggctcaaccacaaccaggtggaaagagagaggttgtcaagaaattacccacaacccagaacagaggaaaatgaaaattcggagttgggagatggaaatgaaggcagcatttctcaaagccaggtcgtctagcaaggaagccaactgtggagctcggcggagacctctcccgccagcccttctttctacgtccccaagtgcctccctccctcctcctctttactgaaactgaaaccaaagcgttcacagttagattttcacctcgtgccactctcttttggggtctggcttgagcatctatgggcagccacagcgaccagtctagtcccagacagcacaggtcaagcagcgtgggactgtggagcccctggcaggctggcctggtgctgcccccttagcccagaagccctgccaggtccagtggcctggggtcccactgctgagggcacctgccaggcctcactccaccctgaatggactcgagccatgtattcattcagtaaactgacattattctccc

SEQ ID NO: 152833 - DNA, 718 bp, Homo sapiens
  Payload ID: 10058
  Gene Symbol: MARCH10
  Gene Name: membrane-associated ring finger (C3HC4) 10, E3 ubiquitin protein ligase
  ENST ID: ENST00000582568
  CDS Start-End: 1-495
gatgctctaactgaaccaaggtcatctatcaagatatctgcatttaagtgtgactccaaacttccagcaattgaccaaacatcagtcaagcagaaacataaaagtaccatgactgtaaggaaagcagagaaagtggaccccagcgaaccctctccaggtggcagcagcaagcaccccctgttctgtgttgaatacaccccttactgctccgtctttgctttctcccctgtcctgcagcccaataccaattactgctgcctcctcctgccactagtgccacctgcctccccagtggcccaggaacctcctgactgtcctctccctctggttaccgttccctccttcacaagcaccgcttccacctccccggaccccgtgcccgagtcccccgccgtgctgtgctacttccccatctcctgccccactccggctgagacccctgtgctgtgccttcagggccccagaaggcccagtaggatttacctcatgtggtaagtcactcttgcaaggcacacagcacagcgcagtcggggagaggggacttcgggcttccggaaggcaggtggacaggagaggggccagaggccacaccaagaacaataccaggcggcgtggtgttcgggggagcaggaagatgggacagcgtggccactgcactggggctgcaccttctagcgccaaaggagcgagcgaccaataaaatcccatcctctctgga

SEQ ID NO: 152834 - DNA, 2377 bp, Homo sapiens
  Payload ID: 10058
  Gene Symbol: MARCH10
  Gene Name: membrane-associated ring finger (C3HC4) 10, E3 ubiquitin protein ligase
  ENST ID: ENST00000580520
  CDS Start-End: 1-2082
atggttttattaagaaagaggaagccaaacctgaggagatttacagtcagcccagaatcgcacagcccgagagcatctggggacagaagcagacagaaacagcagtggcctgcaaaggtgccggttcccaggggagcagatcaagtagttcaacaagaaggcctgatgtgtaacactaagctgaagaggccaaatcaagagagaagaaacttggtcccatcgtcacagccaatgactgagaacgcccctgatagagccaaaaaaggagacccgagtgctccttcccagagtgagctgcatccagccctgtcccaggccttccaaggaaaaaatagtcctcaagtattgagtgagttctcggggccaccactcacacccaccactgtaggagggccaagaaaggcatcatttaggttccgagatgaagacttttattccattttgtcattgaacagcagaagagaaagcgatgacactgaagaggaaacccagtctgaagaatgtctgtgggttggtgtgcgctcaccctgttctccttcccatcacaaaagaagtagatttggggggacatcgacccctcaggccaaaaataaaaattttgaagaaaatgctgaaaattgcagaggtcattcttcaagaagaagtgagcccagtcatggctcattgagaataagcaatgcaatggagccagcaacagagcggccttctgctgggcaaaggttgtcccaagaccccgggctgcctgatagggaatctgctacagagaaggacagaggtggcagtgaaaatgcgaaaaagagccctctttcgtgggacaccaaatccgagcccagacaagaggttggtgtcaatgctgaaaatgtatggagtgattgtatttctgtggaacataggcctggcacccatgattctgaaggatactggaaagactatttaaacagttctcaaaattctcttgactactttatttctggcagaccaatatctccaagatcatcagtgaattcatcctataaccctcctgcatcattcatgcattctgctctgagagatgatattccagtagacttgtcaatgtcatcgacttcagttcacagctcagactcagagggaaactcagggtttcatgtttgccaaccactgtctcccattagaaataggactccatttgccagtgccgaaaaccataattatttcccagtaaacagtgcacacgaatttgctgtcagggaagcagaagatactactttaacaagccagcctcagggggctccactatatacagatctcttactaaatccacagggcaatttgtccttagtggattcttccagctcctctccatcaagaatgaactcagaaggccatttgcatgtgtctgggtctctgcaagaaaatacaccatttactttctttgcagtgtctcatttcccaaatcaaaatgataatgggagcaggatggcagcctctggtttcacagatgaaaaggaaaccagtaagataaaggcagaccctgagaaactcaagaaattgcaagaaagtctcctggaggaggactccgaggaggagggagacttgtgtcgcatctgtcagatagccgggggttccccaagcaaccccctcctggagccttgcggctgtgtgggaagcctgcagtttgttcatcaagagtgcctgaaaaagtggctgaaagtgaaaataacatcaggagcagatcttggtgccgtgaagacctgtgagatgtgtaagcaaggcctgctggttgacctgggtgactttaacatgattgagttctaccagaagcaccagcaatctcaggcacaaaacgagctgatgaattcaggcttgtacctggtgctgctgcttcacctctatgagcagaggtttgcagaactcatgaggctcaaccacaaccaggtggaaagagagaggattcggagttgggagatggaaatgaaggcagcatttctcaaagccaggtcgtctagcaaggaagccaactgtggagctcggcggagacctctcccgccagcccttctttctacgtccccaagtgcctccctccctcctcctctttactgaaactgaaaccaaagcgttcacagttagattttcacctcgtgccactctcttttggggtctggcttgagcatctatgggcagccacagcgaccagtctagtcccagacagcacaggtcaagcagcgtgggactgtggagcccctggcaggctggcctggtgctgcccccttagcccagaagccctgccaggtccagtggcctggggtcccactgctgagggcacctgccaggcctcactccaccctgaatggactcgagccatgtattcattcagtaaactgacattattctccca

SEQ ID NO: 152835 - DNA, 1741 bp, Homo sapiens
  Payload ID: 10059
  Gene Symbol: MARCH11
  Gene Name: membrane-associated ring finger (C3HC4) 11
  Uniprot ID: A6NNE9
  ENST ID: ENST00000332432
  CDS Start-End: 201-1409
ctccaccgaacggccgcgcctgccgccgccgcagctgcagaaccttccgcatcccctccccgtcccgccccctagccccaggcgtccgggccccctccctccttttcccctctccctcccgccccctccgcgctctctttccctgcagccagagcccggcccgccagccgggccggcaggagggcggcggcggcacaaccatgagctttgagggcggccacggcggcagtcggtgtcgcggggcggagagcggggacgccgagcctcccccgcaacctcccccgccgccgccgccgacgccgccgccgggagagccggccccggtccccgcggccccgcgctacctgccgccgctgcccgcgtcccccgagacccccgagcgcgccgcggggccaagcgagccgctaggggaggtggccccgcggtgcaggggagcggacgagctgccgcctccgcccctgcccctgcagcccgccggccaggaagtggcggcggccggcgactccggggaaggtccgaggcgcctcccggaggcggcagcagcgaaaggcggccccggggagtctgaggccggcgcgggcggcgagcgcgagcggcggggcgccggagaccagcccgagacgcgctcggtgtgcagcagccgcagcagcagcagtggcggcggcgaccagcgcgctgggcaccagcaccagcaccaccagcccatctgcaagatctgcttccagggcgcggagcagggtgagttgttgaacccctgccgatgtgatgggtcagttcggtatacacatcagctgtgcctgctaaaatggatcagtgagagaggttcctggacctgtgaactttgctgttatagataccatgttatagccattaaaatgaaacaaccttgccagtggcagagcatttctataacactggttgagaaagttcagatgattgctgtaatcctaggatccctgttcttaatagccagtgtgacttggctcctctggtcagccttcagcccctatgcagtgtggcagaggaaggacatcctttttcagatctgctatggaatgtatggttttatggatctagtgtgcataggtctcattgttcatgaaggagctgcagtttacagagtgtttaagcgctggcgagctgtgaatttgcactgggatgtgttaaattatgacaaagccacagacatcgaagaaagcagccggggagagtcttccacaagtaggactttgtggttgccattgacagctctgcggaacagaaacttggtccacccaactcagttaacctcaccaaggtttcagtgtggctatgtgttattgcacctgttcaatcggatgaggccccatgaagacttatcagaagataacagctcgggggaggttgtgatgagagtgacttcagtgtgacaaaagcataagatgatgcagtgtggaccaccctgcacattttgcaatgtaattgcagtgaatggcaaaaccatagcacttctaaaaacacatctatgaactttttaaaatttatgctttttatatgaacatttgaattgcaaatacatttttctgagaaaaagagtcctcttgttcttcgttgtctggtttgtcacatcttttataagttggtacttgaaatcattatacatataatttaactatacttggttaaaagaataatgaaagttatccttaaggccaaaactattttttcttgcttgttttaaatatatttttatgaaagcttt

SEQ ID NO: 152836 - DNA, 584 bp, Homo sapiens
  Payload ID: 10059
  Gene Symbol: MARCH11
  Gene Name: membrane-associated ring finger (C3HC4) 11
  ENST ID: ENST00000507111
  CDS Start-End: 1-164
agctgtgcctgctaaaatggatcagtgagagaggttcctggacctgtgaactttgctgttatagataccatgttatagccattaaaatgaaacaaccttgccaggtctcattgttcatgaaggagctgcagtttacagagtgtttaagcgctggcgagctgtgaatttgcactgggatgtgttaaattatgacaaagccacagacatcgaagaaagcagccggggagagtcttccacaagtaggactttgtggttgccattgacagctctgcggaacagaaacttggtccacccaactcagttaacctcaccaaggtttcagtgtggctatgtgttattgcacctgttcaatcggatgaggccccatgaagacttatcagaagataacagctcgggggaggttgtgatgagagtgacttcagtgtgacaaaagcataagatgatgcagtgtggaccaccctgcacattttgcaatgtaattgcagtgaatggcaaaaccatagcacttctaaaaacacatctatgaactttttaaaatttatgctttttatatgaacatttgaattgcaaatacatttttctga

SEQ ID NO: 152837 - DNA, 1376 bp, Homo sapiens
  Payload ID: 10060
  Gene Symbol: MARCH2
  Gene Name: membrane-associated ring finger (C3HC4) 2, E3 ubiquitin protein ligase
  Uniprot ID: Q9P0N8
  ENST ID: ENST00000215555
  CDS Start-End: 171-911
ccggacgcaggtgccggccggagcggagctagtggcgccgacgggccgggccgggccgggaccggggccgaggcgaaccgaggggcctgtgcggccgcccggcccggccgcggatcaggctcctggaaccatgggcctcaggccctgaggatacggggctcccggtggccatgacgacgggtgactgctgccacctccccggctccctgtgtgactgctccggcagccctgccttctccaaggtcgtggaggctacgggcctcggaccgccccagtatgtggcacaggtgacttcaagggatggccggctcctctccaccgtcatccgtgccttggacacaccgagtgatggtcctttctgccggatctgccatgagggagcgaacggggagtgcttgctgtccccgtgtggctgcaccggcacgctgggtgccgtgcataagagctgtctggagaagtggctttcctcatctaacaccagctactgcgagctgtgccacacggagtttgcagtggagaaacggcctcgacccctcacagagtggctgaaggacccggggccgcggacggagaagcggacactgtgctgcgacatggtgtgtttcctgttcatcacaccgctggccgccatctcaggctggttgtgcctgcgcggggcccaggaccacctccggctccacagccagctggaggccgtgggtctcattgccctcaccatcgccctcttcaccatctatgtcctctggacgctggtctccttccgctaccactgccagctgtactccgagtggagaaagaccaaccagaaagttcgcctgaagatccgggaggcggacagccccgagggcccccagcattctccactggcagctggactcctgaagaaggtggcagaggagacaccagtatgaatgctgggctctccggaccctgcagcagagaggccagaggtagctggtgataccctgtcctgtggaaggacttccacttcaacacttccacttcaacagttcccgcacggcctgaacgcttcttaggccaagagacaccatgcagagcctagtctgtgatcctgtgtgaagatattttcagggtttttttttttttttttttgcatatggaggacaggtggacatggtcctgagctctggacggagcaggcaccctgatctcattctgaggtccacatggcaccttctgggccagcagctgtggccggtgtatcaagggcgcccttaaagctggaacattccagcaagcttcttgcgcttctctgcacccggcaggcccactttcctggcaccctcgactttatataaaagttgcactgcgtttcaaaaacccacccctgaatgaataaaaggagccctggctgg

SEQ ID NO: 152838 - DNA, 1192 bp, Homo sapiens
  Payload ID: 10060
  Gene Symbol: MARCH2
  Gene Name: membrane-associated ring finger (C3HC4) 2, E3 ubiquitin protein ligase
  Uniprot ID: Q9P0N8
  ENST ID: ENST00000381035
  CDS Start-End: 204-734
ggtccgcggcgctgtcggctcggcgggcggtgcccggacgcaggtgccggccggagcggagctagtggcgccgacgggccgggccgggccgggaccggggccgaggcgaaccgaggggcctgtgcggccgcccggcccggccgcggatcaggctcctggaaccatgggcctcaggccctgaggatacggggctcccggtggccatgacgacgggtgactgctgccacctccccggctccctgtgtgactgctccggcagccctgccttctccaaggtcgtggaggctacgggcctcggaccgccccagtatgtggcacaggtgacttcaagggatggccggctcctctccaccgtcatccgtgccttggacacaccgagtgatggtcctttctgccggatctgccatgagggagcgaacggggagtgcttgctgtccccgtgtggctgcaccggcacgctgggtgccgtgcataagagctgtctggagaagtggctttcctcatctaacaccagctactgcgagctgtgccacacggagtttgcagtggagaaacggcctcgacccctcacagaggtctccttccgctaccactgccagctgtactccgagtggagaaagaccaaccagaaagttcgcctgaagatccgggaggcggacagccccgagggcccccagcattctccactggcagctggactcctgaagaaggtggcagaggagacaccagtatgaatgctgggctctccggaccctgcagcagagaggccagaggtagctggtgataccctgtcctgtggaaggacttccacttcaacacttccacttcaacagttcccgcacggcctgaacgcttcttaggccaagagacaccatgcagagcctagtctgtgatcctgtgtgaagatattttcagggtttttttttttttttttttgcatatggaggacaggtggacatggtcctgagctctggacggagcaggcaccctgatctcattctgaggtccacatggcaccttctgggccagcagctgtggccggtgtatcaagggcgcccttaaagctggaacattccagcaagcttcttgcgcttctctgcacccggcaggcccactttcctggcaccctcgactttatataaaagttgcactgcgtttcaaaaacccacccctgaatgaataaaaggagccc

SEQ ID NO: 152839 - DNA, 747 bp, Homo sapiens
  Payload ID: 10060
  Gene Symbol: MARCH2
  Gene Name: membrane-associated ring finger (C3HC4) 2, E3 ubiquitin protein ligase
  ENST ID: ENST00000601283
  CDS Start-End: 440-562
ggacgcaggtgccggccggagcggagctagtggcgccgacgggccgggccgggccgggaccggggccgaggcgaaccgaggggcctgtgcggccgcccggcccggccgcggatcagagactggagactgggtcttgctctgttacccaggctggagtgcagtggtgtgatcatagctcactacagccttgaactcctgggctcaagaggttgaggctccctcctcagcctcccaagtagctgggactacaggctttcagcaccatgcctggctaattcaaaaaaaccttcagagagatagggtctctctatgttgccctagctcgtctcaaactcctggcctcaagtgatcctcctgcttggacctcccaaagcgctgggattacaggctcctggaaccatgggcctcaggccctgaggatacggggctcccggtggccatgacgacgggtgactgctgccacctccccggctccctgtgtgactgctccggcagccctgccttctccaaggtcgtggaggctacgggcctcggaccgccccagtatgtgacaccagtatgaatgctgggctctccggaccctgcagcagagaggccagaggtagctggtgataccctgtcctgtggaaggacttccacttcaacacttccacttcaacagttcccgcacggcctgaacgcttcttaggccaagagacaccatgcagagcctagtctgtgatcctgtgtgaagatattttcagggtt

SEQ ID NO: 152840 - DNA, 865 bp, Homo sapiens
  Payload ID: 10060
  Gene Symbol: MARCH2
  Gene Name: membrane-associated ring finger (C3HC4) 2, E3 ubiquitin protein ligase
  ENST ID: ENST00000595213
  CDS Start-End: 697-865
taggcacgggcctgcaggtagggccggaggacgccagtccgcgggccggccccgggttcgaggccggagctcggcacccgggcgggacggctgggctcgatcccttggccacagccttctcggggacgcggggacctcagttcccgtgtcaaggccggtgggaggtctccggggtccggcacacataggcgcctctccgagcctcggtttccccacctgtgaaactgggtcatcccattgccaacctgatggggcttctgggaggattcaggaggtggctggtgcagaaaacgcctgacacacagtaggcaactgctaagtggccaatgcccttccccaacctccttctcagagcggctctgcctgcaaaataagactggagactgggtcttgctctgttacccaggctggagtgcagtggtgtgatcatagctcactacagccttgaactcctgggctcaagaggttgaggctccctcctcagcctcccaagtagctgggactacaggctttcagcaccatgcctggctaattcaaaaaaaccttcagagagatagggtctctctatgttgccctagctcgtctcaaactcctggcctcaagtgatcctcctgcttggacctcccaaagcgctgggattacaggctcctggaaccatgggcctcaggccctgaggatacggggctcccggtggccatgacgacgggtgactgctgccacctccccggctccctgtgtgactgctccggcagccctgccttctccaaggtcgtggaggctacgggcctcggaccgccccagtatgtggcacaggtgacttcaagggatggccggctcctctccaccgtcatccgtgccttggaca

SEQ ID NO: 152841 - DNA, 1667 bp, Homo sapiens
  Payload ID: 10060
  Gene Symbol: MARCH2
  Gene Name: membrane-associated ring finger (C3HC4) 2, E3 ubiquitin protein ligase
  Uniprot ID: Q9P0N8
  ENST ID: ENST00000602117
  CDS Start-End: 456-1196
catttatccagcagtgaaccgtcctagcgcaagagttagtaattgctcccctgttccttcacctccccactttggagctcagatttgtttttttgtttgtttgtttgcttgctttcttttgttctgttttagagactggagactgggtcttgctctgttacccaggctggagtgcagtggtgtgatcatagctcactacagccttgaactcctgggctcaagaggttgaggctccctcctcagcctcccaagtagctgggactacaggctttcagcaccatgcctggctaattcaaaaaaaccttcagagagatagggtctctctatgttgccctagctcgtctcaaactcctggcctcaagtgatcctcctgcttggacctcccaaagcgctgggattacaggctcctggaaccatgggcctcaggccctgaggatacggggctcccggtggccatgacgacgggtgactgctgccacctccccggctccctgtgtgactgctccggcagccctgccttctccaaggtcgtggaggctacgggcctcggaccgccccagtatgtggcacaggtgacttcaagggatggccggctcctctccaccgtcatccgtgccttggacacaccgagtgatggtcctttctgccggatctgccatgagggagcgaacggggagtgcttgctgtccccgtgtggctgcaccggcacgctgggtgccgtgcataagagctgtctggagaagtggctttcctcatctaacaccagctactgcgagctgtgccacacggagtttgcagtggagaaacggcctcgacccctcacagagtggctgaaggacccggggccgcggacggagaagcggacactgtgctgcgacatggtgtgtttcctgttcatcacaccgctggccgccatctcaggctggttgtgcctgcgcggggcccaggaccacctccggctccacagccagctggaggccgtgggtctcattgccctcaccatcgccctcttcaccatctatgtcctctggacgctggtctccttccgctaccactgccagctgtactccgagtggagaaagaccaaccagaaagttcgcctgaagatccgggaggcggacagccccgagggcccccagcattctccactggcagctggactcctgaagaaggtggcagaggagacaccagtatgaatgctgggctctccggaccctgcagcagagaggccagaggtagctggtgataccctgtcctgtggaaggacttccacttcaacacttccacttcaacagttcccgcacggcctgaacgcttcttaggccaagagacaccatgcagagcctagtctgtgatcctgtgtgaagatattttcagggtttttttttttttttttttgcatatggaggacaggtggacatggtcctgagctctggacggagcaggcaccctgatctcattctgaggtccacatggcaccttctgggccagcagctgtggccggtgtatcaagggcgcccttaaagctggaacattccagcaagcttcttgcgcttctctgcacccggcaggcccactttcctggcaccctcgactttatataaaagttgcactgcgtttcaaaaacccacccctgaatgaataaaaggagccctggctggacaaaa

SEQ ID NO: 152842 - DNA, 485 bp, Homo sapiens
  Payload ID: 10060
  Gene Symbol: MARCH2
  Gene Name: membrane-associated ring finger (C3HC4) 2, E3 ubiquitin protein ligase
  ENST ID: ENST00000601724
  CDS Start-End: 245-485
ggcggtgcccggacgcaggtgccggccggagcggagctagtggcgccgacgggccgggccgggccgggaccggggccgaggcgaaccgaggggcctgtgcggccgcccggcccggccgcggatcagctcgtctcaaactcctggcctcaagtgatcctcctgcttggacctcccaaagcgctgggattacaggctcctggaaccatgggcctcaggccctgaggatacggggctcccggtggccatgacgacgggtgactgctgccacctccccggctccctgtgtgactgctccggcagccctgccttctccaaggtcgtggaggctacgggcctcggaccgccccagtatgtggcacaggtgacttcaagggatggccggctcctctccaccgtcatccgtgccttggacacaccgagtgatggtcctttctgccggatctgccatgagggagcgaacggggagtgcttgctgtccccgtgtg

SEQ ID NO: 152843 - DNA, 690 bp, Homo sapiens
  Payload ID: 10060
  Gene Symbol: MARCH2
  Gene Name: membrane-associated ring finger (C3HC4) 2, E3 ubiquitin protein ligase
  ENST ID: ENST00000595142
  CDS Start-End: 455-690
cggcgggcggtgcccggacgcaggtgccggccggagcggagctagtggcgccgacgggccgggccgggccgggaccggggccgaggcgaaccgaggggcctgtgcggccgcccggcccggccgcggatcagagactggagactgggtcttgctctgttacccaggctggagtgcagtggtgtgatcatagctcactacagccttgaactcctgggctcaagaggttgaggctccctcctcagcctcccaagtagctgggactacaggctttcagcaccatgcctggctaattcaaaaaaaccttcagagagatagggtctctctatgttgccctagctcgtctcaaactcctggcctcaagtgatcctcctgcttggacctcccaaagcgctgggattacaggctcctggaaccatgggcctcaggccctgaggatacggggctcccggtggccatgacgacgggtgactgctgccacctccccggctccctgtgtgactgctccggcagccctgccttctccaaggtcgtggaggctacgggcctcggaccgccccagtatgtggcacaggtgacttcaagggatggccggctcctctccaccgtcatccgtgccttggacacaccgagtgatggtcctttctgccggatctgccatgagggagcgaacggggagtgcttgctgtcccc

SEQ ID NO: 152844 - DNA, 4196 bp, Homo sapiens
  Payload ID: 10061
  Gene Symbol: MARCH3
  Gene Name: membrane-associated ring finger (C3HC4) 3, E3 ubiquitin protein ligase
  Uniprot ID: Q86UD3
  ENST ID: ENST00000308660
  CDS Start-End: 516-1277
gagtcccgcagcgcccgccggcagccacggcacttcgcaataaccaacttccccgccgccggcgcgtcccgccagcctgccctcggccgcaggcgactggacggcggttacggggcggtcccagcgccaccacgactggctgtcggctccgccagtcatgggctgatgacgccccggggctggctccgcccctagcggcagccccgcctcccctccagagcctggtcggcttagccctgctttccgcctcactcgttgagcaggtccgtgaattgtcagcgcgctgtgggcgactgtgtggccgcggcggccgccaggcttgccgcactccccctgaggtgcccgccggaaccaatgtgccctggtccactgggccgtgagcagccaccgactgggggcaacttggcacttagaaccgcagcagggacgtcggtttgctatcgggactcggcgaggacgatggaaatcctgtatgaatgtggaagccattagcagagtaattgctgtctgttaccatgacaaccagccgctgcagtcacctgcccgaagtcctgccagactgcaccagctcagctgcacccgtggtgaagacggtggaggattgtggcagcctagtgaatgggcagccgcagtatgtcatgcaagtttcagccaaggacgggcagctgctgtcaacagtagtgcggactcttgccacccagagccccttcaatgaccggccgatgtgcaggatctgccacgagggcagcagccaagaggacttgctctctccatgtgaatgtacagggaccttggggacaattcatcggagctgcctggagcactggctgtcatcctcaaacaccagctactgtgaactctgccacttcaggtttgcagtcgagcgcaaacccaggccgttagtggagtggctgagaaaccctggcccccagcatgagaagcggactctgtttggcgacatggtgtgcttcttgtttataactcccctggccaccatctcgggctggctgtgcctgcggggcgccgtggaccacctgcactttagtagtcggctggaagccgtcggactgattgcactcactgtcgcactcttcactatttacctcttttggacactagtgtcatttaggtaccactgtcgattgtacaacgagtggcgtcggaccaatcagagggtgattctcctcattccaaagtctgtcaatgtaccttctaaccagccgtccttgctgggcctccattcggtcaagaggaactcaaaggagacagttgtttgatgtttgtatggttggttggttgtttgattcattgtttggggtttggaagtgtctgcactggggtcatgcactgagcgacccccaagcccttccttaagcctgtgggtctaagaacatccagagcatattagcacatcactccaagcaacaacctccgccagaagaaagcaaatgctgttttacttcaaatgatggatgctgcaatcatatgatatttgctaagctgccaaacatgtttatttagcagatactgtatggaattttctgaacacctctttaacgtatgaggaaggttgtcctgctacggatgcaattcaattcttccttttttattactatttcaaacacacacacatatatatatatattaaacttagatgataatcaaaatcaaaaagtcaacgtaaaaactggtttcttggtttggttgggtcttatttgagttagtttgtttctcagtttctcgtatggattctttggggtactttggtagcctgagtggtctttttcatctctttcgcgtccattactcaaggagacagcataacagatgcagaacaagtcatatttgaagaatgttttgtactaaacttcatttaattattcagtttttaaagggaaaaagggcgtgagctcacacagtgagctgtttatttaaatatcattaaggagaaaaaaaaatatggtgagaagctcgctcctttcaacttgtttggtactgacagctgatagaagctattttctaataataaacatccagtgtgtgaaagacaaaacccactgattgcaatactctttttttaatgataaaacctgtgaagtttcccaaagcaggttttaaaaggaaaaaaaggaaaagcaaaaaggttgctgttctcactcccatctcatttagtgcatgtcttaattcgggattcgtaatgaattggaggatcattagacatttctaggaaccctagacctgttttgcatgtcaattagcattcccattgctctattgaatttctagcttgacaggtagatgtggcaaaaaaaaaaaaaaaaaaaaaagcctgtcctagcagccctgcacttattctaagacccctttgtctgattctttaaaaaggagccccacacagtgccttcccccaaccatgagccaattctgtcacagtccgaaatagactttttctaagggtttcgtgtccctcttttatccgtcgcagtgtaaagggtctgatccgcagcctgcattgtgcgcgcaccgaggcaggagcggatgtcttctgaggagagcgctggctggggttgactctcaggctcccggctgtccgcccgcccacacgcagcgaggaggggcggagccctgcttccggaatgcttaaaatatggaattctagaacatgacccacattctgagtatcactccagcatctgccttgtgttccaagtgggaaaacgagaagtgcaaaggaacaggcagcgaggagggtagcgatttttgtctgcaaattgatggagctgatgcaggtgtcccctttgtaggcgagccctccattcactggctgctcccagcgctgcctggggagggaaacagctgtactgctctccgctgcaaaactcagatgtgctttatggcttgtgacaatagatttcctccccaccacgcttcactgggacacttcaattccagtaatatatgtctcagcccttctgtttactgcgccctgctcacccccctgggctgtcattagctgcaccaccatcaaccgtttcttaattgacctttttaaaatgctggacatcaccggctgcacgcagctgccacacattaaatttccagagcaaagagtccaacttggtagctggtgaattgcagccctgtaatatacttaataaatgacgtccacccagccttagtccctgagctgtcaggtgaacccgtgacacgtctcaactgaatggcacaacattcatgagaggaccataccccttctccctgtttcttgcatgaattaaggaagcagcggatttccaggatgatttcctgtcaaggttggctgcagagaattcctgccatcttggttcatgagatgagatatgacatcatcaaaggcagccaggtcccaggccgttcaatggggatcctgcattaggaagggtttgcacattaaaactgtgcctgtgccacacctctttccttcgtgtttgcatccctgccctgtgaagtaaaacagagtccaagatgcaaggagtagattgtgtgtggggtggtgaaaggacacccctggcagccaggcagagcatcagtgcctcccttcccaggtcaccagcttgggacctccttgtgagaggctctgatctccatcagcatcagggcccataggggattctgaactcttggaggatatttcatcccctccaagccttgccccatggaaagggctacacctcctgcaggaaggggtgccttttgttaacaggtattaatgggtacagaggcaccatgcagcctaccagcacccttgctagcctagtcctcttcctgtgcttctttttgaaagatcaagaatgaagaggaagagatgaggagtgggggtcctttacctaaaggaccctcgtggttcattgcttctctttaactgactttttaaaaaaactccctcttccacactccttgctgtgattctgtcctaatcatttttcttgagaatgtcatgtagagataaatgtgtgtcacagtgaagccagaaggtgaattaacaactaagacaaatccagcatgctcttgcctgccctgcatatgtgctcatttggggaaggacggaggacacagagcatcgacacaaattctacagctcctcagagaacacagcagagactcagatgagctgtaaaatccattaaggaaaaataaatggcatgatttggaagtta

SEQ ID NO: 152845 - DNA, 719 bp, Homo sapiens
  Payload ID: 10061
  Gene Symbol: MARCH3
  Gene Name: membrane-associated ring finger (C3HC4) 3, E3 ubiquitin protein ligase
  Uniprot ID: Q86UD3
  ENST ID: ENST00000515241
  CDS Start-End: 58-474
gatggaaatcctgtatgaatgtggaagccattagcagagtaattgctgtctgttaccatgacaaccagccgctgcagtcacctgcccgaagtcctgccagactgcaccagctcagctgcacccgtggtgaagacggtggaggattgtggcagcctagtgaatgggcagccgcagtatgtcatgcaagtttcagccaaggacgggcagctgctgtcaacagtagtgcggactcttgccacccagagccccttcaatgaccggccgatgtgcaggatctgccacgagggcagcagccaagaggacttgctctctccatgtgaatgtacagggaccttggggacaattcatcggagctgcctggagcactggctgtcatcctcaaacaccagctactgtgaactctgccacttcaggtttgcagtcgagcgcaaacccaggccgttagtggaggtcagtaagtggggcacgtcctgaaaacttagctctaatgagcaaatgatgtctgtttttatgcctggatcacaagccctgtacagctttactgaagcacggtaatagctatgtgactgtgtgtgtgtgtgtgtgtgtgtgtgtgtgtgtgtgtgtgtgtgtttgagaaagagagatgtagacagacagacacagagaagggagagcttgctagctcacttgggatccagcagtagaaggaaagcagaataaattagtataaggagaaa

SEQ ID NO: 152846 - DNA, 4447 bp, Homo sapiens
  Payload ID: 10062
  Gene Symbol: MARCH4
  Gene Name: membrane-associated ring finger (C3HC4) 4, E3 ubiquitin protein ligase
  Uniprot ID: Q9P2E8
  ENST ID: ENST00000273067
  CDS Start-End: 1768-3000
cccacctcggccacactgcttcgctcccccctccccaccttcagctggcaccgcaaacaagccttacctcgttgcatctgcgaggagaggtagcaacagcgagcctagccagccagaggcggtggagaggaggaaggggcggggtgggggggcagagagcgggccgaggccgcccttggtgggggtagcgggggcagagctgccgagcagacccggcagccgccctcctccgcccccaccctccagaagcactcttgcctgagaaccgaattattccactagtattatttcattttttattactccccctcctcactccccagccgcccccacccccacgccggcctcgcctctggttgcatggcagcgctgcccgggcgcgggggctcagggctggcccccagggaagggggaggaggaggaggatcatgaaggccggagtcgcgaccgcgccggacggcgggcagcagccagaggacgagccggagcagcccccgccccggagacacccggacgccgagcagcagtcgcctccgccgccgcagcagcagctgcgggcgcgggccgacccggagccggaggaggagggcgaccgcgacccagaggaggaagaggaggagaaggcgaggccactcgcccgcccggacctgcccttctctcggctcttgcccctcgaccgaagggacctttgatggaaccgaggggagggcgccacggatttgccgactgcagcaggggtgggctgggggctgagataatgtaaccactcctttctcctgttctctcccacacgcccctctcctctacccctattctctgctccactgccctctcaccccggtacacacacccttcctctagccaggatcttcatgctcaggaaggaggcgcctctgcaagggttaaacgatcttttctttttctcccatcctttttccttcccaaacctctattttacctcccttctcctaattggctttcccctcttcggtgtaaccctttggctgcggaggcaaagcacaagcccctagcccagtttcacctgcaacacccctcccccacccaactgctctcttaaaagcaactctggtgcttctgggggttaattgccccagttttctgcccaggagaattaaaacttctcccaatcttctctcctcccctaccttgactcccccaacccctaccacctgagaaaaacgatcttttctctctcacacatgcagtcctcaattcttcattgagctagttttctctaagcccagctcaatccactccagatttgatttacaattgtccccacccttttatataaaagaaagatttctcactgcgtaggaatttgagaagaacccaataatcctttcctggggaacttttaaacaattcgacattgatttaaacaattcgacagaggctctagtggcccctccaccacgcttcttcaatccctctgctcctaccagtgtcctcaggtcaaaagcagaaaggagacacactgaacaaagttggaggttggggtgggtgtgtgagggcaagaaaaacttttttgttattgggctttccaggtggagttcagaaccagtgactcacacttctcagtcctgggagcaatttatttgctacttggaggggttgtaagaaaagccagtgagaaagcagactccccccacaacacagatccactgtggacccccaaaacctgtcctgtccccctcttttaagactccagccacccctcttgggctctctacttccacggggcacatgctgatgcccctgtgtgggctgctctggtggtggtggtgctgctgctccggctggtactgctatggattgtgtgccccagccccccagatgttgcgccaccagggtctcctcaagtgccgctgccgcatgctcttcaatgacctgaaggttttcttactgcggcgccctcctcaagcgcccctgcccatgcacggcgacccccagccccccggtttggcggccaacaacacccttccggctctgggcgccggggggtgggcaggctggaggggcccccgagaagtggtgggcagggagccccctcctgtgccacctccaccccccttgccaccttcttctgtggaagatgactggggtggcccagccacagagccacctgcctcgctgctcagcagtgcctcctcagatgacttctgtaaggagaagaccgaggatcgctactcactgggcagcagcttggacagtggtatgaggaccccactctgccgcatctgcttccaggggccagaacagggggagctgctgagcccatgccgctgtgatggctcggtcaagtgcacacaccagccttgcctcatcaagtggatcagcgagcggggctgctggagctgcgagctgtgctactacaagtaccacgtcatcgccataagcacaaaaaatcctctgcagtggcaggccatctctctgacggtcattgagaaggttcaggttgcagccgccatcctgggctccctcttcctcatcgccagtatttcttggctcatctggtcaactttcagcccctcggcaagatggcagcgccaagaccttctcttccagatctgctacgggatgtatggcttcatggacgtggtgtgcataggtctcatcatccatgaaggaccctcggtgtaccgcatctttaaacggtggcaggctgtcaaccagcagtggaaagtgctgaactatgacaagacaaaagacctggaggatcaaaaggcaggaggcaggaccaacccccggacctcctcatccacccaggccaatatcccctcctcggaagaggagaccgcaggcacccctgcccctgagcagggccctgcccaggctgccggccacccctcaggccctctgtcccatcaccactgtgcttataccatcctgcacatcctgagtcacttgagacctcatgaacagcgaagtcccccaggcagcagccgagagctggtcatgagagtcacgacagtgtgagagcagaggcccggaaggaaggccatgaccaccactgagggcccggagcagggtggggaggtgcagtggcacccccagagccaacagagggagcaggcagagggtgggggacctggcgggagccctggggtagtgtcagagcgggagtgaggctggtgcaggagcagttctgctatttccaatcagtcaatgccactctccacaacaacaatgaaaaccaacaccaactcaacaacaaagtgcaatacaggctgaacctggcccaacagaaaaaccctgccccaatgcacctgcaggcaaggtacccgaagaagcagaggctgagggcaggcaaagcctgtgtgactgtggcagtgccggaggccaagggggccaagaggaaaagcatctgtggtctgctctgctctcaccctgtttggttttgtttctcctggggctgtgttctgcaggcagccagaaaaggaggaggcacgggtgagctggcagggacacactgcctttggggctcctgggctcatttggatgggcaagattcgctgacaaatggctgtggggatggtggggtggatggtcagggagggatgctcagggagggatatgctggtgtgagcagccagagggagagtgtgtctccttcctgaaggaacttccaaatggaactcccgatttcaggtgggctaaaagagggcttaggtttggaaaagggtgtccttctgtgcccttgttaatttattttatagtgatttggttcaaagatgtttacaggacacacacacacacacacacacacacacacacacacacccctagagaaaagtacagatttccagtggatatttcaagcacagttctgctgctgtggcttcagctttggaagctgtcaatcccggagcaactttcccaactacccaaccccaccatggccaggacatgtgcaatgccagccccttcttgtcttggcacatgcacagacccagtcccctcacggtagggcacccctgacctacgggcttccaagagagcagctgcagtggttgggaggagcttgaccagtgtgccccaaggagtggagtagagcccaatctaagtattccttgctgcttggaaccctccctgtttggaaccctccccaaagaggcagtcaggctgatgctcagtgctttgtgctccctgctccttcccgcgtagccaggtgggcccaagggtgcctggcagggagcactacccctggacccctcctgctcgctctggggaccctgccagggaaggccactgggtgttcacctgcaaagtttctggttgtcactgcacagtggtcgcgtcatccatgggtattaaaaggacactgtcaagtacttttttaaactagtttttagggttttttaaaactctctgttgtttgtaatattctcttaaaagcttgaaaataaaacttctttccctacca

SEQ ID NO: 152847 - DNA, 3926 bp, Homo sapiens
  Payload ID: 10063
  Gene Symbol: MARCH5
  Gene Name: membrane-associated ring finger (C3HC4) 5
  Uniprot ID: Q9NX47
  ENST ID: ENST00000358935
  CDS Start-End: 333-1169
tcttacctcacaaaggtagctcctccgccggcagcaactcggcgcccgcggtccatggaccggaacctcgggccgacggacgggaacccgggccgcgatcgccgcctccccgcctcaggctcctcctcctcgctctccgccgcctccgccggactcccgcaggccctgcaccgccgccgccaggctagcggagctgccccgggaagctgggtgacgggttcgcggctgccgccggactgcggcctactccgccgcctctcagtgctattgtccctgggcctggccttgagcgggtccactggggaaggccgtgtgcgccggctccgcggaagatgccggaccaagccctacagcagatgctggacagaagttgctgggtttgttttgctactgatgaagatgatagaacagctgaatgggtgagaccatgcaggtgcagaggatctacaaaatgggttcaccaggcctgtctacaacgctgggtggatgaaaagcaaagaggaaacagtacagccagagtggcatgtcctcagtgcaatgctgaatacctaatagtttttccaaaattgggtccagtggtttacgtcttggatcttgcagatagactgatctcaaaagcctgtccatttgctgcagcaggaataatggtcggctctatctattggacagctgtgacttatggagcagtgacagtgatgcaggttgtaggtcataaagaaggtctggatgttatggagagagctgatcctttattccttttaattggacttcctactattcctgtcatgctgatattaggcaagatgattcgctgggaggactatgtgcttagactgtggcgcaaatactcgaataaactacaaattttaaatagtatatttccagggataggttgtcctgttcctcgaattccagctgaggccaatcctttagcagatcatgtctctgctactcgaatcttgtgtggagcccttgtctttcctactattgctacaatagttggtaaattgatgttcagtagtgttaactctaatttacaaaggacaatcttgggtggaattgcgtttgttgccataaaaggagcatttaaagtttacttcaaacagcagcaatatttacgacaggcacaccgcaaaattctgaattatccagaacaagaagaagcataaaactgacttctggttgttctgcagttctctcatccttatgaatctgttgtgttgttttgattccatcattaatgcacttgtggagacttgtgataagctgctgctcctatattttttaagaaatataataaagcacttagggcaggggaaatcatctcggtaatcatggaacctaaggatgtgatttgttttcattgtttgtatgtactacttttatggcagtcatatgaaccattatcttagcatggtaaacctgggttttgttcatattttctccagacagaaatgcaaagatcaaactgtgcaaatattaaaaaaatgcacatgctgttttattcaaatgcctcttttgtacatgttcatgtttagtgttttctcagaatcagcaactcaaggtactatgaggatttttctcactgacataatttgattacatactaaataagaggatatgttaatatgaggaaatgtaaattaaattagttataaataaataaccaaaaatgtatgtaaacattcaaatgattatctgaacaaatgagattttgtggtgttttctttaacccatgtgatgtcctccaaaatgtgtagggtaaaaattcacagggcttccagatcactttttcaatattaaattttatttacataatgttgacatctcatacttcatgaagtaattttgactcatgcagtcgtgtgtgtgtgtgtgtgtgtgtgtgtgtgtgtgtgtgtatttgtgtgtttcagtgtttcatcaggtccttccatctctgggagttttttcaacccatatttctagaaattacagctgccagtttatagtagtttgagcagaggatgatttgcaaaaataaaaataaagttattttactctcctcttgcattgattcagttattgagatattcgttgatcacctcctatttcccaggcactgtgcagagtgctgtaggacatagtggtgaacaagacagacttggtccaagctcttacagagttgacagtctagtttcagcacatagaaaaccagcagtgaataaaccaaggtgaggccttgagctctttgtttttatattaatgaggagaaaagtatgaaaacaagaagtcttaagtaaatattgaggtcattgtttttggcttaagtttattatagaaaatcaacactaatgtttttagattttaattgtcctattgatgaggctagcaccttaatcactgtttagttttgtattcatttttaaaagcaattattgaagccattttcaatagattggccattttaatgttcagcaacctgaatggttatttttgttaattaaaattaaatttttaagagatattttcaaaaccctatttattttcttgttcacagtaatgcatgtcaataataaatgtttccccttactgataagcggccactttaggagtgtagcaaatatagattgagctatgttagtttgcaataatatatgttaactttagtaattaaagactggtttctatagtatgaatgtcttaattttgagttatatgatgtttatttgaatgactgttgaacattcaaatttgtattatttggagatgaagatttgactaacagtgagccttattaagaacactactacagttctgaaggggaaatataacatctatggttatatattttaaaaacttagattataggctgtaattataaaatatattggcttttgttttcaatgtgaaagatacattaaatggacacatatcttgcaaaattttgttgtatagaacagtttttaggcagcctttactaaagttatgcaaacacacagttccccatttactacattaatgcccttgacagggagtagctgcttggttttataggtattagggctcatgaaggccggggaacaactctaatccttttggggcaggagggagggtttttttagggttgcggggagggaactgcaagtgcctgaggaccagagtggcctctagccccgaattgaacacttttaaacctaaagagccttattattattagctcgagaaataccacatgccagtcttcccaggaaggtgacctgcctgaccatgaagcaacaaaagagcataggcagacttaaagttggatagacctgggttcaaatcatagttcagctttcaataactgtatgtatgattttggctaaaggatttgactttctctcaactgcagttttcttaatctttgaaatgcaaataatgtttatctcagaagactatttctaggattaactgagagattaaaggaacagcagcacttaggctcaaaatcgcccctacaaagcagtagttgtttcttaattgctaagtaatctgtttgcactctaggaaaagtaaatggagaggtaaaagaaaggcattggggacaaatgaaagagatgatgtagatttttcggatgggtgggtatattttattttccagtttattttcatatttctttactgtgttatttctggaaactttaatgttttaaacctcttttataaaattcaatgacgactactagaattcttttcaaaagttaacttatctccaaagtggctgaaaatattgtttaccattacatgattatgaaatgactgtgaagaatataaaattaaacttagtgacttaattagtcactgccttgctaactttgctgtaatttttttaaacgtcttgtttttaatatagcaaactatctcaatactggctggattaggttaaataaagaatttttatgttc

SEQ ID NO: 152848 - DNA, 9569 bp, Homo sapiens
  Payload ID: 10064
  Gene Symbol: MARCH6
  Gene Name: membrane-associated ring finger (C3HC4) 6, E3 ubiquitin protein ligase
  Uniprot ID: O60337
  ENST ID: ENST00000274140
  CDS Start-End: 133-2865
cctctcgcttcctctctcgcacctgagcgtacgcacctgcccgggcccggctccctcctcctctcccctccctctttccccgcccggccgcgggagcctcgtggctgcgtcaccgccgcccccccagacaagatggacaccgcggaggaagacatatgtagagtgtgtcggtcagaaggaacacctgagaaaccgctttatcatccttgtgtatgtactggcagtattaagtttatccatcaagaatgcttagttcaatggctgaaacacagtcgaaaagaatactgtgaattatgcaagcacagatttgcttttacaccaatttattctccagatatgccttcacggcttccaattcaagacatatttgctggactggttacaagtattggcactgcaatacgatattggtttcattatacacttgtggcctttgcatggttgggagttgttcctcttacagcatgccgcatctacaagtgcttgtttactggctccgtgagctcactactgacgctgccattagatatgctgtcaacggaaaatttgttggcagattgtttgcagggttgttttgtggtgacgtgcacactgtgtgcattcatcagcctggtgtggttgagagagcagatagtccatgggggagcaccaatttggttggagcatgctgccccaccgttcaatgctgcggggcatcaccaaaatgaggctccagcaggaggaaatggtgcagaaaatgttgctgctgatcagcctgctaacccaccagctgagaacgcagtggtgggggaaaaccctgatgcccaggatgaccaggcagaagaggaggaggaggacaatgaggaggaagatgacgctggtgtggaggatgcggcagatgctaataacggagcccaggatgacatgaattggaatgctttagaatgggaccgagctgctgaagagcttacatgggaaagaatgctaggacttgatggatcactagtttttctggaacatgtcttctgggtggtatctttaaatacactgttcattcttgtttttgcattttgcccttaccatattggtcatttctcccttgttggtttgggatttgaagaacacgtccaagcatctcattttgaaggcctaatcacaaccatagttgggtatatacttttagcaataacactgataatttgtcatggcttggcaactcttgtgaaatttcatagatctcgtcgcttactgggagtctgctatattgttgttaaggtctctttgttagtggtggtagaaattggagtattccctctcatttgtggttggtggctggatatctgttccttggaaatgtttgatgctactctgaaagatcgagaactgagctttcagtcggctccaggtactaccatgtttctgcattggctagtgggaatggtatatgtcttctactttgcctccttcattctactactgagagaggtacttcgacctggtgtcctgtggtttctaaggaatttgaatgatccagatttcaatccagtacaggaaatgatccatttgccaatatataggcatctccgaagatttattttgtcagtgattgtctttggctccattgtcctcctgatgctttggcttcctatacgtataattaagagtgtgctgcctaattttcttccatacaatgtcatgctctacagtgatgctccagtgagtgaactgtccctcgagctgcttctgcttcaggttgtcttgccagcattactcgaacagggacacacgaggcagtggctgaaggggctggtgcgagcgtggactgtgaccgccggatacttgctggatcttcattcttatttattgggagaccaggaagaaaatgaaaacagtgcaaatcaacaagttaacaataatcagcatgctcgaaataacaacgctattcctgtggtgggagaaggccttcatgcagcccaccaagccatactccagcagggagggcctgttggctttcagccttaccgccgacctttaaattttccactcaggatatttctgttgattgtcttcatgtgtataacattactgattgccagcctcatctgccttactttaccagtatttgctggccgttggttaatgtcgttttggacggggactgccaaaatccatgagctctacacagctgcttgtggtctctatgtttgctggctaaccataagggctgtgacggtgatggtggcatggatgcctcagggacgcagagtgatcttccagaaggttaaagagtggtctctcatgatcatgaagactttgatagttgcggtgctgttggctggagttgtccctctccttctggggctcctgtttgagctggtcattgtggctcccctgagggttcccttggatcagactcctcttttttatccatggcaggactgggcacttggagtcctgcatgccaaaatcattgcagctataacattgatgggtcctcagtggtggttgaaaactgtaattgaacaggtttacgcaaatggcatccggaacattgaccttcactatattgttcgtaaactggcagctcccgtgatctctgtgctgttgctttccctgtgtgtaccttatgtcatagcttctggtgttgttcctttactaggtgttactgcggaaatgcaaaacttagtccatcggcggatttatccatttttactgatggtcgtggtattgatggcaattttgtccttccaagtccgccagtttaagcgcctttatgaacatattaaaaatgacaagtaccttgtgggtcaacgactcgtgaactacgaacggaaatctggcaaacaaggctcatctccaccacctccacagtcatcccaagaataaagtagttgtctcaacaacttgaccttcccctttacatgtccttttttgtggacttctctctttggagatttttcccagtgatctctcagcgttgtttttaagttaaatgtatttgacttgtgttctcagcattcagagagcagcggtgtaagattctgctgttctccctggatcttctgacattactgctgtctgagatttgtatatgtgtaaatacaagttccttgataccctaaaaccttggattaaacagaatgtgcattgtacatctttaaacaaaatgtatattaatttattaaatctagttgtcactttattttggacctgctgtgatctcgacaggaaacgtgccacagagcagtagtgcgcaggcaagacttttcagtgacgccttgtggaacgcagttcatgatgtcctagcagctctcactaagggaactgtacattctttctttcttggctattcagaccttaccaagaacgttaaaggaaacaagtagaaatcagcagtggagtgtctgtggtaagaaaacatgaactttatgcttcactgttagttgtttgtggaagttattttgtataacaccaaagctgttgtacatttcctactgcctgatttttttcatgtgtctgtgtttgtaatattgtatagtatcttgtgctaggtgaggaaattatttttaattttgataatttaatattcctagtgtgatcagcattgggagttgggtttcagtggggcatgtctatacttagagaaaaaaagtccaaatgaagattttcatgagtcagcccccccgcccgcccccaccccacacccacatcctctcttttccacacacaactatctgtttattttttgtagcagtggccgaaagtcctgcaaggtcataaatctttcagagtgacatcaccaactgtactgcatcttactggatttaggacttctgagatgcttgtgaagtatagatgtggttgtggtcttagattgacagcattagagaagactggttagaacatctggtctcgctggttagtgcctcgttggctgaggactaggtgtgcatttctcctagcttttcatcaggaaatcccaaagtttccaaagctttttgtttacagaataaaacttcaaataaaaccaattcattatttgtccagaaggaagcttggctgagctggccttttaacataggaatgtatttcgttggaaacattctgaaaaatctcagagaactgaacccttacaaactttgttttccctcataaccaaagcttcaggttagaagtttagaaaaatagaatggttgggtacatgatctaaatgtttaatgctaaaggtatatcgtaagggtagtgtttgtttttgaacgataatttagaagttctcatagaaagcgtataacataggtcttcagaaactataaaagaattttcatatagtattaaaatccatagactaaaatctgagaattttttaacatatgcaagtcagccaaacataagctaccaaaataaagagcaatgtgttctggctgttttatacttcaacaattttttccctaagtggtaagcaattactttaaaacatatttttaaaaacatcggtatcgggagctgcggtggctccggccggttgtcctggcacacaaggaggcgaggctatgcgttcgaggccaacctaggcaaaattggaaaaaaaaaaaaaaatcagtatcagaaataatgcttgacataggattcagtgttatactctttggcactttagagcagccttttctctcatttgaaataaggtctttgttagccctacctttactcagaaatttagtcctactataaaaaattaggattttaaaatataatgctgcctgtcatagtgtatttctaaattgctctctttgggagaaaaacattattattgaattgagcatataactatataactatataactatatatatatatatatatatatatatatatatatatatatatatatatatatatatatttttttttttttttttttttttttttttttgcccccgagacagagtcttactctgttgcccaggctggagtgcagtggcacgatcctggttcactgcaccctctgcctcccaggttcaagcgattctcctgcctcagcctcccaagtagctggtactacaggtgcgtgccaccacacctggcttattttagttattttagtagagatagggtttcaccatgttggccaggctggtctcggaactcctgactgcaggtgatccgtcctccttgggctcccaaagtgctgggattataggtgtgagcccccacgcctggccaacttgattatattaattttgggttttttgttttgttttgttttgttttttaatttttcaaagaatttgtggatcttggtataaagtcattggaacatatctgttttaacagcaagagatcctaggcagatacttcaaaaggttaaaaattcttaatcctacagaattttaaatgaatcttatcaatgttttgtaaacaaacaatatgaatggccaaaaaattgccctccattttactggcaggtaatttatattgtcttacttaagaattctcccctagtttttcaattgtactttatcgtgttgttttcaatgagataagtattttcatagggaaagcattttccagcataatatttgcttgggtagcatccgggttttagtatttaaccaagagccttttaaatattgaaaacccatagttcagaaaatgttagtattgctgcccttcttcacataaatttttttttaaattatactattattttgcttaattttatattgggttaaaacaaccttcaagaaggttaactaggaaagaagacctttttgttttatttttactatttatatatagaagacaaatcagcatttggtgatagttttacatgaccagttatcaaacggtcatagtatgaagtgtgcagttgttcattattagtaaattatgtttgatttttaaactatttagtactaatagttgagatgaaaactgaagaaaaatgccaatgtgacgtttgtgtatagctagccttaaaaaacttcccatgtttttaggtgacttttttccccctcttagtactctggagaaacaatgaagatgggccatctcaattccagatgtaaacaaaaagtaatttttatttcaacatttaatgtaactgctattattgtggattcttgtcttgtgtattttctttcccttattcaagtaatatagaataactttccttaaaatgatttgatccaagatacgtcatttctgtattggcaaaatgccactattaaagtgtaattcttgaatttaggttgaattgatgactttttaaaacaaaacaaacactggacagttctacattgtattgcgtttgcgaatgtgcgtgaacacacgcacacgtgcaggagaatgtagtgccataagaacactggcgctttttaaaactttccaagctagctacttattttcattttcagggttgagtactctaagctctctacttactgtgagaagttttctacattgtaaaattaaaagattatatttaaaatacttctttaggatgttattcagccatcaaaaaaaaacccaactaaaatgtcttaccagtaaagtattattaaaagcctcatttgtggagattcgctgacttccttggttaagctgtcttgtatttacttaatttgtcccctcaaccaggtgttttcttttcagcctgttactgtcctgtgccatttttaaaaatagccatcatgagtaagggcttctttaaaataatccctgacaatatctttggcattaatacgacataaagacaagacagtatatgtatgttttcattcctgttttgtacgagtgcctcattttgtagtcatgaaagtaacatagtaccttaaataaaaatgtaatgactaatctaaggtctaggaataactattgtagaagctaagtagaacacttagtttggggtgtcaattttctatcaacgcaaacaccttagggtacccagaccaattttatgtatatatattctgaaatgctccctttttaatgtggtcatttgttgccttctaagttgagaggacaaaactgaataaagtgaatgttaattgtagtctagtttttttgtttgtttttgtgttattgcaagattgctttaagattgcagaaatatgcattattagccagcatagataatccagatgttataataggaaggaaaaacaactccagttaaatgtgactgtggcgactcccttttatgtatacatttaaatgcatagttgcagaggacacatccctccccttctgtctccctaacttgaactgtagaccgtcctcactgggaagagtaaggccccacattttgtgcaatagcaagctactgcccacttctgcatgtctgctacgagatcagaaagtcagtttcactaaggttgtcttttagctgaatacttagagtaaaaccaatcaaatccattgtacatacctgaccatatgtcccagataaaaaggaaagacttgcgtgatgtttttttccttctgagtgccctgaggagatccttttgcttcagactatttctaatttttctttgtttataggttcagaattttttccatgattgttttcccccaaacaagtgcatttttaattactttaaatgcaggggtgatagaggaaatgctattcgaaccatagacatctttaatctgtgaagctgaaatttttcagcaaaggaaattgcatggtcaagttcagaaactggccattaatttcccccttccgctccacagttcatagctactcttgttgcaaacatgtagtgataaggagaactaacgtatcaaggggctgagagggtaacgttcccctcctcctccatgtttttattttggtgtctgttttgtttctagcactgtatttagtactgtagttgaatgaggtatgatgtctcccttcaaggaactcagaatggaacagaagcatgagcaaaagattgtattacagaggtatgaataaaatgccatggggaacacagagaaaggttcacccgggagagatggcctagccacttccttagtgactgtttggtatatgtaggtccccctgccattactctttcagccttctgcaatctagttctacttagtcacacacttctctaagaccactcatacgtaaacactacgtagaggcccctttttgcctcattttacattgtttagttatcattttgaaacttttcttcacatatgtaacagtgccggagtttttctgcttctctgtgtttgttcagtaactcttctttaggatacacctaaagatgagaagcttcatacccagtactcctcttcattcactcatatgtttttgggatcagtcccttctgctggctgtgcattggtctaatggaacagaatagagtccagaaataacccaacatgtatgtggacaactggtttttgacagaggtgcaaaggtcttgaaaaaatgatgctggaataattgggcatcagatgcaaaattaaaaacaaattgatccatatcttaacactggcaaagattaaagtccaaatggattatagttccccaaaactgtataatttctagaagacaacaaggaaaacgtgttcagccttgggttaggaaaagatttcttaaatccaacaccaaaagcacaatccatgaaggaaaaatcgataaattgtactttatcaaaattgagaacttctctttgaaaggtaccataaggagaacaaaaagacaagctgtagagtggcagaaaaatatttgcaaaacatttctgataaatgagttgcatctagattacataaagaagtctcaaaactgaacaagtaaacccattgtttacttaatcgctgtttctcctgagcttgctgcctctgcccctgctctctctccttttccatttgttttcaacattgaatccagaatgttcttcttgagatccaagtcagatcacaccaaccctcagaactctccaatagacgaccatggcactcaaaagtccacaatagccttcaatgctgggcaaaacatgaagcaccccttttctcccttctctgaccccatcacctctgtgttcaccctgctcctgccgtcctccctgcctccaaaacaggtcaggccttcgtgcctttgcacttactatttgcaatacccaaatgttcttcaggctctttagcctcttcatttctttcctgaagtgtcattctcactgaggcttatctaaagctgcagctactggggcattcctgtctcatctccctgctgtattttgtactcccggctctcttttgtacttttaaacatactatatggtttacctttgttgtttatatttgcatgttgtttcccacttgaatgtaagctccaaagattttatttttttaaactgaattattactgtattcccagaacaattccctggcaaatatttggtactcaatagtaatgctaagttagtaaataaatgatgaatttagaatcaaaataatgtgtctatggccaaaataaaacctgaaatccctgtcctatttcccagaggtaactgctgttaatagtttagttgtgtgcttccagacataccttcacagaatcatttatcacaataaaggtgtcatactatgca

SEQ ID NO: 152849 - DNA, 3062 bp, Homo sapiens
  Payload ID: 10064
  Gene Symbol: MARCH6
  Gene Name: membrane-associated ring finger (C3HC4) 6, E3 ubiquitin protein ligase
  Uniprot ID: O60337
  ENST ID: ENST00000449913
  CDS Start-End: 197-2785
ccctccccctcccgtgtcgctcgctttctgtcagcctctctccctctccctctcccctctccttcctctcgcttcctctctcgcacctgagcgtacgcacctgcccgggcccggctccctcctcctctcccctccctctttccccgcccggccgcgggagcctcgtggctgcgtcaccgccgcccccccagacaagatggacaccgcggaggaagacatatgtagagtgtgtcggtcagaaggaacacctgagaaaccgctttatcatccttgtgtatgtactggcagtattaagtttatccatcaagaatgcttagttcaatggctgaaacacagtcgaaaagaatactgtgaattatgcaagcacagatttgcttttacaccaagccgcatctacaagtgcttgtttactggctccgtgagctcactactgacgctgccattagatatgctgtcaacggaaaatttgttggcagattgtttgcagggttgttttgtggtgacgtgcacactgtgtgcattcatcagcctggtgtggttgagagagcagatagtccatgggggagcaccaatttggttggagcatgctgccccaccgttcaatgctgcggggcatcaccaaaatgaggctccagcaggaggaaatggtgcagaaaatgttgctgctgatcagcctgctaacccaccagctgagaacgcagtggtgggggaaaaccctgatgcccaggatgaccaggcagaagaggaggaggaggacaatgaggaggaagatgacgctggtgtggaggatgcggcagatgctaataacggagcccaggatgacatgaattggaatgctttagaatgggaccgagctgctgaagagcttacatgggaaagaatgctaggacttgatggatcactagtttttctggaacatgtcttctgggtggtatctttaaatacactgttcattcttgtttttgcattttgcccttaccatattggtcatttctcccttgttggtttgggatttgaagaacacgtccaagcatctcattttgaaggcctaatcacaaccatagttgggtatatacttttagcaataacactgataatttgtcatggcttggcaactcttgtgaaatttcatagatctcgtcgcttactgggagtctgctatattgttgttaaggtctctttgttagtggtggtagaaattggagtattccctctcatttgtggttggtggctggatatctgttccttggaaatgtttgatgctactctgaaagatcgagaactgagctttcagtcggctccaggtactaccatgtttctgcattggctagtgggaatggtatatgtcttctactttgcctccttcattctactactgagagaggtacttcgacctggtgtcctgtggtttctaaggaatttgaatgatccagatttcaatccagtacaggaaatgatccatttgccaatatataggcatctccgaagatttattttgtcagtgattgtctttggctccattgtcctcctgatgctttggcttcctatacgtataattaagagtgtgctgcctaattttcttccatacaatgtcatgctctacagtgatgctccagtgagtgaactgtccctcgagctgcttctgcttcaggttgtcttgccagcattactcgaacagggacacacgaggcagtggctgaaggggctggtgcgagcgtggactgtgaccgccggatacttgctggatcttcattcttatttattgggagaccaggaagaaaatgaaaacagtgcaaatcaacaagttaacaataatcagcatgctcgaaataacaacgctattcctgtggtgggagaaggccttcatgcagcccaccaagccatactccagcagggagggcctgttggctttcagccttaccgccgacctttaaattttccactcaggatatttctgttgattgtcttcatgtgtataacattactgattgccagcctcatctgccttactttaccagtatttgctggccgttggttaatgtcgttttggacggggactgccaaaatccatgagctctacacagctgcttgtggtctctatgtttgctggctaaccataagggctgtgacggtgatggtggcatggatgcctcagggacgcagagtgatcttccagaaggttaaagagtggtctctcatgatcatgaagactttgatagttgcggtgctgttggctggagttgtccctctccttctggggctcctgtttgagctggtcattgtggctcccctgagggttcccttggatcagactcctcttttttatccatggcaggactgggcacttggagtcctgcatgccaaaatcattgcagctataacattgatgggtcctcagtggtggttgaaaactgtaattgaacaggtttacgcaaatggcatccggaacattgaccttcactatattgttcgtaaactggcagctcccgtgatctctgtgctgttgctttccctgtgtgtaccttatgtcatagcttctggtgttgttcctttactaggtgttactgcggaaatgcaaaacttagtccatcggcggatttatccatttttactgatggtcgtggtattgatggcaattttgtccttccaagtccgccagtttaagcgcctttatgaacatattaaaaatgacaagtaccttgtgggtcaacgactcgtgaactacgaacggaaatctggcaaacaaggctcatctccaccacctccacagtcatcccaagaataaagtagttgtctcaacaacttgaccttcccctttacatgtccttttttgtggacttctctctttggagatttttcccagtgatctctcagcgttgtttttaagttaaatgtatttgacttgtgttctcagcattcagagagcagcggtgtaagattctgctgttctccctggatcttctgacattactgctgtctgagatttgtatatgtgtaaatacaagttccttgataccctaaaaccttggattaaacagaatgtgcattgtacatctttaaac

SEQ ID NO: 152850 - DNA, 1963 bp, Homo sapiens
  Payload ID: 10064
  Gene Symbol: MARCH6
  Gene Name: membrane-associated ring finger (C3HC4) 6, E3 ubiquitin protein ligase
  ENST ID: ENST00000510792
  CDS Start-End: 137-1963
cttcattttttagtaatatataacagtcagtgagagaatttggttttcagagatgtcatccaaagcagattttacagttgtttcctggttataaattgtctcaacaattctcttttagtcatttagattgtttaatatgggaaaaccggggtgtagaacatgttgtaaaattaaattttatttacttttttcttatttccaggtccaagcatctcattttgaaggcctaatcacaaccatagttgggtatatacttttagcaataacactgataatttgtcatggcttggcaactcttgtgaaatttcatagatctcgtcgcttactgggagtctgctatattgttgttaaggtctctttgttagtggtggtagaaattggagtattccctctcatttgtggttggtggctggatatctgttccttggaaatgtttgatgctactctgaaagatcgagaactgagctttcagtcggctccaggtactaccatgtttctgcattggctagtgggaatggtatatgtcttctactttgcctccttcattctactactgagagaggtacttcgacctggtgtcctgtggtttctaaggaatttgaatgatccagatttcaatccagtacaggaaatgatccatttgccaatatataggcatctccgaagatttattttgtcagtgattgtctttggctccattgtcctcctgatgctttggcttcctatacgtataattaagagtgtgctgcctaattttcttccatacaatgtcatgctctacagtgatgctccagtgagtgaactgtccctcgagctgcttctgcttcaggttgtcttgccagcattactcgaacagggacacacgaggcagtggctgaaggggctggtgcgagcgtggactgtgaccgccggatacttgctggatcttcattcttatttattgggagaccaggaagaaaatgaaaacagtgcaaatcaacaagttaacaataatcagcatgctcgaaataacaacgctattcctgtggtgggagaaggccttcatgcagcccaccaagccatactccagcagggagggcctgttggctttcagccttaccgccgacctttaaattttccactcaggatatttctgttgattgtcttcatgtgtataacattactgattgccagcctcatctgccttactttaccagtatttgctggccgttggttaatgtcgttttggacggggactgccaaaatccatgagctctacacagctgcttgtggtctctatgtttgctggctaaccataagggctgtgacggtgatggtggcatggatgcctcagggacgcagagtgatcttccagaaggttaaagagtggtctctcatgatcatgaagactttgatagttgcggtgctgttggctggagttgtccctctccttctggggctcctgtttgagctggtcattgtggctcccctgagggttcccttggatcagactcctcttttttatccatggcaggactgggcacttggagtcctgcatgccaaaatcattgcagctataacattgatgggtcctcagtggtggttgaaaactgtaattgaacaggtttacgcaaatggcatccggaacattgaccttcactatattgttcgtaaactggcagctcccgtgatctctgtgctgttgctttccctgtgtgtaccttatgtcatagcttctggtgttgttcctttactaggtgttactgcggaaatgcaaaacttagtccatcggcggatttatccatttttactgatggtcgtggtattgatggcaattttgtccttccaagtccgccagtttaagcgcctttatgaacatattaaaaatgacaagtaccttgtgggtcaacgactcgtgaactacgaacggaaatctggcaaacaaggctcatctccaccacctccacagtcatcccaagaataa

SEQ ID NO: 152851 - DNA, 2874 bp, Homo sapiens
  Payload ID: 10064
  Gene Symbol: MARCH6
  Gene Name: membrane-associated ring finger (C3HC4) 6, E3 ubiquitin protein ligase
  Uniprot ID: O60337
  ENST ID: ENST00000503788
  CDS Start-End: 184-2601
gtgtcgctcgctttctgtcagcctctctccctctccctctcccctctccttcctctcgcttcctctctcgcacctgagcgtacgcacctgcccgggcccggctccctcctcctctcccctccctctttccccgcccggccgcgggagcctcgtggctgcgtcaccgccgcccccccagacaagatggacaccgcggaggaaggccgcatctacaagtgcttgtttactggctccgtgagctcactactgacgctgccattagatatgctgtcaacggaaaatttgttggcagattgtttgcagggttgttttgtggtgacgtgcacactgtgtgcattcatcagcctggtgtggttgagagagcagatagtccatgggggagcaccaatttggttggagcatgctgccccaccgttcaatgctgcggggcatcaccaaaatgaggctccagcaggaggaaatggtgcagaaaatgttgctgctgatcagcctgctaacccaccagctgagaacgcagtggtgggggaaaaccctgatgcccaggatgaccaggcagaagaggaggaggaggacaatgaggaggaagatgacgctggtgtggaggatgcggcagatgctaataacggagcccaggatgacatgaattggaatgctttagaatgggaccgagctgctgaagagcttacatgggaaagaatgctaggacttgatggatcactagtttttctggaacatgtcttctgggtggtatctttaaatacactgttcattcttgtttttgcattttgcccttaccatattggtcatttctcccttgttggtttgggatttgaagaacacgtccaagcatctcattttgaaggcctaatcacaaccatagttgggtatatacttttagcaataacactgataatttgtcatggcttggcaactcttgtgaaatttcatagatctcgtcgcttactgggagtctgctatattgttgttaaggtctctttgttagtggtggtagaaattggagtattccctctcatttgtggttggtggctggatatctgttccttggaaatgtttgatgctactctgaaagatcgagaactgagctttcagtcggctccaggtactaccatgtttctgcattggctagtgggaatggtatatgtcttctactttgcctccttcattctactactgagagaggtacttcgacctggtgtcctgtggtttctaaggaatttgaatgatccagatttcaatccagtacaggaaatgatccatttgccaatatataggcatctccgaagatttattttgtcagtgattgtctttggctccattgtcctcctgatgctttggcttcctatacgtataattaagagtgtgctgcctaattttcttccatacaatgtcatgctctacagtgatgctccagtgagtgaactgtccctcgagctgcttctgcttcaggttgtcttgccagcattactcgaacagggacacacgaggcagtggctgaaggggctggtgcgagcgtggactgtgaccgccggatacttgctggatcttcattcttatttattgggagaccaggaagaaaatgaaaacagtgcaaatcaacaagttaacaataatcagcatgctcgaaataacaacgctattcctgtggtgggagaaggccttcatgcagcccaccaagccatactccagcagggagggcctgttggctttcagccttaccgccgacctttaaattttccactcaggatatttctgttgattgtcttcatgtgtataacattactgattgccagcctcatctgccttactttaccagtatttgctggccgttggttaatgtcgttttggacggggactgccaaaatccatgagctctacacagctgcttgtggtctctatgtttgctggctaaccataagggctgtgacggtgatggtggcatggatgcctcagggacgcagagtgatcttccagaaggttaaagagtggtctctcatgatcatgaagactttgatagttgcggtgctgttggctggagttgtccctctccttctggggctcctgtttgagctggtcattgtggctcccctgagggttcccttggatcagactcctcttttttatccatggcaggactgggcacttggagtcctgcatgccaaaatcattgcagctataacattgatgggtcctcagtggtggttgaaaactgtaattgaacaggtttacgcaaatggcatccggaacattgaccttcactatattgttcgtaaactggcagctcccgtgatctctgtgctgttgctttccctgtgtgtaccttatgtcatagcttctggtgttgttcctttactaggtgttactgcggaaatgcaaaacttagtccatcggcggatttatccatttttactgatggtcgtggtattgatggcaattttgtccttccaagtccgccagtttaagcgcctttatgaacatattaaaaatgacaagtaccttgtgggtcaacgactcgtgaactacgaacggaaatctggcaaacaaggctcatctccaccacctccacagtcatcccaagaataaagtagttgtctcaacaacttgaccttcccctttacatgtccttttttgtggacttctctctttggagatttttcccagtgatctctcagcgttgtttttaagttaaatgtatttgacttgtgttctcagcattcagagagcagcggtgtaagattctgctgttctccctggatcttctgacattactgctgtctgagatttgtatatgtgtaaatacaagttccttgataccctaaaaccttggattaaacagaatgtgcattgtacatcttt

SEQ ID NO: 152852 - DNA, 580 bp, Homo sapiens
  Payload ID: 10064
  Gene Symbol: MARCH6
  Gene Name: membrane-associated ring finger (C3HC4) 6, E3 ubiquitin protein ligase
  ENST ID: ENST00000502795
  CDS Start-End: 189-422
ctcccgtgtcgctcgctttctgtcagcctctctccctctccctctcccctctccttcctctcgcttcctctctcgcacctgagcgtacgcacctgcccgggcccggctccctcctcctctcccctccctctttccccgcccggccgcgggagcctcgtggctgcgtcaccgccgcccccccagacaagatggacaccgcggaggaagacatatgtagagtgtgtcggtcagaaggaacacctgagaaaccgctttatcatccttgtgtatgtactggcagtattaagtttatccatcaagaatgcttagttcaatggctgaaacacagtcgaaaagaatactgtgaattatgcaagcacagatttgcttttacaccaaggaaaatttgttggcagattgtttgcagggttgttttgtggtgacgtgcacactgtgtgcattcatcagcctggtgtggttgagagagcagatagtccatgggggagcaccaatttggttggagcatgctgccccaccgttcaatgctgcggggcatcaccaaaatgaggctccagcaggaggaaatggtgcagaaaatgtt

SEQ ID NO: 152853 - DNA, 5922 bp, Homo sapiens
  Payload ID: 10065
  Gene Symbol: MARCH7
  Gene Name: membrane-associated ring finger (C3HC4) 7, E3 ubiquitin protein ligase
  Uniprot ID: Q9H992
  ENST ID: ENST00000259050
  CDS Start-End: 123-2237
ggtggctggttctgcgccggatccgggagaggggcgggcgccattgtgcttcgctgccgactgcatttcctcagtcacgggcctagaactccaaggagaaaggcggcgaaaaatctttaagaatggagtctaaaccttcaaggattccaagaagaatttctgttcaaccttccagctccttaagtgctaggatgatgtctggaagcagaggaagtagtttaaatgatacctatcactcaagagactcttcatttagattggattctgaatatcagtctacatcagcatcagcatctgcgtcaccatttcaatctgcatggtatagtgaatctgagataactcagggagcacgctcaagatcgcagaaccagcaacgggatcatgattcaaaaagacctaaactttcctgtacaaactgtactacctcagctgggagaaatgttggaaatggtttaaacacattatcagattcatcttggaggcatagtcaagttcctagatcttcatcaatggtacttggatcatttggaacagacttaatgagagagaggagagatttggagagaagaacagattcctctattagtaatcttatggattatagtcaccgaagtggtgatttcacaacttcatcatatgttcaagacagagttccttcatattcacaaggagcaagaccaaaagaaaactcaatgagcactttacagttgaatacatcatccacaaaccaccaattgccttctgaacatcagaccatactaagttctagggactccagaaattctttaagatcaaatttttcttcaagagaatcagaatcttcccgaagcaatacgcagcctggattttcttacagttcaagtagagatgaagccccaatcataagcaattcagaaagggttgtttcatctcaaagaccatttcaagaatcttctgacaatgaaggtaggcggacaacgaggagattgctgtcacgcatagcttctagcatgtcatctacttttttttcacgaagatctagtcaggattccttgaatacaagatcattgaattctgaaaattcttacgtttctccaagaatcttgacagcttcacagtcccgtagtaatgtaccatcagcttctgaagttcccgataatagggcatctgaagcttctcagggatttcgatttcttaggcgaagatggggtttgtcatctcttagccacaatcatagctctgagtcagattcagaaaattttaaccaagaatctgaaggtagaaatacaggaccatggttatcttcctcacttagaaatagatgcacacctttgttctctagaaggaggcgagagggaagagatgaatcttcaaggatacctacctctgatacatcatctagatctcatatttttagaagagaatcaaatgaagtggttcaccttgaagcacagaatgatcctcttggagctgctgccaacagaccacaagcatctgcagcatcaagcagtgccacaacaggtggctctacatcagattcggctcaaggtggaagaaatacaggaatatcagggattcttcctggttccttattccggtttgcagtccctccagcacttgggagtaatttgaccgacaatgtcatgatcacagtagatattattccttcaggttggaattcagctgatggtaaaagtgataaaactaaaagtgcgccttcaagagatccagaaagattgcagaaaataaaagagagcctccttttagaggactcagaagaagaagaaggtgacttatgtagaatttgtcaaatggcagctgcatcatcatctaatttgctgatagagccatgcaagtgcacaggaagtttgcagtatgtccaccaagactgtatgaaaaagtggttacaggccaaaattaactctggttcttcattagaagctgtaaccacctgtgaactatgtaaagagaagttggagcttaacctggaggattttgatattcatgaactacatagagctcatgcaaatgaacaagctgagtatgagtttatcagctctggtctctacctagtggtgttattgcacttgtgcgaacaaagcttttctgatatgatgggaaatacaaatgaaccaagcacacgtgtccgatttattaaccttgcaagaactcttcaggcacatatggaagatctcgaaacttcagaggatgattccgaagaagacggagaccataacaggacatttgatattgcctaacttcatataagacagatggatgatctgtgaacataagtgtttattaaaaatggcaattaaatataaattacttttgtgggggaatgcctaataaatacattgactatatataaaatgaatatatacatacacatgtatgcctgtatatatatattcattctccagtgttgctgaattaaaattctgctggactttttaacatagcaaatccgatgtttataaactggtaatcaaaaaggttttttcttttaggtgagtgggaaagtattacccttgttttaaatatctaagcaatgcctatcaacccttttttgtgttatgattactgtagtcatatttatgaaaaaaggtttgtgttttactcttgctagtgagaaaagtgggacaaaatatacttttgaaataaaatgctatatggcacctaattattttttcttttaaaatgccttaagttgcagtctcattttgataatcatttgcttccagtgtttaaaaattaaaaaaagaatggggagaaggttatgagaagagcattattaagtttccaaatttaatttgaattccaaattcacctagcaataaaatctaatttttaaaaagtatataaatataaaatgtataaatgatggatagatttttgtattgatttgcaaaatgcagattatatttgataggctatagtatgtagatattccttttaggaatattacagctgtaaattatatgagacttgccagtcaaatgctatttggtttaaaaaaattattgcaatctcaagttaatggaatatttttaaatcccacattcagagtttaaaacactggttttcaatgtgttttttagtgttgtcacttgtttatagataaatatataaataacctgtttggatcctggtcctttttaactgttccttggtaattctgagcatttatttgatgacttaatatttttcactacctttggagaacagatgaacattattcaccatgaatggatctatactgtgtggtcatgagttgtgtatacttccataacactgtatttttcttctgtcagtacccttaggatacactttaaaacaccttaaggtctgatgttatggcaacaaactactttttcaaacctaaataggaaccatgtaatttctcaaaagtgattgaacagtttgcccacacttagtttgttggtcttatgtaaaacattggctcaaaataaagtacacactgatttattttactgtttgaaatgtttccttttaaactggtgctcaaagaagacatcagacttcataaccaagaattttattacaatttcaaatctcattttaagcaataatataaatgttctaaaacatttgctcacctcttgccagttacctttgcattgtctgtcttaaagcaaaaatataaaatttaagggtggtagttttaatatattctgtgggtcctaagggatgctttgaatttgaagtatatatacttttaataaaattcagtatgacagttgtcttctgcttaacccataaaactttatttaaaaaatttaactagatggtacaaaacattcattggtatgcacataattctgtatagttttgttattaaatgctaaatgacagtgataacaatggcttaagctttacagtattcttgtagttccctagtaccacttagtatttaaatattgtcatattagcttcagattatcatgtaaatgacggtagaggaataagagaaaaggctttcattggttatcagttttaaattctgaacaaaagagaccatacactgctcactacaagaatgcaattttctaagaaaatgtagtttaaaatgttattctgaatatctgccaaagaattatattgttattactagctagaaccaagatgttgaagaaagcagtttctacattctggatgtagtaaacaagcctgcctgtgtaatccaattatctcttcactaatgagtagataaggtgcctgttatagatgttctggtatataaagaaaaaatgtaggccaagtgtggtggctcacgcatgtaatcccagcactttgggagaccaaggtgggtggatcacttgaggtcaggagtttgagaccagcccagtcaatatggcgaaaccccgtctctaccaaaaatacaaaaagttagctgggtgtggtgacagatgtctgtggtcccagctactaaggaggctgaggcaggagaattgcttgaaaacctgcaaggcggagattggagagagccaagatcgagccactgcactgtagcctgggcagcacagtgagactccatcatatatatatatatagcacttcattaccagaggcctcttggcctgttgaaaaatgaaaccaaatattgaaaattaaatcagagtttaaagcagctattttggaagagctgccattaggtagaaagtatcaaaatgtacaaaagaaagttgtatgggagttgagtggaaggtaggatttaagagcagcactgcccaataaaacttcctataatgaaaatgttctataatgtatgttgcccagtacagtagccactaaccacctgtgatttgaacacttgacaatgtggctaatgtaattcgaaaactggattttaaactaaatttacttaaatagcctcatgtggctagtggctcattggacattgtagttgtagacgtttgagactgttggttttaagttggacttaatcactttcctacccaaattctaccactcctttaagaactcctttagaactcttttagttcacataatacgccatattttttttactgtgcctgtagttcttcaaggagtggtacaatttgggtaggaaaaccaggcaggaattccagggtagtgttcaatattgacattagtaatagtctatcaataataaaatagacatctcaatcactatacaaaatctcagaaatgtaaagctcttacagagcatgcttgtgcttgtgtaacagctggtgtaatgcctgcattttcagtaccatgtagccgcactgttaatagttttctatcactttttagttactcatgtctcattaatgatagtgccattaattgtgatgagtgttttcgattcatgtggtcaataaaaagagactacacaagctggaactttgttgccattagtcaagctagtgagatagtatatctatctatctccccagaagaaagtaagataattgatggggtgtggattcagaagagggattacttttctttgagcctcagacttctagacagtatacttcagtcagtaatggaccacatatagaacagtgtttccttagtagaccatatttttactgtaccttttctatatttagatacacaaatattgtgttacaattgtctgcagtattcagcacagtaacatgctgtgtaggtttgggacaaaataggctctaccatctgggtttgtgtaaatacaagctgattttcacacaagattccctaactatgcatttcttagaacgtatccccattgataagtgatacgtgactaatttacgtgaaatttatacattctttatctttcctgtttttggtttattgatggtgaggaaaattactcgtttcagctttttcatttttttactccccaaatgattttcacctttttcttaaaatgtacaataaatgcactgaaaactttgatcactgtca

SEQ ID NO: 152854 - DNA, 2402 bp, Homo sapiens
  Payload ID: 10065
  Gene Symbol: MARCH7
  Gene Name: membrane-associated ring finger (C3HC4) 7, E3 ubiquitin protein ligase
  Uniprot ID: Q9H992
  ENST ID: ENST00000409175
  CDS Start-End: 261-2375
acttaacggtggtggctggttctgcgccggatccgggagaggggcgggcgccattgtgcttcgctgccgactgcatttcctcagtcacgggcctagaactccaaggagaaaggcggcggaattcatgatttgttcctgtagctgaaacatacattgaatgctttctgccctggcatgaacttacatggtcagagctggtttttcctgccctcaaatatatttctctgactctaccggttagactagaaaaatctttaagaatggagtctaaaccttcaaggattccaagaagaatttctgttcaaccttccagctccttaagtgctaggatgatgtctggaagcagaggaagtagtttaaatgatacctatcactcaagagactcttcatttagattggattctgaatatcagtctacatcagcatcagcatctgcgtcaccatttcaatctgcatggtatagtgaatctgagataactcagggagcacgctcaagatcgcagaaccagcaacgggatcatgattcaaaaagacctaaactttcctgtacaaactgtactacctcagctgggagaaatgttggaaatggtttaaacacattatcagattcatcttggaggcatagtcaagttcctagatcttcatcaatggtacttggatcatttggaacagacttaatgagagagaggagagatttggagagaagaacagattcctctattagtaatcttatggattatagtcaccgaagtggtgatttcacaacttcatcatatgttcaagacagagttccttcatattcacaaggagcaagaccaaaagaaaactcaatgagcactttacagttgaatacatcatccacaaaccaccaattgccttctgaacatcagaccatactaagttctagggactccagaaattctttaagatcaaatttttcttcaagagaatcagaatcttcccgaagcaatacgcagcctggattttcttacagttcaagtagagatgaagccccaatcataagcaattcagaaagggttgtttcatctcaaagaccatttcaagaatcttctgacaatgaaggtaggcggacaacgaggagattgctgtcacgcatagcttctagcatgtcatctacttttttttcacgaagatctagtcaggattccttgaatacaagatcattgaattctgaaaattcttacgtttctccaagaatcttgacagcttcacagtcccgtagtaatgtaccatcagcttctgaagttcccgataatagggcatctgaagcttctcagggatttcgatttcttaggcgaagatggggtttgtcatctcttagccacaatcatagctctgagtcagattcagaaaattttaaccaagaatctgaaggtagaaatacaggaccatggttatcttcctcacttagaaatagatgcacacctttgttctctagaaggaggcgagagggaagagatgaatcttcaaggatacctacctctgatacatcatctagatctcatatttttagaagagaatcaaatgaagtggttcaccttgaagcacagaatgatcctcttggagctgctgccaacagaccacaagcatctgcagcatcaagcagtgccacaacaggtggctctacatcagattcggctcaaggtggaagaaatacaggaatatcagggattcttcctggttccttattccggtttgcagtccctccagcacttgggagtaatttgaccgacaatgtcatgatcacagtagatattattccttcaggttggaattcagctgatggtaaaagtgataaaactaaaagtgcgccttcaagagatccagaaagattgcagaaaataaaagagagcctccttttagaggactcagaagaagaagaaggtgacttatgtagaatttgtcaaatggcagctgcatcatcatctaatttgctgatagagccatgcaagtgcacaggaagtttgcagtatgtccaccaagactgtatgaaaaagtggttacaggccaaaattaactctggttcttcattagaagctgtaaccacctgtgaactatgtaaagagaagttggagcttaacctggaggattttgatattcatgaactacatagagctcatgcaaatgaacaagctgagtatgagtttatcagctctggtctctacctagtggtgttattgcacttgtgcgaacaaagcttttctgatatgatgggaaatacaaatgaaccaagcacacgtgtccgatttattaaccttgcaagaactcttcaggcacatatggaagatctcgaaacttcagaggatgattccgaagaagacggagaccataacaggacatttgatattgcctaacttcatataagacagatggatgatctg

SEQ ID NO: 152855 - DNA, 2147 bp, Homo sapiens
  Payload ID: 10065
  Gene Symbol: MARCH7
  Gene Name: membrane-associated ring finger (C3HC4) 7, E3 ubiquitin protein ligase
  Uniprot ID: Q9H992
  ENST ID: ENST00000409591
  CDS Start-End: 80-2080
tttgtaagctgcgcttcacctgctactaatcttgctgttacttctgctatcccatctttaaatttttatcacaatttgaatgattggcaactatgatcatcttatgtctttagtaacatctacatcagcatcagcatctgcgtcaccatttcaatctgcatggtatagtgaatctgagataactcagggagcacgctcaagatcgcagaaccagcaacgggatcatgattcaaaaagacctaaactttcctgtacaaactgtactacctcagctgggagaaatgttggaaatggtttaaacacattatcagattcatcttggaggcatagtcaagttcctagatcttcatcaatggtacttggatcatttggaacagacttaatgagagagaggagagatttggagagaagaacagattcctctattagtaatcttatggattatagtcaccgaagtggtgatttcacaacttcatcatatgttcaagacagagttccttcatattcacaaggagcaagaccaaaagaaaactcaatgagcactttacagttgaatacatcatccacaaaccaccaattgccttctgaacatcagaccatactaagttctagggactccagaaattctttaagatcaaatttttcttcaagagaatcagaatcttcccgaagcaatacgcagcctggattttcttacagttcaagtagagatgaagccccaatcataagcaattcagaaagggttgtttcatctcaaagaccatttcaagaatcttctgacaatgaaggtaggcggacaacgaggagattgctgtcacgcatagcttctagcatgtcatctacttttttttcacgaagatctagtcaggattccttgaatacaagatcattgaattctgaaaattcttacgtttctccaagaatcttgacagcttcacagtcccgtagtaatgtaccatcagcttctgaagttcccgataatagggcatctgaagcttctcagggatttcgatttcttaggcgaagatggggtttgtcatctcttagccacaatcatagctctgagtcagattcagaaaattttaaccaagaatctgaaggtagaaatacaggaccatggttatcttcctcacttagaaatagatgcacacctttgttctctagaaggaggcgagagggaagagatgaatcttcaaggatacctacctctgatacatcatctagatctcatatttttagaagagaatcaaatgaagtggttcaccttgaagcacagaatgatcctcttggagctgctgccaacagaccacaagcatctgcagcatcaagcagtgccacaacaggtggctctacatcagattcggctcaaggtggaagaaatacaggaatatcagggattcttcctggttccttattccggtttgcagtccctccagcacttgggagtaatttgaccgacaatgtcatgatcacagtagatattattccttcaggttggaattcagctgatggtaaaagtgataaaactaaaagtgcgccttcaagagatccagaaagattgcagaaaataaaagagagcctccttttagaggactcagaagaagaagaaggtgacttatgtagaatttgtcaaatggcagctgcatcatcatctaatttgctgatagagccatgcaagtgcacaggaagtttgcagtatgtccaccaagactgtatgaaaaagtggttacaggccaaaattaactctggttcttcattagaagctgtaaccacctgtgaactatgtaaagagaagttggagcttaacctggaggattttgatattcatgaactacatagagctcatgcaaatgaacaagctgagtatgagtttatcagctctggtctctacctagtggtgttattgcacttgtgcgaacaaagcttttctgatatgatgggaaatacaaatgaaccaagcacacgtgtccgatttattaaccttgcaagaactcttcaggcacatatggaagatctcgaaacttcagaggatgattccgaagaagacggagaccataacaggacatttgatattgcctaacttcatataagacagatggatgatctgtgaacataagtgtttattaaaaatggcaattaaatataaa

SEQ ID NO: 152856 - DNA, 983 bp, Homo sapiens
  Payload ID: 10065
  Gene Symbol: MARCH7
  Gene Name: membrane-associated ring finger (C3HC4) 7, E3 ubiquitin protein ligase
  ENST ID: ENST00000420397
  CDS Start-End: 1-375
gagccatgcaagtgcacaggaagtttgcagtatgtccaccaagactgtatgaaaaagtggttacaggccaaaattaactctggttcttcattagaagctgtaaccacctgtgaactatgtaaagagaagttggagcttaacctggaggattttgatattcatgaactacatagagctcatgcaaatgaacaagctgagtatgagtttatcagctctggtctctacctagtggtgttattgcacttgtgcgaacaaagcttttctgatatgatgggaaatacaaatgaaccaagcacacgtgtccgacttcagaggatgattccgaagaagacggagaccataacaggacatttgatattgcctaacttcatataagacagatggatgatctgtgaacataagtgtttattaaaaatggcaattaaatataaattacttttgtgggggaatgcctaataaatacattgactatatataaaatgaatatatacatacacatgtatgcctgtatatatatattcattctccagtgttgctgaattaaaattctgctggactttttaacatagcaaatccgatgtttataaactggtaatcaaaaaggttttttcttttaggtgagtgggaaagtattacccttgttttaaatatctaagcaatgcctatcaacccttttttgtgttatgattactgtagtcatatttatgaaaaaaggtttgtgttttactcttgctagtgagaaaagtgggacaaaatatacttttgaaataaaatgctatatggcacctaattattttttcttttaaaatgccttaagttgcagtctcattttgataatcatttgcttccagtgtttaaaaattaaaaaaagaatggggagaaggttatgagaagagcattattaagtttccaaatttaatttgaattccaaattcacctagcaataaaatctaatttttaaaaagtatataaatataaaatgt

SEQ ID NO: 152857 - DNA, 559 bp, Homo sapiens
  Payload ID: 10065
  Gene Symbol: MARCH7
  Gene Name: membrane-associated ring finger (C3HC4) 7, E3 ubiquitin protein ligase
  ENST ID: ENST00000421037
  CDS Start-End: 256-559
gttctgcgccggatccgggagaggggcgggcgccattgtgcttcgctgccgactgcatttcctcagtcacgggcctagaactccaaggagaaaggcggcggtgcgtgttgctgcgagtgggacgcgcactggtcggtgccggctcaggagccgggctttctgccctggcatgaacttacatggtcagagctggtttttcctgccctcaaatatatttctctgactctaccggttagactagaaaaatctttaagaatggagtctaaaccttcaaggattccaagaagaatttctgttcaaccttccagctccttaagtgctaggatgatgtctggaagcagaggaagtagtttaaatgatacctatcactcaagagactcttcatttagattggattctgaatatcagtctacatcagcatcagcatctgcgtcaccatttcaatctgcatggtatagtgaatctgagataactcagggagcacgctcaagatcgcagaaccagcaacgggatcatgattcaaaaagacctaaactttcctgtacaaactgtactacct

SEQ ID NO: 152858 - DNA, 3303 bp, Homo sapiens
  Payload ID: 10065
  Gene Symbol: MARCH7
  Gene Name: membrane-associated ring finger (C3HC4) 7, E3 ubiquitin protein ligase
  ENST ID: ENST00000539065
  CDS Start-End: 165-2072
gcgaagtggggggaggaggagcagggaggggcacttaacggtggtggctggttctgcgccggatccgggagaggggcgggcgccattgtgcttcgctgccgactgcatttcctcagtcacgggcctagaactccaaggagaaaggcggcgaaaaatctttaagaatggagtctaaaccttcaaggattccaagaagaatttctgttcaaccttccagctccttaagtgctaggatgatgtctggaagcagaggaagtagtttaaatgatacctatcactcaagagactcttcatttagattggattctgaatatcagtctacatcagcatcagcatctgcgtcaccatttcaatctgcatggtatagtgaatctgagataactcagggagcacgctcaagatcgcagaaccagcaacgggatcatgattcaaaaagacctaaactttcctgtacaaactgtactacctcagctgggagaaatgttggaaatggtttaaacacattatcagatgttcaagacagagttccttcatattcacaaggagcaagaccaaaagaaaactcaatgagcactttacagttgaatacatcatccacaaaccaccaattgccttctgaacatcagaccatactaagttctagggactccagaaattctttaagatcaaatttttcttcaagagaatcagaatcttcccgaagcaatacgcagcctggattttcttacagttcaagtagagatgaagccccaatcataagcaattcagaaagggttgtttcatctcaaagaccatttcaagaatcttctgacaatgaaggtaggcggacaacgaggagattgctgtcacgcatagcttctagcatgtcatctacttttttttcacgaagatctagtcaggattccttgaatacaagatcattgaattctgaaaattcttacgtttctccaagaatcttgacagcttcacagtcccgtagtaatgtaccatcagcttctgaagttcccgataatagggcatctgaagcttctcagggatttcgatttcttaggcgaagatggggtttgtcatctcttagccacaatcatagctctgagtcagattcagaaaattttaaccaagaatctgaaggtagaaatacaggaccatggttatcttcctcacttagaaatagatgcacacctttgttctctagaaggaggcgagagggaagagatgaatcttcaaggatacctacctctgatacatcatctagatctcatatttttagaagagaatcaaatgaagtggttcaccttgaagcacagaatgatcctcttggagctgctgccaacagaccacaagcatctgcagcatcaagcagtgccacaacaggtggctctacatcagattcggctcaaggtggaagaaatacaggaatatcagggattcttcctggttccttattccggtttgcagtccctccagcacttgggagtaatttgaccgacaatgtcatgatcacagtagatattattccttcaggttggaattcagctgatggtaaaagtgataaaactaaaagtgcgccttcaagagatccagaaagattgcagaaaataaaagagagcctccttttagaggactcagaagaagaagaaggtgacttatgtagaatttgtcaaatggcagctgcatcatcatctaatttgctgatagagccatgcaagtgcacaggaagtttgcagtatgtccaccaagactgtatgaaaaagtggttacaggccaaaattaactctggttcttcattagaagctgtaaccacctgtgaactatgtaaagagaagttggagcttaacctggaggattttgatattcatgaactacatagagctcatgcaaatgaacaagctgagtatgagtttatcagctctggtctctacctagtggtgttattgcacttgtgcgaacaaagcttttctgatatgatgggaaatacaaatgaaccaagcacacgtgtccgacttcagaggatgattccgaagaagacggagaccataacaggacatttgatattgcctaacttcatataagacagatggatgatctgtgaacataagtgtttattaaaaatggcaattaaatataaattacttttgtgggggaatgcctaataaatacattgactatatataaaatgaatatatacatacacatgtatgcctgtatatatatattcattctccagtgttgctgaattaaaattctgctggactttttaacatagcaaatccgatgtttataaactggtaatcaaaaaggttttttcttttaggtgagtgggaaagtattacccttgttttaaatatctaagcaatgcctatcaacccttttttgtgttatgattactgtagtcatatttatgaaaaaaggtttgtgttttactcttgctagtgagaaaagtgggacaaaatatacttttgaaataaaatgctatatggcacctaattattttttcttttaaaatgccttaagttgcagtctcattttgataatcatttgcttccagtgtttaaaaattaaaaaaagaatggggagaaggttatgagaagagcattattaagtttccaaatttaatttgaattccaaattcacctagcaataaaatctaatttttaaaaagtatataaatataaaatgtataaatgatggatagatttttgtattgatttgcaaaatgcagattatatttgataggctatagtatgtagatattccttttaggaatattacagctgtaaattatatgagacttgccagtcaaatgctatttggtttaaaaaaattattgcaatctcaagttaatggaatatttttaaatcccacattcagagtttaaaacactggttttcaatgtgttttttagtgttgtcacttgtttatagataaatatataaataacctgtttggatcctggtcctttttaactgttccttggtaattctgagcatttatttgatgacttaatatttttcactacctttggagaacagatgaacattattcaccatgaatggatctatactgtgtggtcatgagttgtgtatacttccataacactgtatttttcttctgtcagtacccttaggatacactttaaaacaccttaaggtctgatgttatggcaacaaactactttttcaaacctaaataggaaccatgtaatttctcaaaagtgattgaacagtttgcccacacttagtttgttggtcttatgtaaaacattggctcaaaataaagtacacactgatttattttactgtt

SEQ ID NO: 152859 - DNA, 5272 bp, Homo sapiens
  Payload ID: 10066
  Gene Symbol: MARCH8
  Gene Name: membrane-associated ring finger (C3HC4) 8, E3 ubiquitin protein ligase
  Uniprot ID: Q5T0T0
  ENST ID: ENST00000319836
  CDS Start-End: 751-1626
ctcggtgtcctcccgcggaggggcgtagggtgtaaacaggcgacgcgctgggggaggtgcggccttgctgcgtccacgtctcgggcatgctcgaggcgggccagggcggtagcgccgccagctcagagcccacctgaggtaactcctgcggcctctaggatcggagtcccccacgccgcgcgcagccgccgccgctggccgccaataagggcggccgagcccccggcccgggcagggggtgtggctgccggcagcgcgtcggctacaggtgggctgggctgggctgggctgggctgggctgggtgggggcggccgccaaggacccatccctgcgctgcgggcccggcgtggagcccgcggagaggcagcgcgactccaggcagtgggtctctctgccccggtgctcgcgtctgcccctggggccgggccgagcggaaccaggaatcgcagaaacggtcagcgcccagggctctaggccggccgccccgggtgccaggtgaattcctttccctgaccggctgtgagacgttggcccgtcagccgtcgtctttggcctgagtgtgcacatctgtaaaatggaagctcggactagtgatccgtgaggaccttccacgtctgacgtgtgatctcgagagacctgcgtacattcggggtgccagaaggaaagcatagcttgaaatccatggcccaaaatgactctaccagtggagactctcttctgtgaagaagacgaccagataagaggttgggatgagcatgccactgcatcagatctctgccattccatcccaggatgccatctctgctagagtctacagaagtaagaccaaagaaaaggagagggaagaacagaatgagaagactttgggacatttcatgagtcattcaagcaacatttctaaggctgggagtcctccgtcagcatcagctccggctccggtgtcctccttctctcgcacttctatcacgccatccagccaggacatctgcaggatctgccactgtgaaggagatgatgagagccccctgatcaccccctgccactgcacaggaagcctccacttcgtgcaccaggcctgcctgcagcagtggatcaagagctccgacacgcgctgctgcgagctctgcaagtatgagttcatcatggagaccaagctgaagccactgagaaaatgggagaagttgcagatgacgtccagcgagcgcaggaagatcatgtgctcagtgacattccacgtcattgccatcacatgtgtggtctggtccttgtatgtgctcattgaccgtactgctgaggagatcaagcaggggcaggcaacaggaatcctagaatggcccttttggactaaattggtggttgtggccatcggcttcaccggaggacttctttttatgtatgttcagtgtaaagtgtatgtgcaattgtggaagagactcaaggcctataatagagtgatctatgttcaaaactgtccagaaacaagcaaaaagaatatttttgaaaaatctccactaacagagcccaactttgaaaataaacatggatatggaatctgtcattccgacacaaactcttcttgttgcacagagcctgaagacactggagcagaaatcattcacgtctgattgtgtgcgggttgtcattttcctggacatccatgaagagctgaaggaaattgtttactgccaattgtatacctttcttatgtcctttaatagcatagactggacaggtgactatttatagtggcttctctttttctaaaccctccttagtctcctagaaaaccttcctgtgggccaggcatgcctgggtcctgcctctgcctggcagctctgtgggaaagtggaagaccccatgatgacatcatggggagccagcagagttcctgcccatggtcttgagctgaatgagagaataaaatgccaatcccaagggaagaggaggagcaggggtgcccaggccctgatacccagccgcctccagcttgcagtggtccccagcctggagcagagcattggggagtgtctagccatgacgagaagattccctctgcatcacggcgaaccccaggagatggtattgaaacagacccccaaacacagactcctgcctgccctctgccgatgctgcctcctccatgctcttgagcaggtggagccatggtgctctgtggtggcgcatgattcactgagcaaacagcactttacagaagaaaatctttattttgtaatatgtgtgtccagcgggattgacactcaaaaaaagtctcacttagaaatcttcccttccttacctttgtatctcctttacatcatgagagatcaaaaatccattttgccttacatatgctaagaagcgtggcattctttctgttcataaaacagactcatgacttttaagacaggacaagcaggccagaggctttttttttaatcacagatctcatgggaattagtggatgctaaatggcaattaaagcatgattcctatgcttttgagcctgttttatgacaaggtgttactttgtagacctggcccatacatttcttttttgtcaacactgaaaaagaacagtttctgagatcgaaatggaaggaaaggaagtgagtaatgacaacaaaactgaatatttaaaaaatattcctttatagttaaatctctccagttggtgttggcttcacattgaaagagcagccatgtgccaccctggccggggtgtgtgcactgcatgcaggttctcccttgcatgcaagatgggtgctggcccactgtgaggcttctgctcggggaagttctgtggagtcactaccagggccaagaggcaggtgggctggctctgggacgagggccaggtgtgagcaaactgccagggtccgctgtgccactgctccccggccacatgcccgcccagctgtcgccttaaccagactgaacagacaggatccttcagggcccttggccccactctcagtgcattctgtcatcagggattaccacctgtaccattttcataaaacaaaaccaaaatcactaccatcaaatggccttgtccctctaaaaagtctgcttaaaattctgtttttaaaacccagtttcctagttttccaggcaaatagttacctccgggaaagttgctgggggggcctgaagcacaatgtagcgcagatgcttcctttccaggccattctctcacccagcctgcacggaggagatgggagatgctgggggtcctgccctcagtctttttgggccttaggcgtttcgttcatcctgctaaggggatgaagcaaacacgaggtgattcctttgcctttcagagtggaagccctggagtttgttttgaaggccaggaggctgaaggatctctaagctacggtgtgggcttaatagcagcaggctttgtcctcctgtctcctccaagccagtgtctgattccttggcaacacaggtcttagtctgtggagtggctctgctgtggccttcctctggccgggcaggcactgtccagccatagccagctcctgagaataggtcagcctctcctttctgtctcccagggcacatccagcccgtgcctgtgttcactgtgccccgaagtgcaattacccataccccttctcagcctggggaccccaggcaaccacagactgtccactcaggggagctgaatcccaggtcagccctgccaatgtcccttaggaactgcccaggcaaggcccctggttttgtatacttgttcctgccacccagcagtagatgagtgtttcaggtgaagaccaggatagattttctaagtgtgaatccccacttcacatatggaaccccttatgctgaacttgaaaagcaccaagacttcctgtagacaagaaagtgcttaggtagggacagcccctgggcatcccacccaatgtagctggcaccccactatggcaaaggtgccttgataactgagccctgtatccctcccatgcccagccagattctcatgggaagccctctcccttcttttctgcctaacaccatctcatcgtttctggcctcactgtggacaatccacacacattcttctttcctctcctggcggggcacagagccacccccttgccttttcttttcttgaaggttctagttcagctcctgattcatcagacccttctagccccctgcatctagcagtgaagcatgaagcctggtggggatgtggtactcccatctggtgtggccaccagctctgccaatgttcctgtagccttggaaaacttgctctctcggttcttttgggtgctgtgtactccccagcttccccccttccccccccattttgcacctgggtttagtgaaaggatggcatttggttgacccatatagaaacccagaatgaggtctcagggccaggaggcctggtatttgtaggccagggaaggggaagaggcaagtggtctggggtatcaccagccagccctctctgatttggcctctactccccataagtcacagtaccataagcaggcttctggcctcagcaatttggtctttgtgcccaagtttattgtgagaatttcctgaaaactctataaaaggtctcttcctactgtaggcctctaatgtttctcccctttttgcttcagtccactcttcagtcttgtaggcctagttttcaaacctgcacatgtgtcctacctggccacaggcatgcaggcctcaggcagctgggccagtttgggagcctcgggtgatgtctgcacgatctggggctgcctctgcacccctgctgtgggcttcagggttggagaagggctgggaccaaccgggtgagatccacaagtctctggatgtggctgaaggcaaatacacaattgaagtactttctgttttgaagtgctttcccttttgaatctggtttgaaacatgcagcttctgtctctagcccaaggaaagaccaaaacatagggaaataaaagcatttatctttgtcttggaagtaattgttgaagttgtgcagttgatcagtgcacagttagatgcaatgtttatagaaattgattgttaaaccaaatttacactggcatgtgtggtgtagtttctaaaaggcacttcacatttgaaatttttcttaccttagaaagtttctagtgatctaaatgtctagttttgtattcttttgtgtgtgttcactgtttctcagtattaccacttgaataattctctgtacaggggggtttgtgctatacactgggatgtctaattgcagcaataaagcctttcttt

SEQ ID NO: 152860 - DNA, 1848 bp, Homo sapiens
  Payload ID: 10066
  Gene Symbol: MARCH8
  Gene Name: membrane-associated ring finger (C3HC4) 8, E3 ubiquitin protein ligase
  Uniprot ID: Q5T0T0
  ENST ID: ENST00000395769
  CDS Start-End: 240-1115
atggtaggtatagggctgtggatatcgtcagtttgaccaagtattccaagaggccccatggagtttgtcatctgtaatagaggacgttagtgcattagtgatgaaaaaactgcttaccactgactattgtgatctcccagggagtataaggcagctccgcacttgaaatccatggcccaaaatgactctaccagtggagactctcttctgtgaagaagacgaccagataagaggttgggatgagcatgccactgcatcagatctctgccattccatcccaggatgccatctctgctagagtctacagaagtaagaccaaagaaaaggagagggaagaacagaatgagaagactttgggacatttcatgagtcattcaagcaacatttctaaggctgggagtcctccgtcagcatcagctccggctccggtgtcctccttctctcgcacttctatcacgccatccagccaggacatctgcaggatctgccactgtgaaggagatgatgagagccccctgatcaccccctgccactgcacaggaagcctccacttcgtgcaccaggcctgcctgcagcagtggatcaagagctccgacacgcgctgctgcgagctctgcaagtatgagttcatcatggagaccaagctgaagccactgagaaaatgggagaagttgcagatgacgtccagcgagcgcaggaagatcatgtgctcagtgacattccacgtcattgccatcacatgtgtggtctggtccttgtatgtgctcattgaccgtactgctgaggagatcaagcaggggcaggcaacaggaatcctagaatggcccttttggactaaattggtggttgtggccatcggcttcaccggaggacttctttttatgtatgttcagtgtaaagtgtatgtgcaattgtggaagagactcaaggcctataatagagtgatctatgttcaaaactgtccagaaacaagcaaaaagaatatttttgaaaaatctccactaacagagcccaactttgaaaataaacatggatatggaatctgtcattccgacacaaactcttcttgttgcacagagcctgaagacactggagcagaaatcattcacgtctgattgtgtgcgggttgtcattttcctggacatccatgaagagctgaaggaaattgtttactgccaattgtatacctttcttatgtcctttaatagcatagactggacaggtgactatttatagtggcttctctttttctaaaccctccttagtctcctagaaaaccttcctgtgggccaggcatgcctgggtcctgcctctgcctggcagctctgtgggaaagtggaagaccccatgatgacatcatggggagccagcagagttcctgcccatggtcttgagctgaatgagagaataaaatgccaatcccaagggaagaggaggagcaggggtgcccaggccctgatacccagccgcctccagcttgcagtggtccccagcctggagcagagcattggggagtgtctagccatgacgagaagattccctctgcatcacggcgaaccccaggagatggtattgaaacagacccccaaacacagactcctgcctgccctctgccgatgctgcctcctccatgctcttgagcaggtggagccatggtgctctgtggtggcgcatgattcactgagcaaacagcactttacagaagaaaatctttattttgtaatatgtgtgtccagcgggattgacactcaaaaaaagtctcacttagaaatcttcccttccttacctttgtatctcctttacatcatgagagatcaaaaatccattttgccttacatatgctaagaa

SEQ ID NO: 152861 - DNA, 1456 bp, Homo sapiens
  Payload ID: 10066
  Gene Symbol: MARCH8
  Gene Name: membrane-associated ring finger (C3HC4) 8, E3 ubiquitin protein ligase
  Uniprot ID: Q5T0T0
  ENST ID: ENST00000395771
  CDS Start-End: 1-723
gctgggagtcctccgtcagcatcagctccggctccggtgtcctccttctctcgcacttctatcacgccatccagccaggacatctgcaggatctgccactgtgaaggagatgatgagagccccctgatcaccccctgccactgcacaggaagcctccacttcgtgcaccaggcctgcctgcagcagtggatcaagagctccgacacgcgctgctgcgagctctgcaagtatgagttcatcatggagaccaagctgaagccactgagaaaatgggagaagttgcagatgacgtccagcgagcgcaggaagatcatgtgctcagtgacattccacgtcattgccatcacatgtgtggtctggtccttgtatgtgctcattgaccgtactgctgaggagatcaagcaggggcaggcaacaggaatcctagaatggcccttttggactaaattggtggttgtggccatcggcttcaccggaggacttctttttatgtatgttcagtgtaaagtgtatgtgcaattgtggaagagactcaaggcctataatagagtgatctatgttcaaaactgtccagaaacaagcaaaaagaatatttttgaaaaatctccactaacagagcccaactttgaaaataaacatggatatggaatctgtcattccgacacaaactcttcttgttgcacagagcctgaagacactggagcagaaatcattcacgtctgattgtgtgcgggttgtcattttcctggacatccatgaagagctgaaggaaattgtttactgccaattgtatacctttcttatgtcctttaatagcatagactggacaggtgactatttatagtggcttctctttttctaaaccctccttagtctcctagaaaaccttcctgtgggccaggcatgcctgggtcctgcctctgcctggcagctctgtgggaaagtggaagaccccatgatgacatcatggggagccagcagagttcctgcccatggtcttgagctgaatgagagaataaaatgccaatcccaagggaagaggaggagcaggggtgcccaggccctgatacccagccgcctccagcttgcagtggtccccagcctggagcagagcattggggagtgtctagccatgacgagaagattccctctgcatcacggcgaaccccaggagatggtattgaaacagacccccaaacacagactcctgcctgccctctgccgatgctgcctcctccatgctcttgagcaggtggagccatggtgctctgtggtggcgcatgattcactgagcaaacagcactttacagaagaaaatctttattttgtaatatgtgtgtccagcgggattgacactcaaaaaaagtctcacttagaaatcttcccttccttacctttgtatctcctttacatcatgagagatcaaaaatccattttgccttacatatgctaagaa

SEQ ID NO: 152862 - DNA, 695 bp, Homo sapiens
  Payload ID: 10066
  Gene Symbol: MARCH8
  Gene Name: membrane-associated ring finger (C3HC4) 8, E3 ubiquitin protein ligase
  ENST ID: ENST00000453980
  CDS Start-End: 429-695
cctggggccgggccgagcggaaccaggaatcgcagaaacggtcagcgcccagggctctaggccggccgccccgggtgccaggtgaattcctttccctgaccggctgtgagacgttggcccgtcagccgtcgtctttggcctgagtgtgcacatctgtaaaatggaagctcggactagtgatccgtgaggaccttccacgtctgacgtgtgatctcgagagacctgcgtacattcggggtgccagaaggaaagcatagagatggggtcttgctgtgttgcccagactggtctcaaactcctggcctcaagtgatccttctgcctcagcttcccaaagtactgggattacagcttgaaatccatggcccaaaatgactctaccagtggagactctcttctgtgaagaagacgaccagataagaggttgggatgagcatgccactgcatcagatctctgccattccatcccaggatgccatctctgctagagtctacagaagtaagaccaaagaaaaggagagggaagaacagaatgagaagactttgggacatttcatgagtcattcaagcaacatttctaaggctgggagtcctccgtcagcatcagctccggctccggtgtcctccttctctcgcacttctatcacgccatccagccaggacatctgcaggatctgccactgtgaaggagatgat

SEQ ID NO: 152863 - DNA, 5638 bp, Homo sapiens
  Payload ID: 10066
  Gene Symbol: MARCH8
  Gene Name: membrane-associated ring finger (C3HC4) 8, E3 ubiquitin protein ligase
  Uniprot ID: Q5T0T0
  ENST ID: ENST00000453424
  CDS Start-End: 263-1984
aagcaccacaggtagcttttggcatggtaggtatagggctgtggatatcgtcagtttgaccaagtattccaagaggccccatggagtttgtcatctgtaatagaggacgttagtgcattagtgatgaaaaaactgcttaccactgactattgtgatctcccagggagtataaggcagctccgcacttgaaatccatggcccaaaatgactctaccagtggagactctcttctgtgaagaagacgaccagataagaggttgggatgagcatgccactgcatcagatctctgccattccatcccaggatgccatctctgctagagtctacagaagtaagaccaaagaaaaggagagggaagaacagaatgagaagactttgggacatttcatgagtcattcaagcaacatttctaaggctgggagtcctccgtcagcatcagctccggctccggtgtcctccttctctcgcacttctatcacgccatccagccaggacatctgcagttccagtgcagtgttttctgagtgttgtcaccacagttccgtgcagtctgctgttgtctcgaaagctcctcactgccagagttctctgacacaagggctcactgtgacagttatctgtaaggacacattacaggcgtcaaagagaaattcctttggttcagaatgggcccaggccttgaagcctgctaagaataccaaagccagaagaacactaaagttctcaaggtccctcaatgatgtgggtgagaaggcgcaggatacttcagaaagttttgcctatgtggaaagaacttgttctgaagggaaattaatactccctcaagatacgtgtctcagaactaacaggtttcatcataaagaaaaaagaaccctgaaccacaaacctcttggcaattccaaacattcttgtgtttcatgcctttctgccggtcgctcaactgcctcagaggtggaagctggcaaggggggcaggcccggcctgctgctggaagagaaggcggatggtgaggccacgtcccgaagccggcaactgctccagtacctgttctcactctcgcacggcttgagcgccagcagcctgcacaggttccatgagctggagagctgcgctgctcgcctgcacactgccaagtcctccagcgggctggcagggagtatgggcttctgctctgacgagatgggagacgacgatgtctttgaggacagcacatctgcaaaactgaagagtagggttctgcgggcgcccctctgctccacggaaaaggacagcgacctggattgtccttctcccttctctgaaaaattaccccccatatctcccgtgtccacgtcaggggatgtctgcaggatctgccactgtgaaggagatgatgagagccccctgatcaccccctgccactgcacaggaagcctccacttcgtgcaccaggcctgcctgcagcagtggatcaagagctccgacacgcgctgctgcgagctctgcaagtatgagttcatcatggagaccaagctgaagccactgagaaaatgggagaagttgcagatgacgtccagcgagcgcaggaagatcatgtgctcagtgacattccacgtcattgccatcacatgtgtggtctggtccttgtatgtgctcattgaccgtactgctgaggagatcaagcaggggcaggcaacaggaatcctagaatggcccttttggactaaattggtggttgtggccatcggcttcaccggaggacttctttttatgtatgttcagtgtaaagtgtatgtgcaattgtggaagagactcaaggcctataatagagtgatctatgttcaaaactgtccagaaacaagcaaaaagaatatttttgaaaaatctccactaacagagcccaactttgaaaataaacatggatatggaatctgtcattccgacacaaactcttcttgttgcacagagcctgaagacactggagcagaaatcattcacgtctgattgtgtgcgggttgtcattttcctggacatccatgaagagctgaaggaaattgtttactgccaattgtatacctttcttatgtcctttaatagcatagactggacaggtgactatttatagtggcttctctttttctaaaccctccttagtctcctagaaaaccttcctgtgggccaggcatgcctgggtcctgcctctgcctggcagctctgtgggaaagtggaagaccccatgatgacatcatggggagccagcagagttcctgcccatggtcttgagctgaatgagagaataaaatgccaatcccaagggaagaggaggagcaggggtgcccaggccctgatacccagccgcctccagcttgcagtggtccccagcctggagcagagcattggggagtgtctagccatgacgagaagattccctctgcatcacggcgaaccccaggagatggtattgaaacagacccccaaacacagactcctgcctgccctctgccgatgctgcctcctccatgctcttgagcaggtggagccatggtgctctgtggtggcgcatgattcactgagcaaacagcactttacagaagaaaatctttattttgtaatatgtgtgtccagcgggattgacactcaaaaaaagtctcacttagaaatcttcccttccttacctttgtatctcctttacatcatgagagatcaaaaatccattttgccttacatatgctaagaagcgtggcattctttctgttcataaaacagactcatgacttttaagacaggacaagcaggccagaggctttttttttaatcacagatctcatgggaattagtggatgctaaatggcaattaaagcatgattcctatgcttttgagcctgttttatgacaaggtgttactttgtagacctggcccatacatttcttttttgtcaacactgaaaaagaacagtttctgagatcgaaatggaaggaaaggaagtgagtaatgacaacaaaactgaatatttaaaaaatattcctttatagttaaatctctccagttggtgttggcttcacattgaaagagcagccatgtgccaccctggccggggtgtgtgcactgcatgcaggttctcccttgcatgcaagatgggtgctggcccactgtgaggcttctgctcggggaagttctgtggagtcactaccagggccaagaggcaggtgggctggctctgggacgagggccaggtgtgagcaaactgccagggtccgctgtgccactgctccccggccacatgcccgcccagctgtcgccttaaccagactgaacagacaggatccttcagggcccttggccccactctcagtgcattctgtcatcagggattaccacctgtaccattttcataaaacaaaaccaaaatcactaccatcaaatggccttgtccctctaaaaagtctgcttaaaattctgtttttaaaacccagtttcctagttttccaggcaaatagttacctccgggaaagttgctgggggggcctgaagcacaatgtagcgcagatgcttcctttccaggccattctctcacccagcctgcacggaggagatgggagatgctgggggtcctgccctcagtctttttgggccttaggcgtttcgttcatcctgctaaggggatgaagcaaacacgaggtgattcctttgcctttcagagtggaagccctggagtttgttttgaaggccaggaggctgaaggatctctaagctacggtgtgggcttaatagcagcaggctttgtcctcctgtctcctccaagccagtgtctgattccttggcaacacaggtcttagtctgtggagtggctctgctgtggccttcctctggccgggcaggcactgtccagccatagccagctcctgagaataggtcagcctctcctttctgtctcccagggcacatccagcccgtgcctgtgttcactgtgccccgaagtgcaattacccataccccttctcagcctggggaccccaggcaaccacagactgtccactcaggggagctgaatcccaggtcagccctgccaatgtcccttaggaactgcccaggcaaggcccctggttttgtatacttgttcctgccacccagcagtagatgagtgtttcaggtgaagaccaggatagattttctaagtgtgaatccccacttcacatatggaaccccttatgctgaacttgaaaagcaccaagacttcctgtagacaagaaagtgcttaggtagggacagcccctgggcatcccacccaatgtagctggcaccccactatggcaaaggtgccttgataactgagccctgtatccctcccatgcccagccagattctcatgggaagccctctcccttcttttctgcctaacaccatctcatcgtttctggcctcactgtggacaatccacacacattcttctttcctctcctggcggggcacagagccacccccttgccttttcttttcttgaaggttctagttcagctcctgattcatcagacccttctagccccctgcatctagcagtgaagcatgaagcctggtggggatgtggtactcccatctggtgtggccaccagctctgccaatgttcctgtagccttggaaaacttgctctctcggttcttttgggtgctgtgtactccccagcttccccccttccccccccattttgcacctgggtttagtgaaaggatggcatttggttgacccatatagaaacccagaatgaggtctcagggccaggaggcctggtatttgtaggccagggaaggggaagaggcaagtggtctggggtatcaccagccagccctctctgatttggcctctactccccataagtcacagtaccataagcaggcttctggcctcagcaatttggtctttgtgcccaagtttattgtgagaatttcctgaaaactctataaaaggtctcttcctactgtaggcctctaatgtttctcccctttttgcttcagtccactcttcagtcttgtaggcctagttttcaaacctgcacatgtgtcctacctggccacaggcatgcaggcctcaggcagctgggccagtttgggagcctcgggtgatgtctgcacgatctggggctgcctctgcacccctgctgtgggcttcagggttggagaagggctgggaccaaccgggtgagatccacaagtctctggatgtggctgaaggcaaatacacaattgaagtactttctgttttgaagtgctttcccttttgaatctggtttgaaacatgcagcttctgtctctagcccaaggaaagaccaaaacatagggaaataaaagcatttatctttgtcttggaagtaattgttgaagttgtgcagttgatcagtgcacagttagatgcaatgtttatagaaattgattgttaaaccaaatttacactggcatgtgtggtgtagtttctaaaaggcacttcacatttgaaatttttcttaccttagaaagtttctagtgatctaaatgtctagttttgtattcttttgtgtgtgttcactgtttctcagtattaccacttgaataattctctgtacaggggggtttgtgctatacactgggatgtctaattgcagcaataaagcctttctttaaaaagga

SEQ ID NO: 152864 - DNA, 114 bp, Homo sapiens
  Payload ID: 10066
  Gene Symbol: MARCH8
  Gene Name: membrane-associated ring finger (C3HC4) 8, E3 ubiquitin protein ligase
  ENST ID: ENST00000612386
  CDS Start-End: 1-114
gctgggagtcctccgtcagcatcagctccggctccggtgtcctccttctctcgcacttctatcacgccatccagccaggacatctgcaggatctgccactgtgaaggagatgat

SEQ ID NO: 152865 - DNA, 2982 bp, Homo sapiens
  Payload ID: 10067
  Gene Symbol: MARCH9
  Gene Name: membrane-associated ring finger (C3HC4) 9
  Uniprot ID: Q86YJ5
  ENST ID: ENST00000266643
  CDS Start-End: 432-1472
gaaggagccgccatttgccaccgccgagcgcacgggccgagccaagcctgatcccggagccggagggggactgggaccgagagaacggcgatggggggcggccccgccgcaggaggacccgggcgcgtaaccccgggggcccggcccgctccagacccagacccgcggggtgcggcaccctgagcccccctccccgccccctgccctggccatggccgcccaccccgccgcccccgggccgccagcccgctcggccccgcaagcaccggagccccggcggtggcagcagtgaacggctgtcgcaggccccgaagaccccggcccggctcggctctctagcgcgcgcccccttcccggccttgtcctctcccctccccccgccgctagcgagccccccttgcacgctgccccccgcccccggtgtccggacgatgctcaagtctcggctccgcatgtttctgaacgagctgaagctgctggtgctgacaggcggggggcggccccgggccgagccgcaaccccgggggggccggggaggcggctgcggctgggcgcccttcgctggctgctccacccgggacggcgacggcgacgaggaggagtactacgggtcggagccgcgggcccggggcctggccggcgacaaggagccgcgggccggacccctgccgccgcccgcgccgccgctgccgcccccgggcgcgctggacgccctgtcgctcagcagtagcctggacagcggactccgaacccctcagtgccggatctgcttccagggcccggagcagggggagctcttaagcccctgccgctgcgacggctcagtgcgctgcacgcatcagccctgcctcatccgctggatcagcgagaggggctcctggagctgtgagctctgctacttcaagtaccaggtcctggcgatcagcaccaagaacccactgcagtggcaggccatctccctgacggtcatcgagaaggtccagattgctgccatagttctgggctcgctcttcctggttgccagcatctcctggctcatctggtcctcactcagcccttcagccaagtggcaacgacaggatctgctctttcagatctgctacggcatgtatggcttcatggatgtcgtctgcataggcctcatcatccatgaaggctcctctgtctaccgcatcttcaagcgctggcaggcagtgaaccagcagtggaaggtcctaaattatgacaagaccaaggacataggaggagatgcagggggagggacggcagggaagtcaggccccaggaactcacggacgggccccacctctggggccacgagccgccccccagctgcccagcgcatgcggacgctcttgcctcagcgctgcggttatacaatcttgcacctccttgggcagctgcggccaccagatgcccgttccagctcccattctggccgagaggttgtcatgagggtcactacagtctgaactggactccaggagcagggatcttgagtcaatgcatcagtcagagaagaactctcatggctgctggaggtaccagctggacaaggtgtttggggcatgctgcccccgtcaccgaggatctgtgtgggtagcctcaagctggagacattgtctggcctcactgcccactgggtagagacacctggatgacatttcagtacccgctggcagctcctcccactcatccagagacggccggtgggcaggcggggagagcagctttccttccctggagagaaccgtctttacctcagctcctagggcctccagccccccagctccaccacggtgacttggtgaagggggaccaatgccagaagaaaggggctgtagacccctattccccaccccatggccacagggcatctggcaataagactagtatacattgacctcccgttccctgcatgagggcggggagttccccctgctccatcccccattgcatgggggaagggcataaagaatcatttatatgcacgtggagactcctttctcatctggggcttttctggagggttgggagatgtggggaggtttctctgcacaggttgcaaatcccaaatgcagcagtgggttctgagttgtaggtgtgactcccacttgctggtgaataattcatgttggctgctaggtggcagcactccgaggtatctaaagggtagacctggacctgccacctatgagttgtgtgatatagaaaaaaatctcttagctctggttttcctgtctacttcatagggttggaataaggataaatgagggacaggttggatgccgttgcagagaaaatcagcaatgacataaagagatttctagaatagttgatggtccatttatttcaaatagtagctggtgtaacaaattctaaaatgtgtttttcatctggagttgcacagaatcatggaattttgtgttgagtgacataataggtatggaaatatgaggggaaatagacattgcaaatgtgaagcatggtggttatttgttaagaatgagaactcctctgactctaaatatttgggcctgtgggctggggaaggctggagccatctgccttgttctggagatcatctgggttctatcagtccttctcaagtactgtgctcacccagaaaagcagtgtgaagtgaatttggactcatttggagtgagatggagggaatccccccactcagtgttatgagtctccaaccccagtttaagctatttccatggcagtttagggtcacaggtttgatcccggtgtgcccagccagtggtattaatggatggcattatgtttggaggcagcagcatagaggactgttgtttatagagaaaagatttgggaaggactgtttacaatgtgggtcagcctgaagcctgggcactttcttctgtgaccttggggttgtgtattatatgaatgatgctgtttttaagtaaaccattcaacagcaattaaataattccttcattcacggctaaa

SEQ ID NO: 152866 - DNA, 1668 bp, Homo sapiens
  Payload ID: 10067
  Gene Symbol: MARCH9
  Gene Name: membrane-associated ring finger (C3HC4) 9
  Uniprot ID: Q86YJ5
  ENST ID: ENST00000548358
  CDS Start-End: 448-1149
actaagaatacaaaaattagccaggcgtggtggctcgtgcctgtaagctactcgcgaagctgaggcgggagaatccttgaacccgggaggcagaggttgcagtgagccgagatcacagccactgcactccagcctgggcaacagagcaagactccgtctcgaaggaaaaaaaaaaaaaagaaaagaaaaaatgatgttgatgatgatagcaaatatgtagtgttttctgtgtcaagttttggtgtgtattaactcttaatcttcacaataatcttattagatactattattatccccttttacaaacgaggacactgatgcacaaagatttgaaaacttacccaaggttacttagccagtaagtgatggagtcaagatttaggattcaaatctagatgttttggtttcagagcacttgcccaatcctgcctttctaaagtaagacaaatggtgtcagacaagtgccacattctagatttaatcaaggcacagagaagacagatgttgatcctgcctgaaggttttagggaaggttcctggagcaccctgctcttcagggccacccatcacctggccctccatccctttctgggactctttggagccctttctcccacacagtggcaggccatctccctgacggtcatcgagaaggtccagattgctgccatagttctgggctcgctcttcctggttgccagcatctcctggctcatctggtcctcactcagcccttcagccaagtggcaacgacaggatctgctctttcagatctgctacggcatgtatggcttcatggatgtcgtctgcataggcctcatcatccatgaaggctcctctgtctaccgcatcttcaagcgctggcaggcagtgaaccagcagtggaaggtcctaaattatgacaagaccaaggacataggaggagatgcagggggagggacggcagggaagtcaggccccaggaactcacggacgggccccacctctggggccacgagccgccccccagctgcccagcgcatgcggacgctcttgcctcagcgctgcggttatacaatcttgcacctccttgggcagctgcggccaccagatgcccgttccagctcccattctggccgagaggttgtcatgagggtcactacagtctgaactggactccaggagcagggatcttgagtcaatgcatcagtcagagaagaactctcatggctgctggaggtaccagctggacaaggtgtttggggcatgctgcccccgtcaccgaggatctgtgtgggtagcctcaagctggagacattgtctggcctcactgcccactgggtagagacacctggatgacatttcagtacccgctggcagctcctcccactcatccagagacggccggtgggcaggcggggagagcagctttccttccctggagagaaccgtctttacctcagctcctagggcctccagccccccagctccaccacggtgacttggtgaagggggaccaatgccagaagaaaggggctgtagacccctattccccaccccatggccacagggcatctggcaataagactagtatacattgacctcccgttccctgcatgagggcggggagttccccctgctccatcccccattgcatgggggaagggcataaagaatcatttatatgca

SEQ ID NO: 152867 - DNA, 4338 bp, Homo sapiens
  Payload ID: 10068
  Gene Symbol: MBTPS1
  Gene Name: membrane-bound transcription factor peptidase, site 1
  Uniprot ID: Q14703
  ENST ID: ENST00000343411
  CDS Start-End: 497-3655
cagggcacgctgggtcggcggagctgaggctcccagctgtgggcctcgctggcccggtcgcccagtctcgcgagagttgggagtaaacagccccgaatggagtgcccaggcgtgttcgccgcggaggcgccgttatcccgggcccgccggccctgagctcccggcggcgcagattggctcacagtggttgattgatcaaccccattggacgttggttctgtggtacaaatggagtacaggactcagtcgtcacggcctgagtgagagaagccttatttccaagatggagaagaagcggagaaagaaatgaaagcctctcttcaggctgaaccacaaaaggccatgggatttaacttttatttatgttgggcaagactgtaagatggctgattagtaatgttgcagcttttagctgaaacaaaaattcacttttaatcaagaagaaaaaagtgtgatttgaatatatgcaattttatgatcatattcgcttgtgaccatgaagcttgtcaacatctggctgcttctgctcgtggttttgctctgtgggaagaaacatctgggcgacagactggaaaagaaatcttttgaaaaggccccatgccctggctgttcccacctgactttgaaggtggaattctcatcaacagttgtggaatatgaatatattgtggctttcaatggatactttacagccaaagctagaaattcatttatttcaagtgccctgaagagcagtgaagtagacaattggagaattatacctcgaaacaatccatccagtgactaccctagtgattttgaggtgattcagataaaagaaaaacagaaagcggggctgctaacacttgaagatcatccaaacatcaaacgggtcacgccccaacgaaaagtctttcgttccctcaagtatgctgaatctgaccccacagtaccctgcaatgaaacccggtggagccagaagtggcaatcatcacgtcccctgcgaagagccagcctctccctgggctctggcttctggcatgctacgggaaggcattcgagcagacggctgctgagagccatcccgcgccaggttgcccagacactgcaggcagatgtgctctggcagatgggatatacaggtgctaatgtaagagttgctgtttttgacactgggctgagcgagaagcatccccacttcaaaaatgtgaaggagagaaccaactggaccaacgagcgaacgctggacgatgggttgggccatggcacattcgtggcaggtgtgatagccagcatgagggagtgccaaggatttgctccagatgcagaacttcacattttcagggtctttaccaataatcaggtatcttacacatcttggtttttggacgccttcaactatgccattttaaagaagatcgacgtgttaaacctcagcatcggcggcccggacttcatggatcatccgtttgttgacaaggtgtgggaattaacagctaacaatgtaatcatggtttctgctattggcaatgacggacctctttatggcactctgaataaccctgctgatcaaatggatgtgattggagtaggcggcattgactttgaagataacatcgcccgcttttcttcaaggggaatgactacctgggagctaccaggaggctacggtcgcatgaaacctgacattgtcacctatggtgctggcgtgcggggttctggcgtgaaaggggggtgccgggccctctcagggaccagtgttgcttctccagtggttgcaggtgctgtcaccttgttagtgagcacagtccagaagcgtgagctggtgaatcccgccagtatgaagcaggccctgatcgcgtcagcccggaggctccccggggtcaacatgtttgagcaaggccacggcaagctcgatctgctcagagcctatcagatcctcaacagctacaagccacaggcaagtttgagccccagctacatagatctgactgagtgtccctacatgtggccctactgctcccagcccatctactatggaggaatgccgacagttgttaatgtcaccatcctcaacggcatgggagtcacaggaagaattgtagataagcctgactggcagccctatttgccacagaacggagacaacattgaagttgccttctcctactcctcggtcttatggccttggtcgggctacctggccatctccatttctgtgaccaagaaagcggcttcctgggaaggcattgctcagggccatgtcatgatcactgtggcttccccagcagagacagagtcaaaaaatggtgcagaacagacttcaacagtaaagctccccattaaggtgaagataattcctactcccccgcgaagcaagagagttctctgggatcagtaccacaacctccgctatccacctggctatttccccagggataatttaaggatgaagaatgaccctttagactggaatggtgatcacatccacaccaatttcagggatatgtaccagcatctgagaagcatgggctactttgtagaggtcctcggggcccccttcacgtgttttgatgccagtcagtatggcactttgctgatggtggacagtgaggaggagtacttccctgaagagatcgccaagctccggagggacgtggacaacggcctctcgctcgtcatcttcagtgactggtacaacacttctgttatgagaaaagtgaagttttatgatgaaaacacaaggcagtggtggatgccggataccggaggagctaacatcccagctctgaatgagctgctgtctgtgtggaacatggggttcagcgatggcctgtatgaaggggagttcaccctggccaaccatgacatgtattatgcgtcagggtgcagcatcgcgaagtttccagaagatggcgtcgtgataacacagactttcaaggaccaaggattggaggttttaaagcaggaaacagcagttgttgaaaacgtccccattttgggactttatcagattccagctgagggtggaggccggattgtactgtatggggactccaattgcttggatgacagtcaccgacagaaggactgcttttggcttctggatgccctcctccagtacacatcgtatggggtgacaccgcctagcctcagtcactctgggaaccgccagcgccctcccagtggagcaggctcagtcactccagagaggatggaaggaaaccatcttcatcggtactccaaggttctggaggcccatttgggagacccaaaacctcggcctctaccagcctgtccacgcttgtcttgggccaagccacagcctttaaacgagacggcgcccagtaacctttggaaacatcagaagctactctccattgacctggacaaggtggtgttacccaactttcgatcgaatcgccctcaagtgaggcccttgtcccctggagagagcggcgcctgggacattcctggagggatcatgcctggccgctacaaccaggaggtgggccagaccattcctgtctttgccttcctgggagccatggtggtcctggccttctttgtggtacaaatcaacaaggccaagagcaggccgaagcggaggaagcccagggtgaagcgcccgcagctcatgcagcaggttcacccgccaaagaccccttcggtgtgaccggcagcctggctgaccgtgagggccagagagagccttcacggacggcgctggtgggtgagccgagctgtggtggcggctggtttaaaagggatccagtttccagctgcaggtttgttagagtctgttctacatgggcctgccctcctgtgatgggcagaggctcctggtacatcgagaagattcctgtggatcccgtcaggagggacttagtggctctgccgccagtgagacttcccgccggcagctgtgcgcaccaaagactcgggagaactggaaaggctgtctggggtcttctgactgcaggggaaggatgtactttccaaacaaatgatacaaccctgaccaagctaaaagacgcttgttaaaggctattttctatatttattgttgggaaaagtcactttaaagacttgtgctatttggaagcaaagctattttttttgtcagtggaatgcagtttttttactattccatcatgaggaacaacatagattccatgatctttttaatgacagtacagactgagatttgaaggaaacatgcacaaatctgtaaaacatagaccttcgctttatttttgtaagtatcacctgccaccatgttttgtaatttgaggtcttgatttcaccattgtcggtgaagaaaattttcaataaatatgtattacccgtctgaagctt

SEQ ID NO: 152868 - DNA, 587 bp, Homo sapiens
  Payload ID: 10068
  Gene Symbol: MBTPS1
  Gene Name: membrane-bound transcription factor peptidase, site 1
  ENST ID: ENST00000569907
  CDS Start-End: 539-587
gagagttgggagtaaacagccccgaatggagtgcccaggcgtgttcgccgcggaggcgccgttatcccgggcccgccggccctgagctcccggcggcgcaggggagattttaggaaagcaggcgacctgcctctgaagagtgtggcctctggagccaggctgaccacctgagttctcagcccagctgttctacttgctggtgttgtggccccagattggctcacagtggttgattgatcaaccccattggacgttggttctgtggtacaaatggagtacaggactcagtcgtcacggcctgagtgagagaagccttatttccaagatggagaagaagcggagaaagaaatgaaagcctctcttcaggctgaaccacaaaaggccatgggatttaacttttatttatgttgggcaagactgtaagatggctgattagtaatgttgcagcttttagctgaaacaaaaattcacttttaatcaagaagaaaaaagtgtgatttgaatatatgcaattttatgatcatattcgcttgtgaccatgaagcttgtcaacatctggctgcttctgctcgtggttttgctctgtg

SEQ ID NO: 152869 - DNA, 546 bp, Homo sapiens
  Payload ID: 10068
  Gene Symbol: MBTPS1
  Gene Name: membrane-bound transcription factor peptidase, site 1
  ENST ID: ENST00000563231
  CDS Start-End: 1-244
gttaaacctcagcatcggcggcccggacttcatggatcatccgtttgttgacaaggtgtgggaattaacagctaacaatgtaatcatggtttctgctattggcaatgacggacctctttatggcactctgaataaccctgctgatcaaatggatgtgattggagtaggcggcattgactttgaagataacatcgcccgcttttcttcaaggggaatgactacctggcacagtccagaagcgtgagctggtgaatcccgccagtatgaagcaggccctgatcgcgtcagcccggaggctccccggggtcaacatgtttgagcaaggccacggcaagctcgatctgctcagagcctatcagatcctcaacagctacaagccacaggcaagtttgagccccagctacatagatctgactgagtgtccctacatgtggccctactgctcccagcccatctactatggaggaatgccgacagttgttaatgtcaccatcctcaacggcatgggagtcacaggaagaattgtagataagcctgactggcagc

SEQ ID NO: 152870 - DNA, 582 bp, Homo sapiens
  Payload ID: 10068
  Gene Symbol: MBTPS1
  Gene Name: membrane-bound transcription factor peptidase, site 1
  ENST ID: ENST00000570012
  CDS Start-End: 145-582
gtgttcgccgcggaggcgccgttatcccgggcccgccggccctgagctcccggcggcgcagattggctcacagtggttgattgatcaaccccattggacgttgggttgggccatggcacattcgtggcaggtgtgatagccagcatgagggagtgccaaggatttgctccagatgcagaacttcacattttcagggtctttaccaataatcaggtatcttacacatcttggtttttggacgccttcaactatgccattttaaagaagatcgacgtgttaaacctcagcatcggcggcccggacttcatggatcatccgtttgttgacaaggtgtgggaattaacagctaacaatgtaatcatggtttctgctattggcaatgacggacctctttatggcactctgaataaccctgctgatcaaatggatgtgattggagtaggcggcattgactttgaagataacatcgcccgcttttcttcaaggggaatgactacctgggagctaccaggaggctacggtcgcatgaaacctgacattgtcacctatggtgctggcgtgcggggttctggcgtgaaaggg

SEQ ID NO: 152871 - DNA, 431 bp, Homo sapiens
  Payload ID: 10068
  Gene Symbol: MBTPS1
  Gene Name: membrane-bound transcription factor peptidase, site 1
  ENST ID: ENST00000562788
  CDS Start-End: 1-405
gttgcttctccagtggttgcaggtgctgtcaccttgttagtgagcacagtccagaagcgtgagctggtgaatcccgccagtatgaagcaggccctgatcgcgtcagcccggaggctccccggggtcaacatgtttgagcaaggccacggcaagctcgatctgctcagagcctatcagatcctcaacagctacaagccacaggcaaggtcagtgcaccgccctgccgatgggtctttctctccttcactgggctctgggcgaattttccctctgcacaaaatacaagcctcaaaacagaaaatgatgactaagcacagaattctcggggtgcttggagaggttttgctgctgcttctacagggtgctgctggcagaactggtagctgctttcgcttactgatgtgatctttaatataaatggttaaaagtaa

SEQ ID NO: 152872 - DNA, 4457 bp, Homo sapiens
  Payload ID: 10069
  Gene Symbol: MBTPS2
  Gene Name: membrane-bound transcription factor peptidase, site 2
  ENST ID: ENST00000365779
  CDS Start-End: 82-1074
aaggcgcgcgcggtcagctgttggcggtgcagggaggaggacgccggggctcgccttccctcctctgccgccgctgccgccatgattccggtgtcgctggtggtggtggtggtgggtggctggactgtcgtctacctgaccgacttggtgctgaagtcatctgtctattttaaacattcttatgaagactggctggaaaacaacggactgagcatctcccctttccacataagatggcaaactgctgttttcaatcgtgccttttacagttggggacggcggaaagcaaggatgctttaccaatggttcaattttggaatggtgtttggcgtaattgccatgtttagctcattttttctccttggaaaaacgctgatgcagactttggcacaaatgatggctgactctccctcttcttattcttcctcctcttcttcctcttcctcctcttcttcctcttcctcttcttcatcttcttcctcttcctcgcttcacaatgaacaggtgttacaagttgtggttcctggtataaatttacccgtcaatcaactgacctatttcttcacggcagttctcattagtggtgttgtacatgaaattggacatgggatagcagctattagggaacaagttcgatttaatggctttgggatttttctcttcattatttatcctggagcatttgttgatctgttcaccactcatttgcaacttatatcgccagtccagcagctaaggatattttgtgcaggtatctggcataattttgtccttgcactcttgggtattttagctcttgttctcctcccagtaattctcttgccattttactacactggagttggggtgctcatcactgaagttgctgaggactctcctgccattggacccagaggcctttttgtgggagaccttgtcacccatctacaggattgtcctgttactaatgtgcaagattggaatgaatgtttagataccatcgcctatgagccccaaattggttactgtataagtgcatcaactttacagcagttaagtttcccagttagaggtgtgtatatttcctcaatataatataatgcttcaagcaccagtacctgccattcactaatccttaaaccatgtctatacatttattctgttctaatctgtttaaagcaaatcagtaaagtaaatagattccaaccaatagacatttttcttggtaagttggatgctaatatgtgtttcctttattatatattgttgaacttctaactattttcattatatcatatttaacttttaggactctaatattttctgctttcaaaacacttgtattaaatcatagccgggcgcagtggctcacgcctgtaatcccagcactttgggaggctgaggcgggcggatcacttgaggtcaggagttcatgaccaacctggccaacatagtgaaaccccatctctactaaaaatacaaaaattagcagggcatggtgacgggtgcctgtgatttcagctgctcgggagtctgaggcaggagaatcgcttgaacccgggaggtggaggttgcaatgagccgagatcgggacatggaaagagactctgtctcaaaaaaaaaaaaaaaaatcagcattcaaggtcaatcataaccaattaactaattccaataatcaaataccccaatataatattatctttatgcatgtctgtagatatattatagtactttaaacttttataattgaaaaagggaatataagtaataagaaccggttctactttgcataagcttatgtcagaacagataaacaacgatagttaacaactaaatatataaaaatcaaagcataaacattctgtattaatatattgttagcccaacacagacatgcaataaggaaagattacaagaaataagaaggaacttggcaaacaaaaaaccccatctgggatttagaaaaaattcccttacttcttaaaaattcccttaatacttaaacagttctagtggaatcagtgttggcatgtctgattctatctggggtagagttattttatgtattttatgtggcagccatcctaaagaagttgtcttggcttccaaaaataccatgtgaagtcagatatgttgctctgtgcagcagatgacagagctgaggcaagtttcttctcggatcctgccaaacttatttagagttatttcagctctgaaaaatcagcttcccaattctttatacaaaatcagcttcccaattctttatacaaaattggaggtgttagaaaatagaaattatgctcacagactatatctttaagtaaaaaaatatcctgatacttgtccacatctattggtgtagggaaatatgattaataatcaagaatagttttagtaaagtactgtgtgcaacacaggcaaagtagtaagaactgatttttttaaaaaaactttttaaaatttactcatttgtaagaatttttttattatcaaaaatgtttagacacgatggagaatatatttcctcaatataatataatgcttcaagcaccagtacctgccattcactaatccttagaccatgtctatagatttattctgttctaatctgtttaaagtaaatcagtaaagtaaatagattcaaaccaatagacatttttcttggtaagttggatgctaatatgtgtgtttcctttattatatattgttgaacttctaactattttcataatatcatatttaacttttaggactctaatattttctagtataaacgagcccacatgtatctttctgccagcttcggcagttattaacattttgccaattttttcatctaagcagtccacttttaggggaagtattttaaagtacatcccaggcatcctatcatttcatccataacctttcagcctgcctttaacggatgatgactcattaaacacgaccacaatactgttataattcctaacaaaataacactaatttctgatatctggttggtattcagttgtttctaattcttttcattatagttgatttaaattagttaggatgtcttctaagactttttaaatttgtaacaattttccttgacctgtttttgaaatgttatttttttgttgaagaaactgaggcatttgttttgttgaatttcctaaattctgggtttttctggttatatcttatcctcatgatgtcattaacttgttcagatgtcttccaattttctataaactgctaattaggtccatggcgttgattagattcagaatcctttttttttgtttgggttttttttttggcaaaaacacttcataaacagcgcttggtacttcctgtggcatcatattgcatccagtatctattgttctctgttttaatggtgttaagattgttcagtggagcaatctgattctttaaggttgaaatatttataaattttccccattctcaggagcctcttaccatcttccaaaacttttaagatgacagaagattaatatgtaatccacaatgtgttcttctttaaagaaatgatccattattttccacttcttaagtcctttatccttttcttttggtttctctaaatttgatgtaatgtgtattgaattacaaaaaccaaagtgacacactagttaaataaagttctcttcagtaggattgttttacttaggatatctgcattttcagatgtttagggttttatccttttcctgacagacagactgtaaataaaaattttccctgaaacactcagaaactctcttcttattaactgtttgagtatttcactgttgtggatcatgtgctacattttggaggtatttgtttaaatacctaaagcagatattactctttttatactacaatcaatccagaagtaattcttttttttttttttcaagccctgggctgtcccagcccaagagtaattcttcaatatctattttgtctcagtatacatgtttattttacatgattactatatctgataaatctgtgcctctatttaagcttttgaaaatggagtatgtatacttagccagtttaaaggagtattaatgtctgtaaatatcacttaaaatacatactatggctggtccaaatgcagttgtgcttacaattaattgaacacaaccagttacagaattctttgttccttctctattcccactacatcacttgactagccttaaaaaaaaaatacatactagattaattttgatggcaggcttagcccctgggtctgtggacatttaagaaagctatggattgatggtattttatatgtttctaggtaacttcgttatccttcattgtaagtaggagtgaaagatatggtcagatatactattacagagtgtccaatgatccaaaagttattcatgttcaatttagagtagaattcagtacacataactaaattctaggaatttataccatttcagagcaataaagccacctaggaaaga

SEQ ID NO: 152873 - DNA, 4428 bp, Homo sapiens
  Payload ID: 10069
  Gene Symbol: MBTPS2
  Gene Name: membrane-bound transcription factor peptidase, site 2
  Uniprot ID: O43462
  ENST ID: ENST00000379484
  CDS Start-End: 100-1659
agcggatgctggggctgtaaggcgcgcgcggtcagctgttggcggtgcagggaggaggacgccggggctcgccttccctcctctgccgccgctgccgccatgattccggtgtcgctggtggtggtggtggtgggtggctggactgtcgtctacctgaccgacttggtgctgaagtcatctgtctattttaaacattcttatgaagactggctggaaaacaacggactgagcatctcccctttccacataagatggcaaactgctgttttcaatcgtgccttttacagttggggacggcggaaagcaaggatgctttaccaatggttcaattttggaatggtgtttggcgtaattgccatgtttagctcattttttctccttggaaaaacgctgatgcagactttggcacaaatgatggctgactctccctcttcttattcttcctcctcttcttcctcttcctcctcttcttcctcttcctcttcttcatcttcttcctcttcctcgcttcacaatgaacaggtgttacaagttgtggttcctggtataaatttacccgtcaatcaactgacctatttcttcacggcagttctcattagtggtgttgtacatgaaattggacatgggatagcagctattagggaacaagttcgatttaatggctttgggatttttctcttcattatttatcctggagcatttgttgatctgttcaccactcatttgcaacttatatcgccagtccagcagctaaggatattttgtgcaggtatctggcataattttgtccttgcactcttgggtattttagctcttgttctcctcccagtaattctcttgccattttactacactggagttggggtgctcatcactgaagttgctgaggactctcctgccattggacccagaggcctttttgtgggagaccttgtcacccatctacaggattgtcctgttactaatgtgcaagattggaatgaatgtttagataccatcgcctatgagccccaaattggttactgtataagtgcatcaactttacagcagttaagtttcccagttagagcatacaaacgactagatggttcaactgaatgctgtaacaatcacagcctcacagatgtgtgcttttcctacagaaataattttaataagcgtttgcatacatgtcttcctgcccggaaagcagttgaagcaactcaagtttgcagaaccaataaagactgtaaaaaaagctcaagttcaagtttctgtataataccttctttggaaactcacactcgcttaataaaagtaaaacacccacctcagattgatatgttatacgtaggacatcctctgcatcttcactacacagtgagcatcaccagttttatcccacgttttaactttctaagcatagatctgccagtggttgtggagacatttgtcaagtacctgatttccctctcaggagctctggctattgttaatgcagtaccctgctttgctttggatggacaatggattctaaactctttcttggatgccacccttacctcagtgattggagacaatgatgtcaaagatctaatagggtttttcatcttgctgggtggcagtgtacttttggctgccaatgtgaccctgggactctggatggttacagcacggtaatgtttgcactcatctgacagaatccctgagttacagtatacagctatgtggtaatattcattgccattgaaattcttacttggtatgaaatataaagtgtttccttaaaattacatcttagccaacaaccctgagctcctcccatatccagagtacccaaactctgtggtagaagataagcagaagaaatgaaaggcatagtccctgactatattctaatttaggactgaatgtacccagatgcttgtggaataatatctaagcaagtgcaaattcatgtaataccgttttgtctgattacatattgtgttgaaatagtataaaggagaacagaactgggtggaattaattgggaaaaacttcttacaaaagcatcattaatcaaaatttgaaggagaccagactttggccaagtggaaggatgaccattgtcttggcctgtatctcttgtcctttgtcttgtttgaaaagtattttaaaacttaatggtgtattattttgtgctctgaaagctgaggtctgattacaattagtaaaattctatagaagaatctgctgacgtgaaagggaaaaatctttgtcaaatgataccaaataaatgaacaaaacaggaagtagggcctatgatatcgtgagacatgttttgccccacaagagttgcatcttttataaggtgtctctgccccctcataaagcagcactagctttgacatccacggtgagctgcaggaagcatcacacaccagcagcatgtgagcagagggaggcagttggggttgaacttcggaactaggccgggtctcctgacagatcacaagacaccccagaggatcttcagcagtcctacttcccattctctatagagctttgaagcttggaacccttccagggtaaacattttctcttgtgctgctcaggacatctggggcctagctcctgggttcctgtctccaagaagcaatgaccttaaactctgagccatactctgtcctcaccagcggctcccatgtttttctgtgtcaggttattaagtacctagtccttgttttctgtctctctcctaagctacctctctgggtccacagaagacttggtagtatagtgagaatggctatacgtgagtacaaacgtggattttccagggcttgggaactgattcttgagcccagaagagccacgcctgctttgaggtcttttggagtggagatgcagccctgggaaatttggggagtcagcaggccagtgtgaagctattggtcctaggagtatatgagcttgctgtttctttgatggaaaatacatgcttctcttgtatactcagaagtgactaagggcaataactcattaatagccatctatccaacttctttactgagtgatgtattccatggggttacctttttcagattattgagttgctctgtaagcactaaaactttttaatcatttttaagaaactttttagattgtattacaaatttgccttaacagtaattagatgttgaatataattttaacattttattaatgacttgggtcatcagttaataccagtactaaaaccatacgaattattggtttattccagaaaatacagtatttgttctatttttaggtagacaatcatttgggatcagagtacattagcatagtaatgctcagtcagacctgttcaagtagtagagcttggagaatgccatgaaatacttatataattaatttgattgcatgaactaagcaattttactaatgaaaaggttgtatatgtgcaagtcacttttttaaaaaccaagaaaaaactttaatagaggaaatcttattcattaatttatttttctgagtaaaaaaacgaaacccaaatctcattttatttcaactgttaaacattttgatctgttgacccataggatcaggatttgggaaccactttactaggaaagagcagatcagtaccatttgtataaaaccggcctcattatgtaagaaagaaaatgttacgtgttttcttctttagcttggttgtgggcacttctacagcaaggaccatatcatattcatctttgcatccctggcacagtgcatgagacataagtacttaataaatgcagttgaatggataatgattagtgttatttatggattagaaaaagcatgtttctatttaagtaagctgtaaaaagtattattgaatatttactgtaaatatatgttcacataaaaaaataacttggagggtctttgtgtccctggcatattatcatcttcatggaaagaatccactgtggtttctgtagagtgattggaaaaatggattattttgaggattgaagaaagtgttctttctgcgttgtcactttgttcaacagtaaaactttattctcagtgttcctactctgcattgtttacatttttgacagttttttttaatcacctacaatctgtaaagaatgtatatattcttttcagcatctcagtttgaaaagacatgcagttaaacttgaccttttgataatcgctcttacaggtcattgtctgttctaacagcaaattgtaaacatgtgcttcatagatattgtggctctcagtcatcactttgtcctatggtatttattgaatgttcacatactaatggtgcacaggtgtttttttctataaatcttctgactgtcctgtaattcattcttaagctttaacttgaaggtatcgtaattgccggcatttgatgtttagcaataaaagaataaatgtgtaccagcattttatgtttat

SEQ ID NO: 152874 - DNA, 3331 bp, Homo sapiens
  Payload ID: 10070
  Gene Symbol: MS4A1
  Gene Name: membrane-spanning 4-domains, subfamily A, member 1
  Uniprot ID: P11836
  ENST ID: ENST00000345732
  CDS Start-End: 154-1047
gtctatcagcgatttcatcttcaggcctggactacaccactcaccctcccagtgtgcttgagaaacaaactgcacccactgaactccgcagctagcatccaaatcagcccttgagatttgaggccttggagactcaggagttttgagagcaaaatgacaacacccagaaattcagtaaatgggactttcccggcagagccaatgaaaggccctattgctatgcaatctggtccaaaaccactcttcaggaggatgtcttcactggtgggccccacgcaaagcttcttcatgagggaatctaagactttgggggctgtccagattatgaatgggctcttccacattgccctggggggtcttctgatgatcccagcagggatctatgcacccatctgtgtgactgtgtggtaccctctctggggaggcattatgtatattatttccggatcactcctggcagcaacggagaaaaactccaggaagtgtttggtcaaaggaaaaatgataatgaattcattgagcctctttgctgccatttctggaatgattctttcaatcatggacatacttaatattaaaatttcccattttttaaaaatggagagtctgaattttattagagctcacacaccatatattaacatatacaactgtgaaccagctaatccctctgagaaaaactccccatctacccaatactgttacagcatacaatctctgttcttgggcattttgtcagtgatgctgatctttgccttcttccaggaacttgtaatagctggcatcgttgagaatgaatggaaaagaacgtgctccagacccaaatctaacatagttctcctgtcagcagaagaaaaaaaagaacagactattgaaataaaagaagaagtggttgggctaactgaaacatcttcccaaccaaagaatgaagaagacattgaaattattccaatccaagaagaggaagaagaagaaacagagacgaactttccagaacctccccaagatcaggaatcctcaccaatagaaaatgacagctctccttaagtgatttcttctgttttctgtttccttttttaaacattagtgttcatagcttccaagagacatgctgactttcatttcttgaggtactctgcacatacgcaccacatctctatctggcctttgcatggagtgaccatagctccttctctcttacattgaatgtagagaatgtagccattgtagcagcttgtgttgtcacgcttcttcttttgagcaactttcttacactgaagaaaggcagaatgagtgcttcagaatgtgatttcctactaacctgttccttggataggctttttagtatagtatttttttttgtcattttctccatcaacaaccagggagactgcacctgatggaaaagatatatgactgcttcatgacattcctaaactatcttttttttattccacatctacgtttttggtggagtcccttttgcatcattgttttaaggatgataaaaaaaaataacaactagggacaatacagaacccattccatttatctttctacagggctgacattgtggcacattcttagagttaccacaccccatgagggaagctctaaatagccaacacccatctgttttttgtaaaaacagcatagcttatacatggacatgtctctgccttaacttttcctaactcccactctaggctattgtttgcatgtctacctacttttagccattatgcgagaaaagaaaaaaatgaccatagaaaatgccaccatgaggtgcccaaatttcaaataataattaacatttagttatatttataatttccagatgacaaagtatttcatcaaataacttcatttgatgttccatgatcaagaaagaatccctatctctattttacaagtaattcaaagaggccaaataacttgtaaacaagaaaaggtaacttgtcaacagtcataactagtaattatgagagccttgtttcataaccaggtcttcttactcaaatcctgtgatgtttgaaataaccaaattgtctctccaatgtctgcataaactgtgagagccaagtcaacagcttttatcaagaatttactctctgaccagcaataaacaagcactgagagacacagagagccagattcagattttacccatggggataaaaagactcagactttcaccacatttggaaaactacttgcatcataaatatataataactggtagtttatatgaagcagacactaagtgctatagacactctcagaatatcatacttggaaacaatgtaattaaaatgccgaatctgagtcaacagctgccctacttttcaattcagatatactagtaccttacctagaaataatgttaacctagggtgaagtcactataatctgtagtctattatttgggcatttgctacatgatgagtgctgccagattgtggcaggtaaagagacaatgtaatttgcactccctatgatatttctacatttttagcgaccactagtggaagacattccccaaaattagaaaaaaaggagatagaagatttctgtctatgtaaagttctcaaaatttgttctaaattaataaaactatctttgtgttcttttctgcaacagatgattccaacatgggtgtttgtctattcttctttactcttgaaacattagaccatgggaggctcttacagccttgagttgatatttatacaacccaaatctaggtttgaacggtgaggtgtcaggtcatcaaatattcatgtctatatagtcttacacaggttctcaaaaaaaatgttcatgggataggtcattgataatggattccttattctgagaactccagacgactgaaatatatgagagaaggaaaaggacatagtaggagcaggcctgagaaaaaaatgaaagtcagaaatctttaaaaaaatacaagatcttatttctatcttattttttctcctcttctgaaatatatatgaggattcctctccaaacccatggtttctctaagaattttgagtcatttgtatgacctcaaataattagttttagctgacctcacataactccttataataggagacatctttaatgtctgctattaaagaaggatgaaaattcctatgaccttctccccgattatccctttggcaatatagagtcaaataataacattgaccaatagtaaacatgctttgccaagaagtagaagatatattctctagccttagtttttcctcccaatttgcatttttgtaaaaataatgttgtatccacaaaggaaataaactttaaaaacccaagtgca

SEQ ID NO: 152875 - DNA, 3372 bp, Homo sapiens
  Payload ID: 10070
  Gene Symbol: MS4A1
  Gene Name: membrane-spanning 4-domains, subfamily A, member 1
  Uniprot ID: P11836
  ENST ID: ENST00000389939
  CDS Start-End: 195-1088
tcagaactcagcagtaggccttgcctcagatccaaggtcactcggaagaggccatgtctaccctcaatgacactcatggaggaaatgctgagagaagcattcagatgcatgacacaaggtaagactgccaaaaatcttgttcttgctctcctcattttgttatttgttttatttttaggagttttgagagcaaaatgacaacacccagaaattcagtaaatgggactttcccggcagagccaatgaaaggccctattgctatgcaatctggtccaaaaccactcttcaggaggatgtcttcactggtgggccccacgcaaagcttcttcatgagggaatctaagactttgggggctgtccagattatgaatgggctcttccacattgccctggggggtcttctgatgatcccagcagggatctatgcacccatctgtgtgactgtgtggtaccctctctggggaggcattatgtatattatttccggatcactcctggcagcaacggagaaaaactccaggaagtgtttggtcaaaggaaaaatgataatgaattcattgagcctctttgctgccatttctggaatgattctttcaatcatggacatacttaatattaaaatttcccattttttaaaaatggagagtctgaattttattagagctcacacaccatatattaacatatacaactgtgaaccagctaatccctctgagaaaaactccccatctacccaatactgttacagcatacaatctctgttcttgggcattttgtcagtgatgctgatctttgccttcttccaggaacttgtaatagctggcatcgttgagaatgaatggaaaagaacgtgctccagacccaaatctaacatagttctcctgtcagcagaagaaaaaaaagaacagactattgaaataaaagaagaagtggttgggctaactgaaacatcttcccaaccaaagaatgaagaagacattgaaattattccaatccaagaagaggaagaagaagaaacagagacgaactttccagaacctccccaagatcaggaatcctcaccaatagaaaatgacagctctccttaagtgatttcttctgttttctgtttccttttttaaacattagtgttcatagcttccaagagacatgctgactttcatttcttgaggtactctgcacatacgcaccacatctctatctggcctttgcatggagtgaccatagctccttctctcttacattgaatgtagagaatgtagccattgtagcagcttgtgttgtcacgcttcttcttttgagcaactttcttacactgaagaaaggcagaatgagtgcttcagaatgtgatttcctactaacctgttccttggataggctttttagtatagtatttttttttgtcattttctccatcaacaaccagggagactgcacctgatggaaaagatatatgactgcttcatgacattcctaaactatcttttttttattccacatctacgtttttggtggagtcccttttgcatcattgttttaaggatgataaaaaaaaataacaactagggacaatacagaacccattccatttatctttctacagggctgacattgtggcacattcttagagttaccacaccccatgagggaagctctaaatagccaacacccatctgttttttgtaaaaacagcatagcttatacatggacatgtctctgccttaacttttcctaactcccactctaggctattgtttgcatgtctacctacttttagccattatgcgagaaaagaaaaaaatgaccatagaaaatgccaccatgaggtgcccaaatttcaaataataattaacatttagttatatttataatttccagatgacaaagtatttcatcaaataacttcatttgatgttccatgatcaagaaagaatccctatctctattttacaagtaattcaaagaggccaaataacttgtaaacaagaaaaggtaacttgtcaacagtcataactagtaattatgagagccttgtttcataaccaggtcttcttactcaaatcctgtgatgtttgaaataaccaaattgtctctccaatgtctgcataaactgtgagagccaagtcaacagcttttatcaagaatttactctctgaccagcaataaacaagcactgagagacacagagagccagattcagattttacccatggggataaaaagactcagactttcaccacatttggaaaactacttgcatcataaatatataataactggtagtttatatgaagcagacactaagtgctatagacactctcagaatatcatacttggaaacaatgtaattaaaatgccgaatctgagtcaacagctgccctacttttcaattcagatatactagtaccttacctagaaataatgttaacctagggtgaagtcactataatctgtagtctattatttgggcatttgctacatgatgagtgctgccagattgtggcaggtaaagagacaatgtaatttgcactccctatgatatttctacatttttagcgaccactagtggaagacattccccaaaattagaaaaaaaggagatagaagatttctgtctatgtaaagttctcaaaatttgttctaaattaataaaactatctttgtgttcttttctgcaacagatgattccaacatgggtgtttgtctattcttctttactcttgaaacattagaccatgggaggctcttacagccttgagttgatatttatacaacccaaatctaggtttgaacggtgaggtgtcaggtcatcaaatattcatgtctatatagtcttacacaggttctcaaaaaaaatgttcatgggataggtcattgataatggattccttattctgagaactccagacgactgaaatatatgagagaaggaaaaggacatagtaggagcaggcctgagaaaaaaatgaaagtcagaaatctttaaaaaaatacaagatcttatttctatcttattttttctcctcttctgaaatatatatgaggattcctctccaaacccatggtttctctaagaattttgagtcatttgtatgacctcaaataattagttttagctgacctcacataactccttataataggagacatctttaatgtctgctattaaagaaggatgaaaattcctatgaccttctccccgattatccctttggcaatatagagtcaaataataacattgaccaatagtaaacatgctttgccaagaagtagaagatatattctctagccttagtttttcctcccaatttgcatttttgtaaaaataatgttgtatccacaaaggaaataaactttaaaaacccaagtgca

SEQ ID NO: 152876 - DNA, 558 bp, Homo sapiens
  Payload ID: 10070
  Gene Symbol: MS4A1
  Gene Name: membrane-spanning 4-domains, subfamily A, member 1
  ENST ID: ENST00000532491
  CDS Start-End: 540-558
cactcaccctcccagtgtgcttgagaaacaaactgcacccactgaactccgcagctagcatccaaatcagcccttgagatttgaggccttggagactcagagagaccacaagaggagcaagcaagagagctgggactaactctgtctgctacatattgccagaaattgggagactgaaggtgcaaagaagaaataatttcttggaagggctaacagcttggttggactgagatgggctgaaaagcacagagggaagggaaatcctgaacaagagagaacaaaatctctactttgatggaacttccattctgtggggaagagactgacaataagcaattaaataaataagaactcagcagtaggccttgcctcagatccaaggtcactcggaagaggccatgtctaccctcaatgacactcatggaggaaatgctgagagaagcattcagatgcatgacacaaggtaagactgccaaaaatcttgttcttgctctcctcattttgttatttgttttatttttaggagttttgagagcaaaatgacaacacccagaaatt

SEQ ID NO: 152877 - DNA, 928 bp, Homo sapiens
  Payload ID: 10070
  Gene Symbol: MS4A1
  Gene Name: membrane-spanning 4-domains, subfamily A, member 1
  Uniprot ID: P11836
  ENST ID: ENST00000528313
  CDS Start-End: 112-504
accctcccagtgtgcttgagaaacaaactgcacccactgaactccgcagctagcatccaaatcagcccttgagatttgaggccttggagactcaggagttttgagagcaaaatgacaacacccagaaattcagtaaatgggactttcccggcagagccaatgaaaggccctattgctatgcaatctggtccaaaaccactcttcaggaggatgtcttcactggaacttgtaatagctggcatcgttgagaatgaatggaaaagaacgtgctccagacccaaatctaacatagttctcctgtcagcagaagaaaaaaaagaacagactattgaaataaaagaagaagtggttgggctaactgaaacatcttcccaaccaaagaatgaagaagacattgaaattattccaatccaagaagaggaagaagaagaaacagagacgaactttccagaacctccccaagatcaggaatcctcaccaatagaaaatgacagctctccttaagtgatttcttctgttttctgtttccttttttaaacattagtgttcatagcttccaagagacatgctgactttcatttcttgaggtactctgcacatacgcaccacatctctatctggcctttgcatggagtgaccatagctccttctctcttacattgaatgtagagaatgtagccattgtagcagcttgtgttgtcacgcttcttcttttgagcaactttcttacactgaagaaaggcagaatgagtgcttcagaatgtgatttcctactaacctgttccttggataggctttttagtatagtatttttttttgtcattttctccatcaacaaccagggagactgcacctgatggaaaagatatatgactgcttcatgacattcctaaactatcttttttttattccacatctacgtttttgg

SEQ ID NO: 152878 - DNA, 495 bp, Homo sapiens
  Payload ID: 10070
  Gene Symbol: MS4A1
  Gene Name: membrane-spanning 4-domains, subfamily A, member 1
  ENST ID: ENST00000524807
  CDS Start-End: 474-495
aaagtaattggagcgaagcccaaggtagcagaagctactgatttcctgtcacctgatgtctatcagcgatttcatcttcaggcctggactacaccactcaccctcccagtgtgcttgagaaacaaactgcacccactgaactccgcagctagcatccaaatcagcccttgagatttgaggccttggagactcagatcctgaacaagagagaacaaaatctctactttgatggaacttccattctgtggggaagagactgacaataagcaattaaataaataagaactcagcagtaggccttgcctcagatccaaggtcactcggaagaggccatgtctaccctcaatgacactcatggaggaaatgctgagagaagcattcagatgcatgacacaaggtaagactgccaaaaatcttgttcttgctctcctcattttgttatttgttttatttttaggagttttgagagcaaaatgacaacacccagaaattcag

SEQ ID NO: 152879 - DNA, 3475 bp, Homo sapiens
  Payload ID: 10070
  Gene Symbol: MS4A1
  Gene Name: membrane-spanning 4-domains, subfamily A, member 1
  Uniprot ID: P11836
  ENST ID: ENST00000534668
  CDS Start-End: 290-1183
actcaccctcccagtgtgcttgagaaacaaactgcacccactgaactccgcagctagcatccaaatcagcccttgagatttgaggccttggagactcagaactcagcagtaggccttgcctcagatccaaggtcactcggaagaggccatgtctaccctcaatgacactcatggaggaaatgctgagagaagcattcagatgcatgacacaaggtaagactgccaaaaatcttgttcttgctctcctcattttgttatttgttttatttttaggagttttgagagcaaaatgacaacacccagaaattcagtaaatgggactttcccggcagagccaatgaaaggccctattgctatgcaatctggtccaaaaccactcttcaggaggatgtcttcactggtgggccccacgcaaagcttcttcatgagggaatctaagactttgggggctgtccagattatgaatgggctcttccacattgccctggggggtcttctgatgatcccagcagggatctatgcacccatctgtgtgactgtgtggtaccctctctggggaggcattatgtatattatttccggatcactcctggcagcaacggagaaaaactccaggaagtgtttggtcaaaggaaaaatgataatgaattcattgagcctctttgctgccatttctggaatgattctttcaatcatggacatacttaatattaaaatttcccattttttaaaaatggagagtctgaattttattagagctcacacaccatatattaacatatacaactgtgaaccagctaatccctctgagaaaaactccccatctacccaatactgttacagcatacaatctctgttcttgggcattttgtcagtgatgctgatctttgccttcttccaggaacttgtaatagctggcatcgttgagaatgaatggaaaagaacgtgctccagacccaaatctaacatagttctcctgtcagcagaagaaaaaaaagaacagactattgaaataaaagaagaagtggttgggctaactgaaacatcttcccaaccaaagaatgaagaagacattgaaattattccaatccaagaagaggaagaagaagaaacagagacgaactttccagaacctccccaagatcaggaatcctcaccaatagaaaatgacagctctccttaagtgatttcttctgttttctgtttccttttttaaacattagtgttcatagcttccaagagacatgctgactttcatttcttgaggtactctgcacatacgcaccacatctctatctggcctttgcatggagtgaccatagctccttctctcttacattgaatgtagagaatgtagccattgtagcagcttgtgttgtcacgcttcttcttttgagcaactttcttacactgaagaaaggcagaatgagtgcttcagaatgtgatttcctactaacctgttccttggataggctttttagtatagtatttttttttgtcattttctccatcaacaaccagggagactgcacctgatggaaaagatatatgactgcttcatgacattcctaaactatcttttttttattccacatctacgtttttggtggagtcccttttgcatcattgttttaaggatgataaaaaaaaataacaactagggacaatacagaacccattccatttatctttctacagggctgacattgtggcacattcttagagttaccacaccccatgagggaagctctaaatagccaacacccatctgttttttgtaaaaacagcatagcttatacatggacatgtctctgccttaacttttcctaactcccactctaggctattgtttgcatgtctacctacttttagccattatgcgagaaaagaaaaaaatgaccatagaaaatgccaccatgaggtgcccaaatttcaaataataattaacatttagttatatttataatttccagatgacaaagtatttcatcaaataacttcatttgatgttccatgatcaagaaagaatccctatctctattttacaagtaattcaaagaggccaaataacttgtaaacaagaaaaggtaacttgtcaacagtcataactagtaattatgagagccttgtttcataaccaggtcttcttactcaaatcctgtgatgtttgaaataaccaaattgtctctccaatgtctgcataaactgtgagagccaagtcaacagcttttatcaagaatttactctctgaccagcaataaacaagcactgagagacacagagagccagattcagattttacccatggggataaaaagactcagactttcaccacatttggaaaactacttgcatcataaatatataataactggtagtttatatgaagcagacactaagtgctatagacactctcagaatatcatacttggaaacaatgtaattaaaatgccgaatctgagtcaacagctgccctacttttcaattcagatatactagtaccttacctagaaataatgttaacctagggtgaagtcactataatctgtagtctattatttgggcatttgctacatgatgagtgctgccagattgtggcaggtaaagagacaatgtaatttgcactccctatgatatttctacatttttagcgaccactagtggaagacattccccaaaattagaaaaaaaggagatagaagatttctgtctatgtaaagttctcaaaatttgttctaaattaataaaactatctttgtgttcttttctgcaacagatgattccaacatgggtgtttgtctattcttctttactcttgaaacattagaccatgggaggctcttacagccttgagttgatatttatacaacccaaatctaggtttgaacggtgaggtgtcaggtcatcaaatattcatgtctatatagtcttacacaggttctcaaaaaaaatgttcatgggataggtcattgataatggattccttattctgagaactccagacgactgaaatatatgagagaaggaaaaggacatagtaggagcaggcctgagaaaaaaatgaaagtcagaaatctttaaaaaaatacaagatcttatttctatcttattttttctcctcttctgaaatatatatgaggattcctctccaaacccatggtttctctaagaattttgagtcatttgtatgacctcaaataattagttttagctgacctcacataactccttataataggagacatctttaatgtctgctattaaagaaggatgaaaattcctatgaccttctccccgattatccctttggcaatatagagtcaaataataacattgaccaatagtaaacatgctttgccaagaagtagaagatatattctctagccttagtttttcctcccaatttgcatttttgtaaaaataatgttgtatccacaaaggaaataaactttaaaaacccaagtgcactcattga

SEQ ID NO: 152880 - DNA, 2560 bp, Homo sapiens
  Payload ID: 10070
  Gene Symbol: MS4A1
  Gene Name: membrane-spanning 4-domains, subfamily A, member 1
  ENST ID: ENST00000532073
  CDS Start-End: 116-970
actcaccctcccagtgtgcttgagaaacaaactgcacccactgaactccgcagctagcatccaaatcagcccttgagatttgaggccttggagactcaggagttttgagagcaaaatgacaacacccagaaattcagtaaatgggactttcccggcagagccaatgaaaggccctattgctatgcaatctggtccaaaaccactcttcaggaggatgtcttcactggtgggccccacgcaaagcttcttcatgagggaatctaagactttgggggctgtccagattatgaatgggctcttccacattgccctggggggtcttctgatgatcccagcagggatctatgcacccatctgtgtgactgtgtggtaccctctctggggaggcattatgtatattatttccggatcactcctggcagcaacggagaaaaactccaggaagtgtttggtcaaaggaaaaatgataatgaattcattgagcctctttgctgccatttctggaatgattctttcaatcatggacatacttaatattaaaatttcccattttttaaaaatggagagtctgaattttattagagctcacacaccatatattaacatatacaactgtgaaccagctaatccctctgagaaaaactccccatctacccaatactgttacagcatacaatctctgttcttggaacttgtaatagctggcatcgttgagaatgaatggaaaagaacgtgctccagacccaaatctaacatagttctcctgtcagcagaagaaaaaaaagaacagactattgaaataaaagaagaagtggttgggctaactgaaacatcttcccaaccaaagaatgaagaagacattgaaattattccaatccaagaagaggaagaagaagaaacagagacgaactttccagaacctccccaagatcaggaatcctcaccaatagaaaatgacagctctccttaagtgatttcttctgttttctgtttccttttttaaacattagtgttcatagcttccaagagacatgctgactttcatttcttgaggtactctgcacatacgcaccacatctctatctggcctttgcatggagtgaccatagctccttctctcttacattgaatgtagagaatgtagccattgtagcagcttgtgttgtcacgcttcttcttttgagcaactttcttacactgaagaaaggcagaatgagtgcttcagaatgtgatttcctactaacctgttccttggataggctttttagtatagtatttttttttgtcattttctccatcaacaaccagggagactgcacctgatggaaaagatatatgactgcttcatgacattcctaaactatcttttttttattccacatctacgtttttggtggagtcccttttgcatcattgttttaaggatgataaaaaaaaataacaactagggacaatacagaacccattccatttatctttctacagggctgacattgtggcacattcttagagttaccacaccccatgagggaagctctaaatagccaacacccatctgttttttgtaaaaacagcatagcttatacatggacatgtctctgccttaacttttcctaactcccactctaggctattgtttgcatgtctacctacttttagccattatgcgagaaaagaaaaaaatgaccatagaaaatgccaccatgaggtgcccaaatttcaaataataattaacatttagttatatttataatttccagatgacaaagtatttcatcaaataacttcatttgatgttccatgatcaagaaagaatccctatctctattttacaagtaattcaaagaggccaaataacttgtaaacaagaaaaggtaacttgtcaacagtcataactagtaattatgagagccttgtttcataaccaggtcttcttactcaaatcctgtgatgtttgaaataaccaaattgtctctccaatgtctgcataaactgtgagagccaagtcaacagcttttatcaagaatttactctctgaccagcaataaacaagcactgagagacacagagagccagattcagattttacccatggggataaaaagactcagactttcaccacatttggaaaactacttgcatcataaatatataataactggtagtttatatgaagcagacactaagtgctatagacactctcagaatatcatacttggaaacaatgtaattaaaatgccgaatctgagtcaacagctgccctacttttcaattcagatatactagtaccttacctagaaataatgttaacctagggtgaagtcactataatctgtagtctattatttgggcatttgctacatgatgagtgctgccagattgtggcaggtaaagagacaatgtaatttgcactccctatgatatttctacatttttagcgaccactagtggaagacattccccaaaattagaaaaaaaggagatagaagatttctgtctatgtaaagttctcaaaatttgttctaaattaataaaactatctttgtgttcttttctgcaa

SEQ ID NO: 152881 - DNA, 607 bp, Homo sapiens
  Payload ID: 10070
  Gene Symbol: MS4A1
  Gene Name: membrane-spanning 4-domains, subfamily A, member 1
  ENST ID: ENST00000533306
  CDS Start-End: 239-607
agtgtgcttgagaaacaaactgcacccactgaactccgcagctagcatccaaatcagcccttgagatttgaggccttggagactcagatcctgaacaagagagaacaaaatctctactttgatggaacttccattctgtggggaagagactgacaataagcaattaaataaataagaactcagcagtaggccttgcctcagatccaaggtcactcggaagaggccatgtctaccctcaatgacactcatggaggaaatgctgagagaagcattcagatgcatgacacaagagccaatgaaaggccctattgctatgcaatctggtccaaaaccactcttcaggaggatgtcttcactggtgggccccacgcaaagcttcttcatgagggaatctaagactttgggggctgtccagattatgaatgggctcttccacattgccctggggggtcttctgatgatcccagcagggatctatgcacccatctgtgtgactgtgtggtaccctctctggggaggcattatgtatattatttccggatcactcctggcagcaacggagaaaaactccaggaagtgtttggtcaaaggaaaaatgataatgaat

SEQ ID NO: 152882 - DNA, 2296 bp, Homo sapiens
  Payload ID: 10071
  Gene Symbol: MS4A10
  Gene Name: membrane-spanning 4-domains, subfamily A, member 10
  Uniprot ID: Q96PG2
  ENST ID: ENST00000308287
  CDS Start-End: 97-900
tctctggggagctccggcagcgcaagagggcaaagcacagctggaagctcagagctgcagtcccaggtcctgggccagggcccccatccagcatcaatgaaagcagaagccacagttattcccagccgttgtgctagggggctcccatcatggcaagtcctcagcccagtccagccctggcagacaagtgcaccccagaacacgacccagcccaagctcctggctccacaccagcacgagaagtcccagaagaagagcagccttcttaaggagctgggggccttccacatcaccatcgctctgctgcacctggtctttgggggctacctggcctctatagtcaagaaccttcacctggtggtgctgaagtcttggtatccattctggggggctgcctcttttctcatttcagggatcttggcgataacaatgaagaccttttctaaaacttacctgaagatgttgtgcctgatgacaaacctcatcagcctcttttgcgtgctgtctggcctcttcgtcatctccaaggatctctttctggagagcccatttgagtccccgatctggagaatgtaccccaactccacggtccacatccagaggctggagctggccttgctctgcttcactgtcctagagctcttcctgccagtgcccacagctgtcacagcctggagaggggactgcccatctgcaaagaatgatgatgcatgccttgttccgaatacaccattgcatctcaaaggcctgccggtggagcccccgccatcctaccagagtgtgattcaaggcgacgcacaacacaagcaacatcagaggctcagagaagttaagcaagttgccccggacacatggatagtcactgacggagctgcgatctggacccagactgcaaactgaagagccactgcctgacaatgcccaaacttggttggagcatagcccctgctctcccaaagttgcactttcactgggaagatgagatttgcacatacaaaaggctagagcgatggtctatacagcaaagtcagccctcacagctcctgggaacgctgtcctctcagataagccatttcttacatagttgatggctcgatatctgtggtggcccagattgttttgttttgtttcgctttgttttgttttcttttgttttgttgagatggagtctcgctctgttgcccagcccagagtacagtggcactatctcagctcactgcaatctccgcctccctggttcaagtgattctcctatctcagcctcccaagtagctgggactataggcacacgccaccacgcccagctaatttttatatttttagtagagacaggattgcaccatattggtcagcctggtctcaaactcctgacctcaggtgatccacctgcctcagcctcccaaagtgctgggattacaggcgtgagccactgtgcccagcccaggttttgaagttgtccgagatagcagtctgctctctactgccttataaaatccctgtgtgaagggatgctctcagtatcatttgcccttgcacagaatatccctggggtttgaggttctttgaattctccctctttgtcatctctttcgctgccacttctggctgtggtcactagcttggccatagcacctctcttctccacttctgatctgctgcttctaaccttctatagattgcagctggctttaaaatagattgtaaagtgtaaggcattaggttctgagacagcggcagagagagccatgcaaatgtttaggacaacccagtctttctttttttttttttttttttttttttttgagacggagtctcactctgtcacccaggctggagtgctgtggtgcaatctcggctcactgcaacctctgcctcccgagttcaagcaattctcctgcctcagcctcccgagtagctgggattacaggcgaccgccaccacgcctggctactttttgtatttttagtagagacagggtttcaccacgttagccatgatggtctcaaacttctgacctcataatccacccaccttggcctcccaaagtgctaggattacaggcatgagccaccacccctggctgaaacccaatctttcaaaacatgaaagggggtgatggagaaaaccttagcttggttgtctaaagacatgggtgcaaactctaggctagctctgccaatcacttactgtgcgggtttgactcagtcccttcccctcactaggtcccagtttctccatttgtaaaacaagcaattgtgctacattgatggtttacatcaataaaggttgaaacggc

SEQ ID NO: 152883 - DNA, 1167 bp, Homo sapiens
  Payload ID: 10072
  Gene Symbol: MS4A12
  Gene Name: membrane-spanning 4-domains, subfamily A, member 12
  Uniprot ID: Q9NXJ0
  ENST ID: ENST00000016913
  CDS Start-End: 58-861
acacaggttggagcagagaaagaggaaacatagaggtgccaaaggaacaaagacataatgatgtcatccaagccaacaagccatgctgaagtaaatgaaaccatacccaacccttacccaccaagcagctttatggctcctggatttcaacagcctctgggttcaatcaacttagaaaaccaagctcagggtgctcagcgtgctcagccctacggcatcacatctccgggaatctttgctagcagtcaaccgggtcaaggaaatatacaaatgataaatccaagtgtgggaacagcagtaatgaactttaaagaagaagcaaaggcactaggggtgatccagatcatggttggattgatgcacattggttttggaattgttttgtgtttaatatccttctcttttagagaagtattaggttttgcctctactgctgttattggtggatacccattctggggtggcctttcttttattatctctggctctctctctgtgtcagcatccaaggagctttcccgttgtctggtgaaaggcagcctgggaatgaacattgttagttctatcttggccttcattggagtgattctgctgctggtggatatgtgcatcaatggggtagctggccaagactactgggccgtgctttctggaaaaggcatttcagccacgctgatgatcttctccctcttggagttcttcgtagcttgtgccacagcccattttgccaaccaagcaaacaccacaaccaatatgtctgtcctggttattccaaatatgtatgaaagcaaccctgtgacaccagcgtcttcttcagctcctcccagatgcaacaactactcagctaatgcccctaaatagtaaaagaaaaaggggtatcagtctaatctcatggagaaaaactacttgcaaaaacttcttaagaagatgtcttttattgtctacaatgatttctagtctttaaaaactgtgtttgagatttgtttttaggttggtcgctaatgatggctgtatctcccttcactgtctcttcctacattaccactactacatgctggcaaaggtgaaggatcagaggactgaaaaatgattctgcaactctcttaaagttagaaatgtttctgttcatattactttttccttaataaaatgtcattagaaacaaaa

SEQ ID NO: 152884 - DNA, 578 bp, Homo sapiens
  Payload ID: 10072
  Gene Symbol: MS4A12
  Gene Name: membrane-spanning 4-domains, subfamily A, member 12
  ENST ID: ENST00000526784
  CDS Start-End: 58-578
acacaggttggagcagagaaagaggaaacatagaggtgccaaaggaacaaagacataatgatgtcatccaagccaacaagccatgctgaagtaaatgaaaccatacccaacccttacccaccaagcagctttatggctcctggatttcaacagcctctgggttcaatcaacttagaaaaccaagctcagggtgctcagcgtgctcagccctacggcatcacatctccgggaatctttgctagcagtcaaccgggtcaaggaaatatacaaatgataaatccaagtgtgggaacagcagtaatgaactttaaagaagaagcaaaggcactagggtttattatctctggctctctctctgtgtcagcatccaaggagctttcccgttgtctggtgaaaggcagcctgggaatgaacattgttagttctatcttggccttcattggagtgattctgctgctggtggatatgtgcatcaatggggtagctggccaagactactgggccgtgctttctggaaaaggcatttcagccacgctgatgatcttctccctcttggagttcttcgtagcttgtgccac

SEQ ID NO: 152885 - DNA, 582 bp, Homo sapiens
  Payload ID: 10072
  Gene Symbol: MS4A12
  Gene Name: membrane-spanning 4-domains, subfamily A, member 12
  ENST ID: ENST00000530007
  CDS Start-End: 240-582
aggaaacatagaggtgccaaaggaacaaagtaagtccattgatacgttcttgcctatctctcctccaaatcaatgggcacaaactgtggctggtctacctgtgtgggttctgttctctagattggagggatgaagacaagttcttgactctatgttgaggccagttgaaaaatgagggagaataaaaccatgaacgaaacaagaaagaaacaaaacagaagaggaatgaaaaagacataatgatgtcatccaagccaacaagccatgctgaagtaaatgaaaccatacccaacccttacccaccaagcagctttatggctcctggatttcaacagcctctgggttcaatcaacttagaaaaccaagctcagggtgctcagcgtgctcagccctacggcatcacatctccgggaatctttgctagcagtcaaccgggtcaaggaaatatacaaatgataaatccaagtgtgggaacagcagtaatgaactttaaagaagaagcaaaggcactaggggtgatccagatcatggttggattgatgcacattggttttggaattgttttgtgtttaatatccttct

SEQ ID NO: 152886 - DNA, 1019 bp, Homo sapiens
  Payload ID: 10072
  Gene Symbol: MS4A12
  Gene Name: membrane-spanning 4-domains, subfamily A, member 12
  Uniprot ID: Q9NXJ0
  ENST ID: ENST00000537076
  CDS Start-End: 58-723
acacaggttggagcagagaaagaggaaacatagaggtgccaaaggaacaaagacataatgatgtcatccaagccaacaagccatgctgaagtaaatgaaaccatacccaacccttacccaccaagcagctttatggctcctggatttcaacagcctctgggttcaatcaacttagaaaaccaagctcagggtgctcagcgtgctcagccctacggcatcacatctccgggaatctttgctagcagtcaaccgggtcaaggaaatatacaaatgataaatccaagtgtgggaacagcagtaatgaactttaaagaagaagcaaaggcactagggtttattatctctggctctctctctgtgtcagcatccaaggagctttcccgttgtctggtgaaaggcagcctgggaatgaacattgttagttctatcttggccttcattggagtgattctgctgctggtggatatgtgcatcaatggggtagctggccaagactactgggccgtgctttctggaaaaggcatttcagccacgctgatgatcttctccctcttggagttcttcgtagcttgtgccacagcccattttgccaaccaagcaaacaccacaaccaatatgtctgtcctggttattccaaatatgtatgaaagcaaccctgtgacaccagcgtcttcttcagctcctcccagatgcaacaactactcagctaatgcccctaaatagtaaaagaaaaaggggtatcagtctaatctcatggagaaaaactacttgcaaaaacttcttaagaagatgtcttttattgtctacaatgatttctagtctttaaaaactgtgtttgagatttgtttttaggttggtcgctaatgatggctgtatctcccttcactgtctcttcctacattaccactactacatgctggcaaaggtgaaggatcagaggactgaaaaatgattctgcaactctcttaaagttagaaatgtttctgttcatattactttttccttaataaaatgtcatt

SEQ ID NO: 152887 - DNA, 808 bp, Homo sapiens
  Payload ID: 10073
  Gene Symbol: MS4A13
  Gene Name: membrane-spanning 4-domains, subfamily A, member 13
  Uniprot ID: Q5J8X5
  ENST ID: ENST00000378185
  CDS Start-End: 324-662
gagccggccgggtgctgggctcctggctatccctgtgatggtagctcagcgagatctggggacctggcgctgagcgcgttgccagccgggatcttcctcttcatctaggcctgggcgctggcgtgagaactcggactgggtcctggacgagcgccccccgaaactccttggaaccttgaacaagtaaaatgcaggaagtttgctaataaagacatcaccaaaggttaaagagaaaatcatctagaggaaatgctggcagtatggcatgtgttctttaacaaatctctacagcagattctctcgttttagggactatccagattatgattggcatctttcacattttcatgtggtactttctattggttttgtatatgggacaaattaaaggagcctttggaacgtatgaacctgtaacttacaaaacaggatgtactttatggggaattttttttatcattgcaggagtcttcctaataagagtaacaaagtatccgactcgatctggaaaacttgggagggaagtatcacgtattttactgttcttctacggtttggaattttctattgcacttacacactcaatatacagctgttccaatttgtttcgaagacaaaatgatcttacatctgttactgaggaagctgagagcactccttaaaaaccctagaaatatgagaattttgctgttgctgatgcctggtgtgggtcctaatgatatctctgtataacaaagcagttacgaagcctacagattttgtgcaaaataaaatacaaacaaggtgaatttttctcctcattcaaaaa

SEQ ID NO: 152888 - DNA, 928 bp, Homo sapiens
  Payload ID: 10073
  Gene Symbol: MS4A13
  Gene Name: membrane-spanning 4-domains, subfamily A, member 13
  Uniprot ID: Q5J8X5
  ENST ID: ENST00000378186
  CDS Start-End: 324-782
gagccggccgggtgctgggctcctggctatccctgtgatggtagctcagcgagatctggggacctggcgctgagcgcgttgccagccgggatcttcctcttcatctaggcctgggcgctggcgtgagaactcggactgggtcctggacgagcgccccccgaaactccttggaaccttgaacaagtaaaatgcaggaagtttgctaataaagacatcaccaaaggttaaagagaaaatcatctagaggaaatgctggcagtatggcatgtgttctttaacaaatctctacagcagattctctcgttttagggactatccagattatgattggcatctttcacattttcatgtggtactttctattggttttgtatatgggacaaattaaaggagcctttggaacgtatgaacctgtaacttacaaaacaggatgtactttatggggaattttttttatcattgcaggagtcttcctaataagagtaacaaagtatccgactcgatctggaattataagtactttaatcataaacatcatctgcataattactacaattactgcagtaactctaacaataatagagttgtctcattttaattctgtgtcatacaggaattatggacaagcaaaacttgggagggaagtatcacgtattttactgttcttctacggtttggaattttctattgcacttacacactcaatatacagctgttccaatttgtttcgaagacaaaatgatcttacatctgttactgaggaagctgagagcactccttaaaaaccctagaaatatgagaattttgctgttgctgatgcctggtgtgggtcctaatgatatctctgtataacaaagcagttacgaagcctacagattttgtgcaaaataaaatacaaacaaggtgaatttttctcctcattcaaaaa

SEQ ID NO: 152889 - DNA, 751 bp, Homo sapiens
  Payload ID: 10073
  Gene Symbol: MS4A13
  Gene Name: membrane-spanning 4-domains, subfamily A, member 13
  Uniprot ID: Q5J8X5
  ENST ID: ENST00000437058
  CDS Start-End: 324-605
gagccggccgggtgctgggctcctggctatccctgtgatggtagctcagcgagatctggggacctggcgctgagcgcgttgccagccgggatcttcctcttcatctaggcctgggcgctggcgtgagaactcggactgggtcctggacgagcgccccccgaaactccttggaaccttgaacaagtaaaatgcaggaagtttgctaataaagacatcaccaaaggttaaagagaaaatcatctagaggaaatgctggcagtatggcatgtgttctttaacaaatctctacagcagattctctcgttttagggactatccagattatgattggcatctttcacattttcatgtggtactttctattggttttgtatatgggacaaattaaaggagcctttggaacgtatgaacctgtaacttacaaaacaggatgtactttatggggaatttttaaacttgggagggaagtatcacgtattttactgttcttctacggtttggaattttctattgcacttacacactcaatatacagctgttccaatttgtttcgaagacaaaatgatcttacatctgttactgaggaagctgagagcactccttaaaaaccctagaaatatgagaattttgctgttgctgatgcctggtgtgggtcctaatgatatctctgtataacaaagcagttacgaagcctacagattttgtgcaaaataaaatacaaacaaggtgaatttttctcctcattcaaaaa

SEQ ID NO: 152890 - DNA, 790 bp, Homo sapiens
  Payload ID: 10073
  Gene Symbol: MS4A13
  Gene Name: membrane-spanning 4-domains, subfamily A, member 13
  ENST ID: ENST00000527948
  CDS Start-End: 559-744
gaactcggactgggtcctggacgagcgccccccgaaactccttggaaccttgaacaagtaaaatgcagggtagtgatgtcgctttgctggagtgctttcgtgtcagaagccataaagggacacggaggctgattacggtgttcctctccctatcatactctgtaaacagtaggcactatttactactcagagatgatagctgtaaaatgccgatatgttttagtcatagagagagacttttcagttatgaaggctgttattcagaacagatggatgaaagttgatgcctctaatattaaggcctagaaagaagaaagaaggctattgcttctgaatttggagaggtggtgactgaacaataaggaaaggatcaaacttacgtattttcttctaagaaaataatgtatatgtgctttgtactgttttgtagaagtttgctaataaagacatcaccaaaggttaaagagaaaatcatctagaggaaatgctggcagtatggcatgtgttctttaacaaatctctacagcagattctctcgttttagggactatccagattatgattggcatctttcacattttcatgtggtactttctattggttttgtatatgggacaaattaaaggagcctttggaacgtatgaacctgtaacttacaaaacaggatgtactttatggggaattttttttcgaagacaaaatgatcttacatctgttactgaggaagctgagagcactccttaaaaaccctagaaatatgagaattttgctgttgctgatgcctggtgtg

SEQ ID NO: 152891 - DNA, 2997 bp, Homo sapiens
  Payload ID: 10074
  Gene Symbol: MS4A14
  Gene Name: membrane-spanning 4-domains, subfamily A, member 14
  Uniprot ID: Q96JA4
  ENST ID: ENST00000300187
  CDS Start-End: 278-2317
catctattctttgtttaccatatgtttgtaagcaaattgacaagagagtaagtcttctggatacagtacttttcaccaggaagatggggggctgagcatgctctagaattctaaaactctgtgactcaactatgattctgagattctactactgagtagagtcatcactaagggctcatctctgagggctccatgtgactctggtggagaggtagatcatgatttgggcggcaatgtttgctcactctttcccttactagagttctgccatagaatcatggagtcaacatcccaggacagaagggcaactcacgtcatcactataaaaccaaacgaaactgtattgactgcatttccctacagacctcatagctctctgctggattttctgaagggagagccaagagtcttgggggctacccagatcctgcttgctctaatcattgtgggctttggaactatatttgcacttaattacatcggtttctcccaaagacttccccttgttgtcctcacaggatatccattctggggagcacttatttttattcttacaggatacctcacagtaaccgataagaaatcaaaacttctgggtcaaggtgtcacgggcatgaatgttatcagctccttggttgcgataactgggattactttcaccattctcagctacagacatcaagacaagtactgccagatgccatcctttgaagaaatatgtgttttcagtagaactcttttcattgttctgtttttcttgccttcggatgttactcaaaatagtgaacaacctgccccagaagaaaatgatcaattacaatttgtgcttcaagaagagttttccagtgatgattcaacaacaaatgcacaatctgttatctttggaggctatgctttcttcaagttaacactctctaggagtcctttagtctcccaaccaggtaataaaggtagagaatttgtgccagatgaacaaaagcaaagtatccttccatctcccaaattttcagaggaagaaattgaacctttgcctcccacactagagaaaaagccctcagaaaatatgtccattcagctagactctacatttaaacaaatgaaagatgaagatctacaatctgctattgtacaaccttctcaaatgcaaaccaagcttctgcaggaccaagctgcgtcactccaagtttttccatcccattctgcactaaaactcgaagatatatcacctgaagacttgccatcccaagctctaccagtagaaggcctgtcagaacaaaccatgccatctaagtctacatcatcccatgtcaaacagtcttctaatctgacagctaatgacctgccccctcaaggcatactatcccaagacacatcatctcaagatatgctgtttcatgacatgacatcccaagatatgcaatccctagatatgctatctcaagacacaccatcccacgccatgccacctcaagacataccttcccaagatatgctatcccaagctctatcagcgcatgccatattacctgaagcctcaacatcccatattgtgcagttccctgaaatacaacacctacttcagcagcccccagatcttcaaccagaaaacactgaacctcaaaaccagcaaattttacaaatgtcatatcaagatattagatcagaagttatggaagagaccaaagaatggaaatctgaggaggaactccatagaagaaaatcctcaagacggcattccttaaaccagcaaaccaaagccttgcaatacttaaggagacattctttagacgtgcaagccaaaggccagaaatcctcaaagaggcattccttagatcagcaaagcaaaggctggcaatctccaaagcagaaatccttagaccagcaaatcaaagactggctatccccaaagaggcactccgtagataagcaagctcaacttaatcaaactaaagagcaactcccagatcagcaagctgaagatcagcaagccaaaggggaacaatacccagaaggacaatctaaagatggacaagttaaagaccagcagactgataaggagcaaaactcaaagaagcaaacccaggatcagcaaactgaagaccagccggcccaagagaagaaatccccgaaaggacaattccaaaatgttcaagccgaaggacagcaagctcaggtggagaaagtgccaaaactgttatgccaagattcagaatcccaaatacagcaataccaattctggcaattccacaaaggcaatctccaggctggacaacccaggactgtcaatcttttggccaagaatcccctgactggataactcagggctggagaaacaaagattataaagcacgagaatggcaatttgaaatgaagcactggcaaacacaggatctattagagaaagaagccctaaagcagaaagctctataccaagaagtccaaacccagcacgcaacagcccaacataacctagaatgtcaagacactcaagataaagaccaacaagaccttcaatccagagttacacaaaaaggagatatgtacactagagacatcaaaccaggggacatgaaatgtatagggcaaacctcaggggacctgcaatcagaagacgtgaaggcagattttcattcttcttctggccaaagctcagtacaagacacatgtttagcctatttgtccaatctagattcagaacaagatgtgcaaccagacacttcagcttcctcaaattcatataaagaagatgtgaatttaacttctacttcatgtgatccaaaagatcaacagcaatctgaagactctgactaacatgcagaatctacccaataccacactgcccccattaatggaattaaattgggaaaaacaatattgcctcctccaatctgtgttctcaactgtggttgccacctcattaacttacaaaaaaatgaagggcatgctgagcactcaaacaatttgttcttacttaaaataaaatgacaacaaaccaaa

SEQ ID NO: 152892 - DNA, 3401 bp, Homo sapiens
  Payload ID: 10074
  Gene Symbol: MS4A14
  Gene Name: membrane-spanning 4-domains, subfamily A, member 14
  ENST ID: ENST00000395001
  CDS Start-End: 566-2653
atcaagtaaaagaaactcctttcaaaggagggcagaagcgtggctgagtttaaaaaacatagattttggagacaggtcaagttgagtttgccccttccctgtcctgtatgtctttgggtgacataaccttgctgttcctcagtttcagtattgtagaactgttaaaagaataaatgttagtgcatgtcaacaccttctacacagttcccagaacataaggaatattccataagttttagttcctttataactcatgaacatatgtgtaaggacttgtttcgtatataccatctattctttgtttaccatatgtttgtaagcaaattgacaagagagtaagtcttctggatacagtacttttcaccaggaagatggggggctgagcatgctctagaattctaaaactctgtgactcaactatgattctgagattctactactgagtagagtcatcactaagggctcatctctgagggctccatgtgactctggtggagaggtagatcatgatttgggcggcaatgtttgctcactctttcccttactagagttctgccatagaatcatggagtcaacatcccaggacagaagggcaactcacgtcatcactataaaaccaaacgaaactgtattgactgcatttccctacagacctcatagctctctgctggattttctgaagggagagccaagagtcttgggggctacccagatcctgcttgctctaatcattgtgggctttggaactatatttgcacttaattacatcggtttctcccaaagacttccccttgttgtcctcacaggatatccattctggggagcacttattggtcaaggtgtcacgggcatgaatgttatcagctccttggttgcgataactgggattactttcaccattctcagctacagacatcaagacaagtactgccagatgccatcctttgaagaaatatgtgttttcagtagaactcttttcattggaattttgttaatcttactgatcatcagcatagcagagctcagcatctctgtgactattgcatcctttagaagcaagtgctggacacagtcagatgaggttctgtttttcttgccttcggatgttactcaaaatagtgaacaacctgccccagaagaaaatgatcaattacaatttgtgcttcaagaagagttttccagtgatgattcaacaacaaatgcacaatctgttatctttggaggctatgctttcttcaagttaacactctctaggagtcctttagtctcccaaccaggtaataaaggtagagaatttgtgccagatgaacaaaagcaaagtatccttccatctcccaaattttcagaggaagaaattgaacctttgcctcccacactagagaaaaagccctcagaaaatatgtccattcagctagactctacatttaaacaaatgaaagatgaagatctacaatctgctattgtacaaccttctcaaatgcaaaccaagcttctgcaggaccaagctgcgtcactccaagtttttccatcccattctgcactaaaactcgaagatatatcacctgaagacttgccatcccaagctctaccagtagaaggcctgtcagaacaaaccatgccatctaagtctacatcatcccatgtcaaacagtcttctaatctgacagctaatgacctgccccctcaaggcatactatcccaagacacatcatctcaagatatgctgtttcatgacatgacatcccaagatatgcaatccctagatatgctatctcaagacacaccatcccacgccatgccacctcaagacataccttcccaagatatgctatcccaagctctatcagcgcatgccatattacctgaagcctcaacatcccatattgtgcagttccctgaaatacaacacctacttcagcagcccccagatcttcaaccagaaaacactgaacctcaaaaccagcaaattttacaaatgtcatatcaagatattagatcagaagttatggaagagaccaaagaatggaaatctgaggaggaactccatagaagaaaatcctcaagacggcattccttaaaccagcaaaccaaagccttgcaatacttaaggagacattctttagacgtgcaagccaaaggccagaaatcctcaaagaggcattccttagatcagcaaagcaaaggctggcaatctccaaagcagaaatccttagaccagcaaatcaaagactggctatccccaaagaggcactccgtagataagcaagctcaacttaatcaaactaaagagcaactcccagatcagcaagctgaagatcagcaagccaaaggggaacaatacccagaaggacaatctaaagatggacaagttaaagaccagcagactgataaggagcaaaactcaaagaagcaaacccaggatcagcaaactgaagaccagccggcccaagagaagaaatccccgaaaggacaattccaaaatgttcaagccgaaggacagcaagctcaggtggagaaagtgccaaaactgttatgccaagattcagaatcccaaatacagcaataccaattctggcaattccacaaaggcaatctccaggctggacaacccaggactgtcaatcttttggccaagaatcccctgactggataactcagggctggagaaacaaagattataaagcacgagaatggcaatttgaaatgaagcactggcaaacacaggatctattagagaaagaagccctaaagcagaaagctctataccaagaagtccaaacccagcacgcaacagcccaacataacctagaatgtcaagacactcaagataaagaccaacaagaccttcaatccagagttacacaaaaaggagatatgtacactagagacatcaaaccaggggacatgaaatgtatagggcaaacctcaggggacctgcaatcagaagacgtgaaggcagattttcattcttcttctggccaaagctcagtacaagacacatgtttagcctatttgtccaatctagattcagaacaagatgtgcaaccagacacttcagcttcctcaaattcatataaagaagatgtgaatttaacttctacttcatgtgatccaaaagatcaacagcaatctgaagactctgactaacatgcagaatctacccaataccacactgcccccattaatggaattaaattgggaaaaacaatattgcctcctccaatctgtgttctcaactgtggttgccacctcattaacttacaaaaaaatgaagggcatgctgagcactcaaacaatttgttcttacttaaaataaaatgacaacaaaccaaatgttaacactgtatcatcactttatgtatgtgaagaaataattcacatgtatattccttgtcatcaaa

SEQ ID NO: 152893 - DNA, 2813 bp, Homo sapiens
  Payload ID: 10074
  Gene Symbol: MS4A14
  Gene Name: membrane-spanning 4-domains, subfamily A, member 14
  Uniprot ID: Q96JA4
  ENST ID: ENST00000395005
  CDS Start-End: 145-2133
gattctgagattctactactgagtagagtcatcactaagggctcatctctgagggctccatgtgactctggtggagaggtagatcatgatttgggcggcaatgtttgctcactctttcccttactagagttctgccatagaatcatggagtcaacatcccaggacagaagggcaactcacgtcatcactataaaaccaaacgaaactgtattgactgcatttccctacagacctcatagctctctgctggattttctgaagggagagccaagagtcttgggggctacccagatcctgcttgctctaatcattgtgggctttggaactatatttgcacttaattacatcggtttctcccaaagacttccccttgttgtcctcacaggatatccattctggggagcacttattggtcaaggtgtcacgggcatgaatgttatcagctccttggttgcgataactgggattactttcaccattctcagctacagacatcaagacaagtactgccagatgccatcctttgaagaaatatgtgttttcagtagaactcttttcattgttctgtttttcttgccttcggatgttactcaaaatagtgaacaacctgccccagaagaaaatgatcaattacaatttgtgcttcaagaagagttttccagtgatgattcaacaacaaatgcacaatctgttatctttggaggctatgctttcttcaagttaacactctctaggagtcctttagtctcccaaccaggtaataaaggtagagaatttgtgccagatgaacaaaagcaaagtatccttccatctcccaaattttcagaggaagaaattgaacctttgcctcccacactagagaaaaagccctcagaaaatatgtccattcagctagactctacatttaaacaaatgaaagatgaagatctacaatctgctattgtacaaccttctcaaatgcaaaccaagcttctgcaggaccaagctgcgtcactccaagtttttccatcccattctgcactaaaactcgaagatatatcacctgaagacttgccatcccaagctctaccagtagaaggcctgtcagaacaaaccatgccatctaagtctacatcatcccatgtcaaacagtcttctaatctgacagctaatgacctgccccctcaaggcatactatcccaagacacatcatctcaagatatgctgtttcatgacatgacatcccaagatatgcaatccctagatatgctatctcaagacacaccatcccacgccatgccacctcaagacataccttcccaagatatgctatcccaagctctatcagcgcatgccatattacctgaagcctcaacatcccatattgtgcagttccctgaaatacaacacctacttcagcagcccccagatcttcaaccagaaaacactgaacctcaaaaccagcaaattttacaaatgtcatatcaagatattagatcagaagttatggaagagaccaaagaatggaaatctgaggaggaactccatagaagaaaatcctcaagacggcattccttaaaccagcaaaccaaagccttgcaatacttaaggagacattctttagacgtgcaagccaaaggccagaaatcctcaaagaggcattccttagatcagcaaagcaaaggctggcaatctccaaagcagaaatccttagaccagcaaatcaaagactggctatccccaaagaggcactccgtagataagcaagctcaacttaatcaaactaaagagcaactcccagatcagcaagctgaagatcagcaagccaaaggggaacaatacccagaaggacaatctaaagatggacaagttaaagaccagcagactgataaggagcaaaactcaaagaagcaaacccaggatcagcaaactgaagaccagccggcccaagagaagaaatccccgaaaggacaattccaaaatgttcaagccgaaggacagcaagctcaggtggagaaagtgccaaaactgttatgccaagattcagaatcccaaatacagcaataccaattctggcaattccacaaaggcaatctccaggctggacaacccaggactgtcaatcttttggccaagaatcccctgactggataactcagggctggagaaacaaagattataaagcacgagaatggcaatttgaaatgaagcactggcaaacacaggatctattagagaaagaagccctaaagcagaaagctctataccaagaagtccaaacccagcacgcaacagcccaacataacctagaatgtcaagacactcaagataaagaccaacaagaccttcaatccagagttacacaaaaaggagatatgtacactagagacatcaaaccaggggacatgaaatgtatagggcaaacctcaggggacctgcaatcagaagacgtgaaggcagattttcattcttcttctggccaaagctcagtacaagacacatgtttagcctatttgtccaatctagattcagaacaagatgtgcaaccagacacttcagcttcctcaaattcatataaagaagatgtgaatttaacttctacttcatgtgatccaaaagatcaacagcaatctgaagactctgactaacatgcagaatctacccaataccacactgcccccattaatggaattaaattgggaaaaacaatattgcctcctccaatctgtgttctcaactgtggttgccacctcattaacttacaaaaaaatgaagggcatgctgagcactcaaacaatttgttcttacttaaaataaaatgacaacaaaccaaa

SEQ ID NO: 152894 - DNA, 590 bp, Homo sapiens
  Payload ID: 10074
  Gene Symbol: MS4A14
  Gene Name: membrane-spanning 4-domains, subfamily A, member 14
  ENST ID: ENST00000531949
  CDS Start-End: 84-368
gtgactctggtggagaggtagatcatgatttgggcggcaatgtttgctcactctttcccttactagagttctgccatagaatcatggagtcaacatcccaggacagaagggcaactcacgtcatcactataaaaccaaacgaaactgtattgactgcatttccctacagacctcatagctctctgctggattttctgaagggagagccaagagtcttgggggctacccagatcctgcttgctctaatcattgtgggctttggaactatatttgcacttaattacatcggtttctcccaaagacttccccttgttgtcctcacaggatatccattctggggagcacttattgtgagtactgtcgattagaagctttggagaaattgctataaagatagatttgaactgcttcacgtcctagggtaatgaattccataaatatggccctccaggagaccaaaaaaggcagctcccttcacggcaaaagaagcaactccatttggtcactgcactaccatcatcattgtaataactactctcagtttattcttacaggatacctcacagtaaccgataagaaatcaaaacttc

SEQ ID NO: 152895 - DNA, 451 bp, Homo sapiens
  Payload ID: 10074
  Gene Symbol: MS4A14
  Gene Name: membrane-spanning 4-domains, subfamily A, member 14
  ENST ID: ENST00000534688
  CDS Start-End: 1-419
caagagtcttgggggctacccagatcctgcttgctctaatcattgtgggctttggaactatatttgcacttaattacatcggtttctcccaaagacttccccttgttgtcctcacaggatatccattctggggagcacttatttttattcttacaggatacctcacagtaaccgataagaaatcaaaacttctgggtcaaggtgtcacgggcatgaatgttatcagctccttggttgcgataactgggattactttcaccattctcagctacagacatcaagacaagtactgccagatgccatcctttgaagaaatatgtgttttcagtagaactcttttcattgtaagtggtcttattttgcatgaagaatccctaaaatcttctctgaactgtgtccatgatgtaatgattcactgatttttattttattaaatgaagttgtgtcagca

SEQ ID NO: 152896 - DNA, 2910 bp, Homo sapiens
  Payload ID: 10074
  Gene Symbol: MS4A14
  Gene Name: membrane-spanning 4-domains, subfamily A, member 14
  Uniprot ID: Q96JA4
  ENST ID: ENST00000531783
  CDS Start-End: 92-2230
ggctccatgtgactctggtggagaggtagatcatgatttgggcggcaatgtttgctcactctttcccttactagagttctgccatagaatcatggagtcaacatcccaggacagaagggcaactcacgtcatcactataaaaccaaacgaaactgtattgactgcatttccctacagacctcatagctctctgctggattttctgaagggagagccaagagtcttgggggctacccagatcctgcttgctctaatcattgtgggctttggaactatatttgcacttaattacatcggtttctcccaaagacttccccttgttgtcctcacaggatatccattctggggagcacttatttttattcttacaggatacctcacagtaaccgataagaaatcaaaacttctgggtcaaggtgtcacgggcatgaatgttatcagctccttggttgcgataactgggattactttcaccattctcagctacagacatcaagacaagtactgccagatgccatcctttgaagaaatatgtgttttcagtagaactcttttcattggaattttgttaatcttactgatcatcagcatagcagagctcagcatctctgtgactattgcatcctttagaagcaagtgctggacacagtcagatgaggttctgtttttcttgccttcggatgttactcaaaatagtgaacaacctgccccagaagaaaatgatcaattacaatttgtgcttcaagaagagttttccagtgatgattcaacaacaaatgcacaatctgttatctttggaggctatgctttcttcaagttaacactctctaggagtcctttagtctcccaaccaggtaataaaggtagagaatttgtgccagatgaacaaaagcaaagtatccttccatctcccaaattttcagaggaagaaattgaacctttgcctcccacactagagaaaaagccctcagaaaatatgtccattcagctagactctacatttaaacaaatgaaagatgaagatctacaatctgctattgtacaaccttctcaaatgcaaaccaagcttctgcaggaccaagctgcgtcactccaagtttttccatcccattctgcactaaaactcgaagatatatcacctgaagacttgccatcccaagctctaccagtagaaggcctgtcagaacaaaccatgccatctaagtctacatcatcccatgtcaaacagtcttctaatctgacagctaatgacctgccccctcaaggcatactatcccaagacacatcatctcaagatatgctgtttcatgacatgacatcccaagatatgcaatccctagatatgctatctcaagacacaccatcccacgccatgccacctcaagacataccttcccaagatatgctatcccaagctctatcagcgcatgccatattacctgaagcctcaacatcccatattgtgcagttccctgaaatacaacacctacttcagcagcccccagatcttcaaccagaaaacactgaacctcaaaaccagcaaattttacaaatgtcatatcaagatattagatcagaagttatggaagagaccaaagaatggaaatctgaggaggaactccatagaagaaaatcctcaagacggcattccttaaaccagcaaaccaaagccttgcaatacttaaggagacattctttagacgtgcaagccaaaggccagaaatcctcaaagaggcattccttagatcagcaaagcaaaggctggcaatctccaaagcagaaatccttagaccagcaaatcaaagactggctatccccaaagaggcactccgtagataagcaagctcaacttaatcaaactaaagagcaactcccagatcagcaagctgaagatcagcaagccaaaggggaacaatacccagaaggacaatctaaagatggacaagttaaagaccagcagactgataaggagcaaaactcaaagaagcaaacccaggatcagcaaactgaagaccagccggcccaagagaagaaatccccgaaaggacaattccaaaatgttcaagccgaaggacagcaagctcaggtggagaaagtgccaaaactgttatgccaagattcagaatcccaaatacagcaataccaattctggcaattccacaaaggcaatctccaggctggacaacccaggactgtcaatcttttggccaagaatcccctgactggataactcagggctggagaaacaaagattataaagcacgagaatggcaatttgaaatgaagcactggcaaacacaggatctattagagaaagaagccctaaagcagaaagctctataccaagaagtccaaacccagcacgcaacagcccaacataacctagaatgtcaagacactcaagataaagaccaacaagaccttcaatccagagttacacaaaaaggagatatgtacactagagacatcaaaccaggggacatgaaatgtatagggcaaacctcaggggacctgcaatcagaagacgtgaaggcagattttcattcttcttctggccaaagctcagtacaagacacatgtttagcctatttgtccaatctagattcagaacaagatgtgcaaccagacacttcagcttcctcaaattcatataaagaagatgtgaatttaacttctacttcatgtgatccaaaagatcaacagcaatctgaagactctgactaacatgcagaatctacccaataccacactgcccccattaatggaattaaattgggaaaaacaatattgcctcctccaatctgtgttctcaactgtggttgccacctcattaacttacaaaaaaatgaagggcatgctgagcactcaaacaatttgttcttacttaaaataaaatgacaacaaaccaaa

SEQ ID NO: 152897 - DNA, 2815 bp, Homo sapiens
  Payload ID: 10074
  Gene Symbol: MS4A14
  Gene Name: membrane-spanning 4-domains, subfamily A, member 14
  ENST ID: ENST00000525397
  CDS Start-End: 100-612
tctctgagggctccatgtgactctggtggagaggtagatcatgatttgggcggcaatgtttgctcactctttcccttactagagttctgccatagaatcatggagtcaacatcccaggacagaagggcaactcacgtcatcactataaaaccaaacgaaactgtattgactgcatttccctacagacctcatagctctctgctggattttctgaagggagagccaagagtcttgggggctacccagatcctgcttgctctaatcattgtgggctttggaactatatttgcacttaattacatcggtttctcccaaagacttccccttgttgtcctcacaggatatccattctggggagcacttatttttattcttacaggatacctcacagtaaccgataagaaatcaaaacttctgggtcaaggtgtcacgggcatgaatgttatcagctccttggttgcgataactgggattactttcaccattctcagctacagacatcaagacaagtactgccagatgccatcctttgaagaaatatgtgttttcagtagaactcttttcattgacttcatccttctcactcctccacactccagccacttcctataatcccttaatgtgtcaagtatccacggccccaagatgatcagaggatcagcttcttccggctttgaaccgtcaccaggttctgtttttcttgccttcggatgttactcaaaatagtgaacaacctgccccagaagaaaatgatcaattacaatttgtgcttcaagaagagttttccagtgatgattcaacaacaaatgcacaatctgttatctttggaggctatgctttcttcaagttaacactctctaggagtcctttagtctcccaaccaggtaataaaggtagagaatttgtgccagatgaacaaaagcaaagtatccttccatctcccaaattttcagaggaagaaattgaacctttgcctcccacactagagaaaaagccctcagaaaatatgtccattcagctagactctacatttaaacaaatgaaagatgaagatctacaatctgctattgtacaaccttctcaaatgcaaaccaagcttctgcaggaccaagctgcgtcactccaagtttttccatcccattctgcactaaaactcgaagatatatcacctgaagacttgccatcccaagctctaccagtagaaggcctgtcagaacaaaccatgccatctaagtctacatcatcccatgtcaaacagtcttctaatctgacagctaatgacctgccccctcaaggcatactatcccaagacacatcatctcaagatatgctgtttcatgacatgacatcccaagatatgcaatccctagatatgctatctcaagacacaccatcccacgccatgccacctcaagacataccttcccaagatatgctatcccaagctctatcagcgcatgccatattacctgaagcctcaacatcccatattgtgcagttccctgaaatacaacacctacttcagcagcccccagatcttcaaccagaaaacactgaacctcaaaaccagcaaattttacaaatgtcatatcaagatattagatcagaagttatggaagagaccaaagaatggaaatctgaggaggaactccatagaagaaaatcctcaagacggcattccttaaaccagcaaaccaaagccttgcaatacttaaggagacattctttagacgtgcaagccaaaggccagaaatcctcaaagaggcattccttagatcagcaaagcaaaggctggcaatctccaaagcagaaatccttagaccagcaaatcaaagactggctatccccaaagaggcactccgtagataagcaagctcaacttaatcaaactaaagagcaactcccagatcagcaagctgaagatcagcaagccaaaggggaacaatacccagaaggacaatctaaagatggacaagttaaagaccagcagactgataaggagcaaaactcaaagaagcaaacccaggatcagcaaactgaagaccagccggcccaagagaagaaatccccgaaaggacaattccaaaatgttcaagccgaaggacagcaagctcaggtggagaaagtgccaaaactgttatgccaagattcagaatcccaaatacagcaataccaattctggcaattccacaaaggcaatctccaggctggacaacccaggactgtcaatcttttggccaagaatcccctgactggataactcagggctggagaaacaaagattataaagcacgagaatggcaatttgaaatgaagcactggcaaacacaggatctattagagaaagaagccctaaagcagaaagctctataccaagaagtccaaacccagcacgcaacagcccaacataacctagaatgtcaagacactcaagataaagaccaacaagaccttcaatccagagttacacaaaaaggagatatgtacactagagacatcaaaccaggggacatgaaatgtatagggcaaacctcaggggacctgcaatcagaagacgtgaaggcagattttcattcttcttctggccaaagctcagtacaagacacatgtttagcctatttgtccaatctagattcagaacaagatgtgcaaccagacacttcagcttcctcaaattcatataaagaagatgtgaatttaacttctacttcatgtgatccaaaagatcaacagcaatctgaagactctgactaacatgcagaatctacccaataccacactgcccccattaatggaattaaattgggaaaaacaa

SEQ ID NO: 152898 - DNA, 2898 bp, Homo sapiens
  Payload ID: 10074
  Gene Symbol: MS4A14
  Gene Name: membrane-spanning 4-domains, subfamily A, member 14
  ENST ID: ENST00000527841
  CDS Start-End: 112-573
actaagggctcatctctgagggctccatgtgactctggtggagaggtagatcatgatttgggcggcaatgtttgctcactctttcccttactagagttctgccatagaatcatggagtcaacatcccaggacagaagggcaactcacgtcatcactataaaaccaaacgaaactgtattgactgcatttccctacagacctcatagctctctgctggattttctgaagggagagccaagagtcttgggggctacccagatcctgcttgctctaatcattgtgggctttggaactatatttgcacttaattacatcggtttctcccaaagacttccccttgttgtcctcacaggatatccattctggggagcacttattggtcaaggtgtcacgggcatgaatgttatcagctccttggttgcgataactgggattactttcaccattctcagctacagacatcaagacaagtactgccagatgccatcctttgaagaaatatgtgttttcagtagaactcttttcattgacttcatccttctcactcctccacactccagccacttcctataatcccttaatgtgtcaagtatccacggccccaagatgatcagaggatcagcttcttccggctttgaaccgtcaccaggttctgtttttcttgccttcggatgttactcaaaatagtgaacaacctgccccagaagaaaatgatcaattacaatttgtgcttcaagaagagttttccagtgatgattcaacaacaaatgcacaatctgttatctttggaggctatgctttcttcaagttaacactctctaggagtcctttagtctcccaaccaggtaataaaggtagagaatttgtgccagatgaacaaaagcaaagtatccttccatctcccaaattttcagaggaagaaattgaacctttgcctcccacactagagaaaaagccctcagaaaatatgtccattcagctagactctacatttaaacaaatgaaagatgaagatctacaatctgctattgtacaaccttctcaaatgcaaaccaagcttctgcaggaccaagctgcgtcactccaagtttttccatcccattctgcactaaaactcgaagatatatcacctgaagacttgccatcccaagctctaccagtagaaggcctgtcagaacaaaccatgccatctaagtctacatcatcccatgtcaaacagtcttctaatctgacagctaatgacctgccccctcaaggcatactatcccaagacacatcatctcaagatatgctgtttcatgacatgacatcccaagatatgcaatccctagatatgctatctcaagacacaccatcccacgccatgccacctcaagacataccttcccaagatatgctatcccaagctctatcagcgcatgccatattacctgaagcctcaacatcccatattgtgcagttccctgaaatacaacacctacttcagcagcccccagatcttcaaccagaaaacactgaacctcaaaaccagcaaattttacaaatgtcatatcaagatattagatcagaagttatggaagagaccaaagaatggaaatctgaggaggaactccatagaagaaaatcctcaagacggcattccttaaaccagcaaaccaaagccttgcaatacttaaggagacattctttagacgtgcaagccaaaggccagaaatcctcaaagaggcattccttagatcagcaaagcaaaggctggcaatctccaaagcagaaatccttagaccagcaaatcaaagactggctatccccaaagaggcactccgtagataagcaagctcaacttaatcaaactaaagagcaactcccagatcagcaagctgaagatcagcaagccaaaggggaacaatacccagaaggacaatctaaagatggacaagttaaagaccagcagactgataaggagcaaaactcaaagaagcaaacccaggatcagcaaactgaagaccagccggcccaagagaagaaatccccgaaaggacaattccaaaatgttcaagccgaaggacagcaagctcaggtggagaaagtgccaaaactgttatgccaagattcagaatcccaaatacagcaataccaattctggcaattccacaaaggcaatctccaggctggacaacccaggactgtcaatcttttggccaagaatcccctgactggataactcagggctggagaaacaaagattataaagcacgagaatggcaatttgaaatgaagcactggcaaacacaggatctattagagaaagaagccctaaagcagaaagctctataccaagaagtccaaacccagcacgcaacagcccaacataacctagaatgtcaagacactcaagataaagaccaacaagaccttcaatccagagttacacaaaaaggagatatgtacactagagacatcaaaccaggggacatgaaatgtatagggcaaacctcaggggacctgcaatcagaagacgtgaaggcagattttcattcttcttctggccaaagctcagtacaagacacatgtttagcctatttgtccaatctagattcagaacaagatgtgcaaccagacacttcagcttcctcaaattcatataaagaagatgtgaatttaacttctacttcatgtgatccaaaagatcaacagcaatctgaagactctgactaacatgcagaatctacccaataccacactgcccccattaatggaattaaattgggaaaaacaatattgcctcctccaatctgtgttctcaactgtggttgccacctcattaacttacaaaaaaatgaagggcatgctgagcactcaaacaatttgttcttacttaaaataaaatgacaacaaacc

SEQ ID NO: 152899 - DNA, 559 bp, Homo sapiens
  Payload ID: 10074
  Gene Symbol: MS4A14
  Gene Name: membrane-spanning 4-domains, subfamily A, member 14
  ENST ID: ENST00000526375
  CDS Start-End: 115-559
atcactaagggctcatctctgagggctccatgtgactctggtggagaggtagatcatgatttgggcggcaatgtttgctcactctttcccttactagagttctgccatagaatcatggagtcaacatcccaggacagaagggcaactcacgtcatcactataaaaccaaacgaaactgtattgactgcatttccctacagacctcatagctctctgctggattttctgaagggagagccaagagtcttgggggctacccagatcctgcttgctctaatcattgtgggctttggaactatatttgcacttaattacatcggtttctcccaaagacttccccttgttgtcctcacaggatatccattctggggagcacttattggtcaaggtgtcacgggcatgaatgttatcagctccttggttgcgataactgggattactttcaccattctcagctacagacatcaagacaagtactgccagatgccatcctttgaagaaatatgtgttttcagtagaactcttttcattggaattttgttaatcttactgatcatca

SEQ ID NO: 152900 - DNA, 2997 bp, Homo sapiens
  Payload ID: 10074
  Gene Symbol: MS4A14
  Gene Name: membrane-spanning 4-domains, subfamily A, member 14
  ENST ID: ENST00000530662
  CDS Start-End: 112-573
actaagggctcatctctgagggctccatgtgactctggtggagaggtagatcatgatttgggcggcaatgtttgctcactctttcccttactagagttctgccatagaatcatggagtcaacatcccaggacagaagggcaactcacgtcatcactataaaaccaaacgaaactgtattgactgcatttccctacagacctcatagctctctgctggattttctgaagggagagccaagagtcttgggggctacccagatcctgcttgctctaatcattgtgggctttggaactatatttgcacttaattacatcggtttctcccaaagacttccccttgttgtcctcacaggatatccattctggggagcacttattggtcaaggtgtcacgggcatgaatgttatcagctccttggttgcgataactgggattactttcaccattctcagctacagacatcaagacaagtactgccagatgccatcctttgaagaaatatgtgttttcagtagaactcttttcattgacttcatccttctcactcctccacactccagccacttcctataatcccttaatgtgtcaagtatccacggccccaagatgatcagaggatcagcttcttccggctttgaaccgtcaccagggaattttgttaatcttactgatcatcagcatagcagagctcagcatctctgtgactattgcatcctttagaagcaagtgctggacacagtcagatgaggttctgtttttcttgccttcggatgttactcaaaatagtgaacaacctgccccagaagaaaatgatcaattacaatttgtgcttcaagaagagttttccagtgatgattcaacaacaaatgcacaatctgttatctttggaggctatgctttcttcaagttaacactctctaggagtcctttagtctcccaaccaggtaataaaggtagagaatttgtgccagatgaacaaaagcaaagtatccttccatctcccaaattttcagaggaagaaattgaacctttgcctcccacactagagaaaaagccctcagaaaatatgtccattcagctagactctacatttaaacaaatgaaagatgaagatctacaatctgctattgtacaaccttctcaaatgcaaaccaagcttctgcaggaccaagctgcgtcactccaagtttttccatcccattctgcactaaaactcgaagatatatcacctgaagacttgccatcccaagctctaccagtagaaggcctgtcagaacaaaccatgccatctaagtctacatcatcccatgtcaaacagtcttctaatctgacagctaatgacctgccccctcaaggcatactatcccaagacacatcatctcaagatatgctgtttcatgacatgacatcccaagatatgcaatccctagatatgctatctcaagacacaccatcccacgccatgccacctcaagacataccttcccaagatatgctatcccaagctctatcagcgcatgccatattacctgaagcctcaacatcccatattgtgcagttccctgaaatacaacacctacttcagcagcccccagatcttcaaccagaaaacactgaacctcaaaaccagcaaattttacaaatgtcatatcaagatattagatcagaagttatggaagagaccaaagaatggaaatctgaggaggaactccatagaagaaaatcctcaagacggcattccttaaaccagcaaaccaaagccttgcaatacttaaggagacattctttagacgtgcaagccaaaggccagaaatcctcaaagaggcattccttagatcagcaaagcaaaggctggcaatctccaaagcagaaatccttagaccagcaaatcaaagactggctatccccaaagaggcactccgtagataagcaagctcaacttaatcaaactaaagagcaactcccagatcagcaagctgaagatcagcaagccaaaggggaacaatacccagaaggacaatctaaagatggacaagttaaagaccagcagactgataaggagcaaaactcaaagaagcaaacccaggatcagcaaactgaagaccagccggcccaagagaagaaatccccgaaaggacaattccaaaatgttcaagccgaaggacagcaagctcaggtggagaaagtgccaaaactgttatgccaagattcagaatcccaaatacagcaataccaattctggcaattccacaaaggcaatctccaggctggacaacccaggactgtcaatcttttggccaagaatcccctgactggataactcagggctggagaaacaaagattataaagcacgagaatggcaatttgaaatgaagcactggcaaacacaggatctattagagaaagaagccctaaagcagaaagctctataccaagaagtccaaacccagcacgcaacagcccaacataacctagaatgtcaagacactcaagataaagaccaacaagaccttcaatccagagttacacaaaaaggagatatgtacactagagacatcaaaccaggggacatgaaatgtatagggcaaacctcaggggacctgcaatcagaagacgtgaaggcagattttcattcttcttctggccaaagctcagtacaagacacatgtttagcctatttgtccaatctagattcagaacaagatgtgcaaccagacacttcagcttcctcaaattcatataaagaagatgtgaatttaacttctacttcatgtgatccaaaagatcaacagcaatctgaagactctgactaacatgcagaatctacccaataccacactgcccccattaatggaattaaattgggaaaaacaatattgcctcctccaatctgtgttctcaactgtggttgccacctcattaacttacaaaaaaatgaagggcatgctgagcactcaaacaatttgttcttacttaaaataaaatgacaacaaacc

SEQ ID NO: 152901 - DNA, 2537 bp, Homo sapiens
  Payload ID: 10074
  Gene Symbol: MS4A14
  Gene Name: membrane-spanning 4-domains, subfamily A, member 14
  ENST ID: ENST00000531787
  CDS Start-End: 154-1857
ggaagtctcagaggctggagagcagagcaccaagatcgttctggcaggaacagccagtgggaggttccagctgagcgctccccagaggtgagctgatccccagccacagcacacaggaccaggctgcgagaacagggtcaaggtgtcacgggcatgaatgttatcagctccttggttgcgataactgggattactttcaccattctcagctacagacatcaagacaagtactgccagatgccatcctttgaagaaatatgtgttttcagtagaactcttttcattgttctgtttttcttgccttcggatgttactcaaaatagtgaacaacctgccccagaagaaaatgatcaattacaatttgtgcttcaagaagagttttccagtgatgattcaacaacaaatgcacaatctgttatctttggaggctatgctttcttcaagttaacactctctaggagtcctttagtctcccaaccaggtaataaaggtagagaatttgtgccagatgaacaaaagcaaagtatccttccatctcccaaattttcagaggaagaaattgaacctttgcctcccacactagagaaaaagccctcagaaaatatgtccattcagctagactctacatttaaacaaatgaaagatgaagatctacaatctgctattgtacaaccttctcaaatgcaaaccaagcttctgcaggaccaagctgcgtcactccaagtttttccatcccattctgcactaaaactcgaagatatatcacctgaagacttgccatcccaagctctaccagtagaaggcctgtcagaacaaaccatgccatctaagtctacatcatcccatgtcaaacagtcttctaatctgacagctaatgacctgccccctcaaggcatactatcccaagacacatcatctcaagatatgctgtttcatgacatgacatcccaagatatgcaatccctagatatgctatctcaagacacaccatcccacgccatgccacctcaagacataccttcccaagatatgctatcccaagctctatcagcgcatgccatattacctgaagcctcaacatcccatattgtgcagttccctgaaatacaacacctacttcagcagcccccagatcttcaaccagaaaacactgaacctcaaaaccagcaaattttacaaatgtcatatcaagatattagatcagaagttatggaagagaccaaagaatggaaatctgaggaggaactccatagaagaaaatcctcaagacggcattccttaaaccagcaaaccaaagccttgcaatacttaaggagacattctttagacgtgcaagccaaaggccagaaatcctcaaagaggcattccttagatcagcaaagcaaaggctggcaatctccaaagcagaaatccttagaccagcaaatcaaagactggctatccccaaagaggcactccgtagataagcaagctcaacttaatcaaactaaagagcaactcccagatcagcaagctgaagatcagcaagccaaaggggaacaatacccagaaggacaatctaaagatggacaagttaaagaccagcagactgataaggagcaaaactcaaagaagcaaacccaggatcagcaaactgaagaccagccggcccaagagaagaaatccccgaaaggacaattccaaaatgttcaagccgaaggacagcaagctcaggtggagaaagtgccaaaactgttatgccaagattcagaatcccaaatacagcaataccaattctggcaattccacaaaggcaatctccaggctggacaacccaggactgtcaatcttttggccaagaatcccctgactggataactcagggctggagaaacaaagattataaagcacgagaatggcaatttgaaatgaagcactggcaaacacaggatctattagagaaagaagccctaaagcagaaagctctataccaagaagtccaaacccagcacgcaacagcccaacataacctagaatgtcaagacactcaagataaagaccaacaagaccttcaatccagagttacacaaaaaggagatatgtacactagagacatcaaaccaggggacatgaaatgtatagggcaaacctcaggggacctgcaatcagaagacgtgaaggcagattttcattcttcttctggccaaagctcagtacaagacacatgtttagcctatttgtccaatctagattcagaacaagatgtgcaaccagacacttcagcttcctcaaattcatataaagaagatgtgaatttaacttctacttcatgtgatccaaaagatcaacagcaatctgaagactctgactaacatgcagaatctacccaataccacactgcccccattaatggaattaaattgggaaaaacaatattgcctcctccaatctgtgttctcaactgtggttgccacctcattaacttacaaaaaaatgaagggcatgctgagcactcaaacaatttgttcttacttaaaataaaatgacaacaaaccaaa

SEQ ID NO: 152902 - DNA, 1536 bp, Homo sapiens
  Payload ID: 10075
  Gene Symbol: MS4A15
  Gene Name: membrane-spanning 4-domains, subfamily A, member 15
  Uniprot ID: Q8N5U1
  ENST ID: ENST00000337911
  CDS Start-End: 77-520
atcgccttgaagttacgcttgaaggaggaaaactcatcaattttcggggaatcccggctttggcagcgtgctgctcatggttcgccgcggccacgtgggcatcttcttcatcgagggcggcgtccccttctggggaggagcctgcttcatcatctccggatccctctcagtggcagccgagaagaaccacaccagttgcctggtgaggagcagcctgggcaccaacatcctcagcgtcatggcggcctttgctgggacagccattctgctcatggattttggtgttaccaaccgggatgtggacaggggctatctggccgtgcttactatcttcactgtcctggagttcttcacagcggtcattgccatgcacttcgggtgccaagccatccatgcccaggccagtgcacctgtgatcttcctgccaaacgccttcagcgcagacttcaacatccccagcccggcagcctctgcgccccctgcctatgacaatgtggcatatgcccaaggagtcgtctgagtagcagatgtggcacctgcgggtggagtccagccttttccctctgggcccagcctctccccacccccaccttgttcatcaggggccagccccatcccagctgccctccctcaccacatctacacatactccggcatctgagtgaagtgtccccagggacatctctcccacactttccccagtgctttctttctaaaagacaccgggctgacgtcaggggtgtgtgtccttcagctccctgagccctgtcacccttccaggacacccaccttgtgcatctaagcatttctctgctcattggggaaatcctggcctcattggagactcaggttcgaggcctgccctgaccctcgggcctcgggaaggtcagagagcccggaatcctccagaatggaagagtctgactctggcattccacagaggtgccgataccaggccaaggcctcacagcagggtagtggcctggccgcaggtctcctggccccaagatcagctctgtcctttgtcatctgttgccacatccatggaactcaggtttcctatttggaaactagagtgttgaaccagataaggttcatcaggcccttccagctccccaggctccctgaagtcctgggtctaggccaggcattgtccccctgcttcctggaaaccctcattttccttgtctgtaatatgaagtcagcattggccccgccccccaccccctaccatctcccaatggaggggaggttgcaggggagagctgccgccagcccactcctgaggcaccaccacagtcagcatcgacaggggcacagcagtggcagtttgggacctccctgtgcctctcagcactcccttccccacccccatagcccaaggacaaggctaccacagaaggttaccacaggacctgggcttcgtctccaggggacaaggagacactgtcagcctggtgttcaccaggcctggtagatgagatggcttgtctcatccacaccacagaaggaaataaaccatgtggcttaaatttt

SEQ ID NO: 152903 - DNA, 1818 bp, Homo sapiens
  Payload ID: 10075
  Gene Symbol: MS4A15
  Gene Name: membrane-spanning 4-domains, subfamily A, member 15
  Uniprot ID: Q8N5U1
  ENST ID: ENST00000405633
  CDS Start-End: 80-802
cttgaagttacgcttgaaggaggaaaactcatcaattttcggggaatcccgcctttgtttcccaggctctctgagcacgatgtctgcagctcccgccagcaatggagtgtttgttgtcatcccgccaaacaacgccagtggcctctgcccacctccggccattctgcccacatccatgtgccaacctccagggattatgcagtttgaggagccaccgctgggggcacagacaccaagggccacacagccacctgacttgcggcccgtggagacattcctgacaggagagcccaaagttttggggacggtgcagatcctcatcggcctcatccacctaggctttggcagcgtgctgctcatggttcgccgcggccacgtgggcatcttcttcatcgagggcggcgtccccttctggggaggagcctgcttcatcatctccggatccctctcagtggcagccgagaagaaccacaccagttgcctggtgaggagcagcctgggcaccaacatcctcagcgtcatggcggcctttgctgggacagccattctgctcatggattttggtgttaccaaccgggatgtggacaggggctatctggccgtgcttactatcttcactgtcctggagttcttcacagcggtcattgccatgcacttcgggtgccaagccatccatgcccaggccagtgcacctgtgatcttcctgccaaacgccttcagcgcagacttcaacatccccagcccggcagcctctgcgccccctgcctatgacaatgtggcatatgcccaaggagtcgtctgagtagcagatgtggcacctgcgggtggagtccagccttttccctctgggcccagcctctccccacccccaccttgttcatcaggggccagccccatcccagctgccctccctcaccacatctacacatactccggcatctgagtgaagtgtccccagggacatctctcccacactttccccagtgctttctttctaaaagacaccgggctgacgtcaggggtgtgtgtccttcagctccctgagccctgtcacccttccaggacacccaccttgtgcatctaagcatttctctgctcattggggaaatcctggcctcattggagactcaggttcgaggcctgccctgaccctcgggcctcgggaaggtcagagagcccggaatcctccagaatggaagagtctgactctggcattccacagaggtgccgataccaggccaaggcctcacagcagggtagtggcctggccgcaggtctcctggccccaagatcagctctgtcctttgtcatctgttgccacatccatggaactcaggtttcctatttggaaactagagtgttgaaccagataaggttcatcaggcccttccagctccccaggctccctgaagtcctgggtctaggccaggcattgtccccctgcttcctggaaaccctcattttccttgtctgtaatatgaagtcagcattggccccgccccccaccccctaccatctcccaatggaggggaggttgcaggggagagctgccgccagcccactcctgaggcaccaccacagtcagcatcgacaggggcacagcagtggcagtttgggacctccctgtgcctctcagcactcccttccccacccccatagcccaaggacaaggctaccacagaaggttaccacaggacctgggcttcgtctccaggggacaaggagacactgtcagcctggtgttcaccaggcctggtagatgagatggcttgtctcatccacaccacagaaggaaataaaccatgtggcttaaatttt

SEQ ID NO: 152904 - DNA, 2110 bp, Homo sapiens
  Payload ID: 10075
  Gene Symbol: MS4A15
  Gene Name: membrane-spanning 4-domains, subfamily A, member 15
  ENST ID: ENST00000429322
  CDS Start-End: 84-647
tcgccttgaagttacgcttgaaggaggaaaactcatcaattttcggggaatcccgcctttgtttcccaggctctctgagcacgatgtctgcagctcccgccagcaatggagtgtttgttgtcatcccgccaaacaacgccagtggcctctgcccacctccggccattctgcccacatccatgtgccaacctccagggattatgcagtttgaggagccaccgctgggggcacagacaccaagggccacacagccacctgacttgcggcccgtggagacattcctgacaggagagcccaaagttttgggggctttggcagcgtgctgctcatggttcgccgcggccacgtgggcatcttcttcatcgagggcggcgtccccttctggggaggagcctgcttcatcatctccggatccctctcagtggcagccgagaagaaccacaccagttgcctgctcattccccagcacttcaggggacctgcaaagtgccaggggaggggcaccacccaggcagaccagacgcagactgtgcatgtccaggagaagaagacagggatactctttcaatacacaagccagggtggaaagtgaggtccatgctcatggtcattccgagaaaggaaagatgctagaagatctcctgtaagagtcctgctgggccttggtgagcagagaggacttagaaataccacagggaaagctggagaatgcacggaggagtgtgggcagggtcgccactgaaaccacgcctggctccatccaacgaaggcaaaggtgaggagcagcctgggcaccaacatcctcagcgtcatggcggcctttgctgggacagccattctgctcatggattttggtgttaccaaccgggatgtggacaggggctatctggccgtgcttactatcttcactgtcctggagttcttcacagcggtcattgccatgcacttcgggtgccaagccatccatgcccaggccagtgcacctgtgatcttcctgccaaacgccttcagcgcagacttcaacatccccagcccggcagcctctgcgccccctgcctatgacaatgtggcatatgcccaaggagtcgtctgagtagcagatgtggcacctgcgggtggagtccagccttttccctctgggcccagcctctccccacccccaccttgttcatcaggggccagccccatcccagctgccctccctcaccacatctacacatactccggcatctgagtgaagtgtccccagggacatctctcccacactttccccagtgctttctttctaaaagacaccgggctgacgtcaggggtgtgtgtccttcagctccctgagccctgtcacccttccaggacacccaccttgtgcatctaagcatttctctgctcattggggaaatcctggcctcattggagactcaggttcgaggcctgccctgaccctcgggcctcgggaaggtcagagagcccggaatcctccagaatggaagagtctgactctggcattccacagaggtgccgataccaggccaaggcctcacagcagggtagtggcctggccgcaggtctcctggccccaagatcagctctgtcctttgtcatctgttgccacatccatggaactcaggtttcctatttggaaactagagtgttgaaccagataaggttcatcaggcccttccagctccccaggctccctgaagtcctgggtctaggccaggcattgtccccctgcttcctggaaaccctcattttccttgtctgtaatatgaagtcagcattggccccgccccccaccccctaccatctcccaatggaggggaggttgcaggggagagctgccgccagcccactcctgaggcaccaccacagtcagcatcgacaggggcacagcagtggcagtttgggacctccctgtgcctctcagcactcccttccccacccccatagcccaaggacaaggctaccacagaaggttaccacaggacctgggcttcgtctccaggggacaaggagacactgtcagcctggtgttcaccaggcctggtagatgagatggcttgtctcatccacaccacagaaggaaataaaccatgtggcttaaattttg

SEQ ID NO: 152905 - DNA, 818 bp, Homo sapiens
  Payload ID: 10075
  Gene Symbol: MS4A15
  Gene Name: membrane-spanning 4-domains, subfamily A, member 15
  Uniprot ID: Q8N5U1
  ENST ID: ENST00000528170
  CDS Start-End: 135-734
cttggcgttcactgcaagctataagctctgcaagtggtgaccccgacgtgatcgccttgaagttacgcttgaaggaggaaaactcatcaattttcggggaatcccgcctttgtttcccaggctctctgagcacgatgtctgcagctcccgccagcaatggagtgtttgttgtcatcccgccaaacaacgccagtggcctctgcccacctccggccattctgcccacatccatgtgccaacctccagggattatgcagtttgaggagccaccgctgggggcacagacaccaagggccacacagccacctgacttgcggcccgtggagacattcctgacaggagagcccaaagttttggggttcatcatctccggatccctctcagtggcagccgagaagaaccacaccagttgcctggtgaggagcagcctgggcaccaacatcctcagcgtcatggcggcctttgctgggacagccattctgctcatggattttggtgttaccaaccgggatgtggacaggggctatctggccgtgcttactatcttcactgtcctggagttcttcacagcggtcattgccatgcacttcgggtgccaagccatccatgcccaggccagtgcacctgtgatcttcctgccaaacgccttcagcgcagacttcaacatccccagcccggcagcctctgcgccccctgcctatgacaatgtggcatatgcccaaggagtcgtctgagtagcagatgtggcacctgcgggtggagtccagccttttccctctgggcccagcctctccccacccccaccttgttcatcaggg

SEQ ID NO: 152906 - DNA, 969 bp, Homo sapiens
  Payload ID: 10076
  Gene Symbol: MS4A18
  Gene Name: membrane-spanning 4-domains, subfamily A, member 18
  Uniprot ID: Q3C1V0
  ENST ID: ENST00000398983
  CDS Start-End: 1-969
atgaccgaacaggtgattggagccaacagtgtacctggcattattgccccagataatgttcacgtcatccagcccagcaaccctgtggcctctggaaatcatctgcagccttcagaggtgaccacttacccaatctcaccaaaagtaatccactgtgatacaggaagagcaaacttacagaatctactcgtggtgaaccagaactcagcagcaggtgtacagagtcaacccattgggtatcagcgacagtatccagtgggaacagccagtttgcagacggtgcctggagtgatccaatacacacagggaaccacgaatctccagacatggcctggagaccttcagaatcctctgaatgctaaccctgggctgacacacacctcaaactcatcccagtggaacacgtcatttgcatcatttacttcatttaatcccaagaaattcataaatgaggaggtcagaacattaggggccatccagatcctcatcggcctgacgcacattttctctgcaattaaccctgtgctgtattactatccttttgtgacctggttgtcagggtacccgctctggggaggattatcctatattgtatctggatccctctcagtatgggctgcaaaggaccccagtccttgtgtggtgaacagcagcatcagcttcaacatcatcagcgcactcttcgcctttgccgggatcttcattatcattacagatctgagcctttactatgtgacgacatattcaaaggcggtttctggcggtcttctcccctttgccctcctggagttcatcctcacttgtgtggtctcacattttgggtgccaggctacctgctgcagacaatttgagaatgtggcagtgattccaaccgtattcagtttcaacccagccaataccaccaccagccctgtcaatgctaccactggtcctgtcaatgctgccactggccctgtcagtgccaccaat

SEQ ID NO: 152907 - DNA, 1433 bp, Homo sapiens
  Payload ID: 10076
  Gene Symbol: MS4A18
  Gene Name: membrane-spanning 4-domains, subfamily A, member 18
  ENST ID: ENST00000529108
  CDS Start-End: 13-1215
cagttgtacaccatgaccgaacaggtgattggagccaacagtgtacctggcattattgccccagataatgttcacgtcatccagcccagcaaccctgtggcctctggaaatcatctgcagccttcagaggtgaccacttacccaatctcaccaaaagtaatccactgtgatacaggaagagcaaacttacagaatctactcgtggtgaaccagaactcagcagcaggtgtacagagtcaacccattgggtatcagcgacagtatccagtgggaacagccagtttgcagacggtgcctggagtgatccaatacacacagggaaccacgaatctccagacatggcctggagaccttcagaatcctctgaatgctaaccctgggctgacacacacctcaaactcatcccagtggaacacgtcatttgcatcatttacttcatttaatcccaagaaattcataaatgaggaggtcagaacattaggggtgagtgccatccagatcctcatcggcctgacgcacattttctctgcaattaaccctgtgctgtattactatccttttgtgacctggttgtcagggtacccgctctggggaggattatcctatattgtatctggatccctctcagtatgggctgcaaaggaccccagtccttgtgtggtgaacagcagcatcagcttcaacatcatcagcgcactcttcgcctttgccgggatcttcattatcattacagatctgagcctttactatgtgacgacatattcaaaggcggtttctggcggtcttctcccctttgccctcctggagttcatcctcacttgtgtggtctcacattttgggtgccaggctacctgctgcagacaatttgagaatgtggcagtgattccaaccgtattcagtttcaacccagccaataccaccaccagccctgtcaatgctaccactggtcctgtcaatgctgccactggccctgtcagtgccaccaatggtcctgtcaatactaccattcaccctgtcaacaccaccaccagccctgtcaacaccaccaccagccctgtcaatgttaccactggtcctgtcaatgctaacattggccctgtcaatgtgacaactggccccgttaacactaccactgcccctgccaaagctaccaccagttgtgtcaatgctatccacaccagcaatgtacccccgaaccctcgtaccaagaaatagctgatttgcacagagatagatgacatgggatgcctgtctcaatgacaaggggatacactgtagctgtatcttttcttctccctgaaacttccatgaccatgaccctagccttgttgccagactgaaatgaacaagcatttcctctcctcttcactcctaagcttcatttttgtttgttattgatgtcttttttttcattcataaataattttcctttg

SEQ ID NO: 152908 - DNA, 1152 bp, Homo sapiens
  Payload ID: 10077
  Gene Symbol: MS4A2
  Gene Name: membrane-spanning 4-domains, subfamily A, member 2
  Uniprot ID: Q01362
  ENST ID: ENST00000278888
  CDS Start-End: 103-837
aacccatttcaactgcctattcagagcatgcagtaagaggaaatccaccaagtctcaatataataatattctttattcctggacagctcggttaatgaaaaaatggacacagaaagtaataggagagcaaatcttgctctcccacaggagccttccagtgtgcctgcatttgaagtcttggaaatatctccccaggaagtatcttcaggcagactattgaagtcggcctcatccccaccactgcatacatggctgacagttttgaaaaaagagcaggagttcctgggggtaacacaaattctgactgctatgatatgcctttgttttggaacagttgtctgctctgtacttgatatttcacacattgagggagacattttttcatcatttaaagcaggttatccattctggggagccatatttttttctatttctggaatgttgtcaattatatctgaaaggagaaatgcaacatatctggtgagaggaagcctgggagcaaacactgccagcagcatagctgggggaacgggaattaccatcctgatcatcaacctgaagaagagcttggcctatatccacatccacagttgccagaaattttttgagaccaagtgctttatggcttccttttccactgaaattgtagtgatgatgctgtttctcaccattctgggacttggtagtgctgtgtcactcacaatctgtggagctggggaagaactcaaaggaaacaaggttccagaggatcgtgtttatgaagaattaaacatatattcagctacttacagtgagttggaagacccaggggaaatgtctcctcccattgatttataagaatcacgtgtccagaacactctgattcacagccaaggatccagaaggccaaggtcttgttaaggggctactggaaaaatttctattctctccacagcctgctggttttacattagatttattcgcctgataagaatattttgtttctgctgcttctgtccaccttaatattctccttctatttgtagatatgatagactcctatttttcttgttttatattatgaccacacacatctctgctggaaagtcaacatgtagtaagcaagatttaactgtttgattataactgtgcaaatacagaaaaaaagaaggc

SEQ ID NO: 152909 - DNA, 541 bp, Homo sapiens
  Payload ID: 10077
  Gene Symbol: MS4A2
  Gene Name: membrane-spanning 4-domains, subfamily A, member 2
  ENST ID: ENST00000524868
  CDS Start-End: 418-541
ttcagttttgggtctatgtgtgaaaccaagcatgccttaaacaaggaagacaagcttttcaaaggtgcaattggataacttctgccatagaaatggctgaattgggacacaagtggggacaattccagaagaagggcacatctctttcttttctgcagttctttctcaccttctcaactcctactaaaatgtctcattttcaggttctgtaaatcctgctagtctcaggcaaaattatgctccaggagtctcaaattttcttatttcatattagtctttatttagtagacttcttaatttttctattcatcacaagtaaaagcctgttgatcttaatcagccaagaaacttatctgtctggcaaatgacttatgtataaagagaatcatcaatgtcatgagctcggttaatgaaaaaatggacacagaaagtaataggagagcaaatcttgctctcccacaggagccttccagtgtgcctgcatttgaagtcttggaaatatctccccaggaagtatcttcaggcagactattgaagtcgg

SEQ ID NO: 152910 - DNA, 3512 bp, Homo sapiens
  Payload ID: 10077
  Gene Symbol: MS4A2
  Gene Name: membrane-spanning 4-domains, subfamily A, member 2
  ENST ID: ENST00000617306
  CDS Start-End: 103-702
aacccatttcaactgcctattcagagcatgcagtaagaggaaatccaccaagtctcaatataataatattctttattcctggacagctcggttaatgaaaaaatggacacagaaagtaataggagagcaaatcttgctctcccacaggagccttccagtgtgcctgcatttgaagtcttggaaatatctccccaggaagtatcttcaggcagactattgaagtcggcctcatccccaccactgcatacatggctgacagttttgaaaaaagagcaggagttcctggggttttctatttctggaatgttgtcaattatatctgaaaggagaaatgcaacatatctggtgagaggaagcctgggagcaaacactgccagcagcatagctgggggaacgggaattaccatcctgatcatcaacctgaagaagagcttggcctatatccacatccacagttgccagaaattttttgagaccaagtgctttatggcttccttttccactgaaattgtagtgatgatgctgtttctcaccattctgggacttggtagtgctgtgtcactcacaatctgtggagctggggaagaactcaaaggaaacaaggttccagaggatcgtgtttatgaagaattaaacatatattcagctacttacagtgagttggaagacccaggggaaatgtctcctcccattgatttataagaatcacgtgtccagaacactctgattcacagccaaggatccagaaggccaaggtcttgttaaggggctactggaaaaatttctattctctccacagcctgctggttttacattagatttattcgcctgataagaatattttgtttctgctgcttctgtccaccttaatattctccttctatttgtagatatgatagactcctatttttcttgttttatattatgaccacacacatctctgctggaaagtcaacatgtagtaagcaagatttaactgtttgattataactgtgcaaatacagaaaaaaagaaggctggctgaaagttgagttaaactttgacagtttgataatatttggttcttagggtttttttttttttttagcattcttaatagttacagttgggcatgatttgtaccatccacccatacccacacagtcacagtcacacacacatatgtattacttacactatatataacttcctatgcaaatattttaccaccagtcaataatacatttttgccaagacatgaagttttataaagatctgtataattgcctgaatcaccagcacattcactgacatgatattatttgcagattgacaagtaggaagtggggaattttattaagttactcgttgtctggggaggtaaataggttaaaaacagggaaattataagtgcagagattaacatttcacaaatgtttagtgaaacatttgtgaaaaaagaagactaaattaagacctgagctgaaataaagtgagtggaaatggaaataatggttatatctaaaacatgtagaaaaagagtaactggtagattttgttaacaaattaaagaataaagttagacaagcaactggttgactaatacattaagcgtttgagtctaagatgaaaggagaacactggttatgttgatagaatgataaaaagggtcgggcgcggaggctcacgcctgtaatcccagccctttgggaggccgaggtgggcagatcacgaagtcagtagtttgagaccagcctggccaacatagtgaaaccccgtctctactaaaaatacaaaaaaaaaattagctgggtgtggtggcagtcacctgtagtcccagctacttgggaggctgaggcaggagaatcgcttcaacctgggaggcggaggttgcagtgagccgagatcgcaccagtgcactccagccttggtgacaatgggagactccatctcaaaaaaaaaaaaaaaaaaaaaaaagataaaaagtcagaaatctgaaaagtggaggaagagtacaaatagacctaaattaagctcatttttaggctttgattttggggagacaaagggaaatgcagccatagagggcctgatgacatccaatacagagttctggtaaagataaaatttgatacaggtttggtgtcattataagagaaatcattattaaatgaagcaagttaacactctaagagaattattttgagatagaagtgaagctaagctaaacttcacatgcctataattggagggaaaaactaaggataaaatctagcctagaagatacaataattagtcataaacatgcattgtgaaactgtagagagcaggtagcccaaaatagagaaagattagataaagagaaaataagtatccatcagagacagtatctctaggcttgggcaagagaaaagtccacagtgataagcaactccacctaaggcatgaatatgcggcagagaaaacagcaatagtgaatgaatgcaaaaggtgctgagaaattccacacatgagtattgtgatgagtaaatgaataaaacatttgcaaagacctttagagaaagagaatgggagcatatgtgagaaataagatagttgattatgaatagaaggtagtgaagaaaagcaagctaagaaaaaattctgtttataaaagaaggaaaagatagtttatgtttttagcctaagtataagagtcctacagatggactgaaaaaaatcagtctgagagtattagtcacaattaatgaaataattacattttatgtattgaggatgccaagattaaaaggtgacaggtagatgttaatttccctagattgtgaaagtgatcacgacaatcacacaacaaataattaagtgacttggtatgctttatttaattgtagggcctgaggttttccattctcatttttctaaaatacaattttgtttctccaaatttgacagcagaataaaaaccctaccctttcactgtgtatcatgctaagctgcatctctactcttgatcatctgtaggtattaatcacatcacttccatggcatggatgttcacatacagactcttaaccctggtttaccaggacctctaggagtggatccaatctatatctttacagttgtatagtatatgatatctcttttatttcactcaatttatattttcatcattgactacatatttcttatacacaacacacaatttatgaattttttctcaagatcattctgagagttgccccaccctacctgccttttatagtatgcccacctcaggcagacacagagcacaatgctggggttctcttcacactatcactgccccaaattgtctttctaaatttcaacttcaatgtcatcttctccatgaagaccactgaatgaacaccttttcatccagccttaatttcttgctccataactactctatcccacgatgcagtattgtatcattaattattagtgtgcttgtgacctccttatgtattctcaattacctgtatttgtgcaataaattggaataatgtaacttg

SEQ ID NO: 152911 - DNA, 1613 bp, Homo sapiens
  Payload ID: 10078
  Gene Symbol: MS4A3
  Gene Name: membrane-spanning 4-domains, subfamily A, member 3 (hematopoietic cell-specific)
  Uniprot ID: Q96HJ5
  ENST ID: ENST00000278865
  CDS Start-End: 74-718
acttgcgacaaggtggacttgggaggaaagccgtctgccaaagcctgaagcctccaagccataaacaaccccaatggcctcccacgaagttgataatgcagagctggggtcagcctctgcccatggtaccccaggcagtgaggcgggaccagaagagctgaatacttctgtctaccagcccatagatggatcaccagattatcagaaagcaaaattacaagttcttggggccatccagatcctgaatgcagcaatgattctggctttgggtgtctttctgggttccttgcaatacccataccacttccaaaagcacttctttttcttcaccttctacacaggctacccgatttggggtgctgtgtttttctgtagttcaggaaccttgtctgttgtagcagggataaaacccacaagaacatggatacagaacagttttggaatgaacattgccagtgctacaattgcactagtggggactgcttttctctcactaaatatagcagttaatatccagtcattaaggagttgtcactcttcatcagagtcaccggacctatgcaattacatgggctccatatcaaatggcatggtgtctctactgctgattctcaccttgctggaattatgcgtaaccatctctaccatagccatgtggtgcaatgcaaactgctgtaattcaagagaggaaatttcctcacctcccaattctgtgtaatcaagaatacctccttaattctgagagcatgaatatttgaccttaaatctccagtgactcagagcttcacccacaaactcaggagaacataagcctgctcgtaaagctcaatccttctatcatggcaccaatcacaagaaccttggacgtttgactgactctatcctttctctcctaactataaatcctatttgtgtgtcgtgggtatggaaggacagatatatttctttaggcattcttggatatctgtaacttctatgatcattactccaaagttgtttccagaaattggttctatttcttcttatccacctactccattgctttatgaggtttaaggaaggaaggcggtataatccctattcaatatattttttctaaaatccaacttctgaccgcccagtaggaagaaaaatgagacattttttccattacagagaaatgcttcttgactttaacatcagcattataaaaagtgtcaaataaaaaattaccatcattatcattaaaataaattttcactgtatttgagatgggagggttaaggctcagggattttatttcagtgaactgctggaactcacacatgccctgatatgtaaatgatgatttatgttggcgagtctgagagcaagcccaaatgtgttcttcaaaggacaatgggaaactgtaaagtagagaactaaagaataaggcctttagaatctgacacatctgggttcaaattctgaaactgtcacttattacctgtatgaacatgggcaaattatctaatctctctgatctatttttcctcatctgtaaaataggtgtaataataacaactactttgtcggttgctctgagggttaaatgaaaataaaaagaaaatgtgaaacagcaccacaggtacttg

SEQ ID NO: 152912 - DNA, 1516 bp, Homo sapiens
  Payload ID: 10078
  Gene Symbol: MS4A3
  Gene Name: membrane-spanning 4-domains, subfamily A, member 3 (hematopoietic cell-specific)
  Uniprot ID: Q96HJ5
  ENST ID: ENST00000358152
  CDS Start-End: 129-635
ggaggcttccgttatcgggaaaagatgctgtagtgatcttttctgagtgtctcctacttgcgacaaggtggacttgggaggaaagccgtctgccaaagcctgaagcctccaagccataaacaaccccaatggcctcccacgaagttgataatgcagagctggggtcagcctctgcccatggtaccccaggcagtgaggcgggaccagaagagctgaatacttctgtctaccagcccatagatggatcaccagattatcagaaagcaaaattacaagttcttgggttctgtagttcaggaaccttgtctgttgtagcagggataaaacccacaagaacatggatacagaacagttttggaatgaacattgccagtgctacaattgcactagtggggactgcttttctctcactaaatatagcagttaatatccagtcattaaggagttgtcactcttcatcagagtcaccggacctatgcaattacatgggctccatatcaaatggcatggtgtctctactgctgattctcaccttgctggaattatgcgtaaccatctctaccatagccatgtggtgcaatgcaaactgctgtaattcaagagaggaaatttcctcacctcccaattctgtgtaatcaagaatacctccttaattctgagagcatgaatatttgaccttaaatctccagtgactcagagcttcacccacaaactcaggagaacataagcctgctcgtaaagctcaatccttctatcatggcaccaatcacaagaaccttggacgtttgactgactctatcctttctctcctaactataaatcctatttgtgtgtcgtgggtatggaaggacagatatatttctttaggcattcttggatatctgtaacttctatgatcattactccaaagttgtttccagaaattggttctatttcttcttatccacctactccattgctttatgaggtttaaggaaggaaggcggtataatccctattcaatatattttttctaaaatccaacttctgaccgcccagtaggaagaaaaatgagacattttttccattacagagaaatgcttcttgactttaacatcagcattataaaaagtgtcaaataaaaaattaccatcattatcattaaaataaattttcactgtatttgagatgggagggttaaggctcagggattttatttcagtgaactgctggaactcacacatgccctgatatgtaaatgatgatttatgttggcgagtctgagagcaagcccaaatgtgttcttcaaaggacaatgggaaactgtaaagtagagaactaaagaataaggcctttagaatctgacacatctgggttcaaattctgaaactgtcacttattacctgtatgaacatgggcaaattatctaatctctctgatctatttttcctcatctgtaaaataggtgtaataataacaactactttgtcggttgctctgagggttaaatgaaaataaaaagaaaatgtgaaacagc

SEQ ID NO: 152913 - DNA, 867 bp, Homo sapiens
  Payload ID: 10078
  Gene Symbol: MS4A3
  Gene Name: membrane-spanning 4-domains, subfamily A, member 3 (hematopoietic cell-specific)
  Uniprot ID: Q96HJ5
  ENST ID: ENST00000395032
  CDS Start-End: 230-505
ctctaaagtgttgcataaggcaaagataacgttaagtctgtggaggcttccgttatcgggaaaagatgctgtagtgatcttttctgagtgtctcctacttgcgacaaggtggacttgggaggaaagccgtctgccaaagcctgaagcctccaagttctgtagttcaggaaccttgtctgttgtagcagggataaaacccacaagaacatggatacagaacagttttggaatgaacattgccagtgctacaattgcactagtggggactgcttttctctcactaaatatagcagttaatatccagtcattaaggagttgtcactcttcatcagagtcaccggacctatgcaattacatgggctccatatcaaatggcatggtgtctctactgctgattctcaccttgctggaattatgcgtaaccatctctaccatagccatgtggtgcaatgcaaactgctgtaattcaagagaggaaatttcctcacctcccaattctgtgtaatcaagaatacctccttaattctgagagcatgaatatttgaccttaaatctccagtgactcagagcttcacccacaaactcaggagaacataagcctgctcgtaaagctcaatccttctatcatggcaccaatcacaagaaccttggacgtttgactgactctatcctttctctcctaactataaatcctatttgtgtgtcgtgggtatggaaggacagatatatttctttaggcattcttggatatctgtaacttctatgatcattactccaaagttgtttccagaaattggttctatttcttcttatccacctactccattgctttatgaggtttaaggaaggaaggcggtataatcccta

SEQ ID NO: 152914 - DNA, 746 bp, Homo sapiens
  Payload ID: 10078
  Gene Symbol: MS4A3
  Gene Name: membrane-spanning 4-domains, subfamily A, member 3 (hematopoietic cell-specific)
  ENST ID: ENST00000525686
  CDS Start-End: 54-305
gggaggaaagccgtctgccaaagcctgaagcctccaagccataaacaaccccaatggcctcccacgaagttgataatgcagagctggggtcagcctctgcccatggtaccccaggcagtgaggcgggaccagaagagctgaatacttctgtctaccagcccatagatggatcaccagattatcagaaagcaaaattacaagttcttgggtctattcaacgtgaagaggatgaggatgaagacctttatgataatctacttccacttaatgaatattctgtagttcaggaaccttgtctgttgtagcagggataaaacccacaagaacatggatacagaacagttttggaatgaacattgccagtgctacaattgcactagtggggactgcttttctctcactaaatatagcagttaatatccagtcattaaggagttgtcactcttcatcagagtcaccggacctatgcaattacatgggctccatatcaaatggcatggtgtctctactgctgattctcaccttgctggaattatgcgtaaccatctctaccatagccatgtggtgcaatgcaaactgctgtaattcaagagaggaaatttcctcacctcccaattctgtgtaatcaagaatacctccttaattctgagagcatgaatatttgaccttaaatctccagtgactcagagcttcacccacaaactcaggagaacataagcctgctcgtaaagctcaatccttctatc

SEQ ID NO: 152915 - DNA, 507 bp, Homo sapiens
  Payload ID: 10078
  Gene Symbol: MS4A3
  Gene Name: membrane-spanning 4-domains, subfamily A, member 3 (hematopoietic cell-specific)
  Uniprot ID: Q96HJ5
  ENST ID: ENST00000534744
  CDS Start-End: 1-507
atggcctcccacgaagttgataatgcagagctggggtcagcctctgcccatggtaccccaggcagtgaggcgggaccagaagagctgaatacttctgtctaccagcccatagatggatcaccagattatcagaaagcaaaattacaagttcttgggttctgtagttcaggaaccttgtctgttgtagcagggataaaacccacaagaacatggatacagaacagttttggaatgaacattgccagtgctacaattgcactagtggggactgcttttctctcactaaatatagcagttaatatccagtcattaaggagttgtcactcttcatcagagtcaccggacctatgcaattacatgggctccatatcaaatggcatggtgtctctactgctgattctcaccttgctggaattatgcgtaaccatctctaccatagccatgtggtgcaatgcaaactgctgtaattcaagagaggaaatttcctcacctcccaattctgtgtaa

SEQ ID NO: 152916 - DNA, 1604 bp, Homo sapiens
  Payload ID: 10079
  Gene Symbol: MS4A4A
  Gene Name: membrane-spanning 4-domains, subfamily A, member 4A
  Uniprot ID: Q96JQ5
  ENST ID: ENST00000337908
  CDS Start-End: 91-810
aatgcagatttaaactgagtgaggtgtggagtgggggaagttgattgggtctagaccaaagaactttgaggaacttgcccagagccctgcatgcatcagacctacagcagacattgcaggcctgaagaaagcaccttttctgctgccatgacaaccatgcaaggaatggaacaggccatgccaggggctggccctggtgtgccccagctgggaaacatggctgtcatacattcacatctgtggaaaggattgcaagagaagttcttgaagggagaacccaaagtccttggggttgtgcagattctgactgccctgatgagccttagcatgggaataacaatgatgtgtatggcatctaatacttatggaagtaaccctatttccgtgtatatcgggtacacaatttgggggtcagtaatgtttattatttcaggatccttgtcaattgcagcaggaattagaactacaaaaggcctggtccgaggtagtctaggaatgaatatcaccagctctgtactggctgcatcagggatcttaatcaacacatttagcttggcgttttattcattccatcacccttactgtaactactatggcaactcaaataattgtcatgggactatgtccatcttaatgggtctggatggcatggtgctcctcctaagtgtgctggaattctgcattgctgtgtccctctctgcctttggatgtaaagtgctctgttgtacccctggtggggttgtgttaattctgccatcacattctcacatggcagaaacagcatctcccacaccacttaatgaggtttgaggccaccaaaagatcaacagacaaatgctccagaaatctatgctgactgtgacacaagagcctcacatgagaaattaccagtatccaacttcgatactgatagacttgttgatattattattatatgtaatccaattatgaactgtgtgtgtatagagagataataaattcaaaattatgttctcatttttttccctggaactcaataactcatttcactggctctttatcgagagtactagaagttaaattaataaataatgcatttaatgaggcaacagcacttgaaagtttttcattcatcataagaactttatataaaggcattacattggcaaataaggtttggaagcagaagagcaaaaaaaagatattgttaaaatgaggcctccatgcaaaacacatacttccctcccatttatttaactttttttttctcctacctatggggaccaaagtgctttttccttcaggaagtggagatgcatggccatctccccctccctttttccttctcctgcttttctttccccatagaaagtaccttgaagtagcacagcccgtccttgcatgtgcacgagctatcatttgagtaaaagtatacatggagtaaaaatcatattaagcatcagattcaacttatattttctatttcatcttcttcctttcccttctcccaccttctactgggcataattatatcttaatcatatatggaaatgtgcaacatatggtatttgttaaatacgtttgtttttattgcagagcaaaaataaatcaaattagaagcaata

SEQ ID NO: 152917 - DNA, 1676 bp, Homo sapiens
  Payload ID: 10079
  Gene Symbol: MS4A4A
  Gene Name: membrane-spanning 4-domains, subfamily A, member 4A
  ENST ID: ENST00000343968
  CDS Start-End: 21-227
gaacttgcccagagccctgcatgcatcagacctacagcagacattgcaggcctgaagaaaggtggtcacaagaggggtggaacattcctgcaaatggtttcaatatatgcagatgtctcaatataggaatgaaattacgtctttggaacaacttaaataagtcaaatatacttggagctttaaaaattaaaaggagagagattcgagcaccttttctgctgccatgacaaccatgcaaggaatggaacaggccatgccaggggctggccctggtgtgccccagctgggaaacatggctgtcatacattcacatctgtggaaaggattgcaagagaagttcttgaagggagaacccaaagtccttggggttgtgcagattctgactgccctgatgagccttagcatgggaataacaatgatgtgtatggcatctaatacttatggaagtaaccctatttccgtgtatatcgggtacacaatttgggggtcagtaatgtttattatttcaggatccttgtcaattgcagcaggaattagaactacaaaaggcctggtccgaggtagtctaggaatgaatatcaccagctctgtactggctgcatcagggatcttaatcaacacatttagcttggcgttttattcattccatcacccttactgtaactactatggcaactcaaataattgtcatgggactatgtccatcttaatgggtctggatggcatggtgctcctcctaagtgtgctggaattctgcattgctgtgtccctctctgcctttggatgtaaagtgctctgttgtacccctggtggggttgtgttaattctgccatcacattctcacatggcagaaacagcatctcccacaccacttaatgaggtttgaggccaccaaaagatcaacagacaaatgctccagaaatctatgctgactgtgacacaagagcctcacatgagaaattaccagtatccaacttcgatactgatagacttgttgatattattattatatgtaatccaattatgaactgtgtgtgtatagagagataataaattcaaaattatgttctcatttttttccctggaactcaataactcatttcactggctctttatcgagagtactagaagttaaattaataaataatgcatttaatgaggcaacagcacttgaaagtttttcattcatcataagaactttatataaaggcattacattggcaaataaggtttggaagcagaagagcaaaaaaaagatattgttaaaatgaggcctccatgcaaaacacatacttccctcccatttatttaactttttttttctcctacctatggggaccaaagtgctttttccttcaggaagtggagatgcatggccatctccccctccctttttccttctcctgcttttctttccccatagaaagtaccttgaagtagcacagcccgtccttgcatgtgcacgagctatcatttgagtaaaagtatacatggagtaaaaatcatattaagcatcagattcaacttatattttctatttcatcttcttcctttcccttctcccaccttctactgggcataattatatcttaatcatatatggaaatgtgcaacatatggtatttgttaaatacgtttgtttttattgcagagcaaaaataaatcaaattagaagc

SEQ ID NO: 152918 - DNA, 698 bp, Homo sapiens
  Payload ID: 10079
  Gene Symbol: MS4A4A
  Gene Name: membrane-spanning 4-domains, subfamily A, member 4A
  Uniprot ID: Q96JQ5
  ENST ID: ENST00000532114
  CDS Start-End: 136-696
attctcagcacagcctttaaggttccaaacatctgctagaagaggaatgcagatttaaactgagtgaggtgtggagtgggggaagttgattgggtctagaccaaagaactttgaggaacttgcccagagccctgcatgcatcagacctacagcagacattgcaggcctgaagaaagcaccttttctgctgccatgacaaccatgcaaggaatggaacaggccatgccaggggctggccctggtgtgccccagctgggaaacatggctgtcatacattcacatctgtggaaaggattgcaagagaagttcttgaagggagaacccaaagtccttggggttgtgcagattctgactgccctgatgagccttagcatgggaataacaatgatgtgtatggcatctaatacttatggaagtaaccctatttccgtgtatatcgggtacacaatttgggggtcagtaatgtttattatttcaggatccttgtcaattgcagcaggaattagaactacaaaaggcctgggtctggatggcatggtgctcctcctaagtgtgctggaattctgcattgctgtgtccctctctgcctttggatgtaaagtgctctgttgtacccctggtggggttgtgttaattctgccatcacattctcacatggcagaaacagcatctcccacaccacttaatgaggtttgagg

SEQ ID NO: 152919 - DNA, 658 bp, Homo sapiens
  Payload ID: 10079
  Gene Symbol: MS4A4A
  Gene Name: membrane-spanning 4-domains, subfamily A, member 4A
  ENST ID: ENST00000529950
  CDS Start-End: 1-108
acctacagcagacattgcaggcctgaagaaaggcttgtatcaaggatatctacttccttctttatggactccaatggaggacttattcagagactgattgccttctaaatatgtgtctttttggtgatttctcctttactactgacttcgatgattctcagaactatacttttccagggaagtgacagttatcaactgatgtatttaattcccaggattataaacacaccttttctgctgccatgacaaccatgcaaggaatggaacaggccatgccaggggctggccctggtgtgccccagctgggaaacatggctgtcatacattcacatctgtggaaaggattgcaagagaagttcttgaagggagaacccaaagtccttggggttgtgcagattctgactgccctgatgagccttagcatgggaataacaatgatgtgtatggcatctaatacttatggaagtaaccctatttccgtgtatatcgggtacacaatttgggggtcagtaatgtttattatttcaggatccttgtcaattgcagcaggaattagaactacaaaaggcctggtccgaggtagtctaggaatgaatatcaccagctctgtactggctgcatcagggatcttaatcaacacatttagcttggcgtttta

SEQ ID NO: 152920 - DNA, 851 bp, Homo sapiens
  Payload ID: 10079
  Gene Symbol: MS4A4A
  Gene Name: membrane-spanning 4-domains, subfamily A, member 4A
  ENST ID: ENST00000527056
  CDS Start-End: 8-214
gccctgcatgcatcagacctacagcagacattgcaggcctgaagaaaggtggtcacaagaggggtggaacattcctgcaaatggtttcaatatatgcagatgtctcaatataggaatgaaattacgtctttggaacaacttaaataagtcaaatatacttggagctttaaaaattaaaaggagagagattcgagcaccttttctgctgccatgacaaccatgcaaggaatggaacaggccatgccaggggctggccctggtgtgccccagctgggaaacatggctgtcatacattcacatctgtggaaaggattgcaagagaagttcttgaagggagaacccaaagtccttggggccacttctctgagctcatgagaaaaaaagagaaataattgtggtagaagtaacatcgtaggtatcagaaaagcacctctgggctggttctggcatactccttttaaccttgaaattattggcaatgatagacgtcgcgagagataatattggttgtgcagattctgactgccctgatgagccttagcatgggaataacaatgatgtgtatggcatctaatacttatggaagtaaccctatttccgtgtatatcgggtacacaatttgggggtcagtaatgtttattatttcaggatccttgtcaattgcagcaggaattagaactacaaaaggcctggtccgaggtagtctaggaatgaatatcaccagctctgtactggctgcatcagggatcttaatcaacacatttagcttggcgttttattcattccatcacccttactgtaactactatggcaactcaaataattgtcatgggactatgtccatcttaatg

SEQ ID NO: 152921 - DNA, 479 bp, Homo sapiens
  Payload ID: 10080
  Gene Symbol: MS4A4E
  Gene Name: membrane-spanning 4-domains, subfamily A, member 4E
  Uniprot ID: Q96PG1
  ENST ID: ENST00000398984
  CDS Start-End: 1-399
atgacaaccatgcaaggaatggaacagaccactccaggggctggccctgatgtgccccagctgggaaacatagatgtcatacattcatatctgtgtaaaggattgcaagagaagttcttcaagaggaaacccaaagtccttggggttgtgcggattctgattgccttgatgagccttagcatgggaataataatgatgtgtgttgcatttagttcttatgaagaacatcccatttttgtgtatgttgcgtacacaatttgggggtcagtgatgtatccttatcagttgcagcaggaattagaacaacaaaaggtctggaattatctgaagaatttaagctggagaataatgggatcatatttgtgttttggcgagagatcagagttgaaaccactataaggagacaagttagaagactattgaaataagataaaggttggaggtagtctaggaaagaatatcaccagttcagtcttggc

SEQ ID NO: 152922 - DNA, 522 bp, Homo sapiens
  Payload ID: 10080
  Gene Symbol: MS4A4E
  Gene Name: membrane-spanning 4-domains, subfamily A, member 4E
  ENST ID: ENST00000398986
  CDS Start-End: 17-520
caccttttctgctgccatgacaaccatgcaaggaatggaacagaccactccaggggctggccctgatgtgccccagctgggaaacatagatgtcatacattcatatctgtgtaaaggattgcaagagaagttcttcaagaggaaacccaaagtccttggggttgtgcggattctgattgccttgatgagccttagcatgggaataataatgatgtgtgttgcatttagttcttatgaagaacatcccatttttgtgtatgttgcgtacacaatttgggggtcagtgatgtttattatttcagtatccttatcagttgcagcaggaattagaacaacaaaaggtctgggtacggatggcatggtgctcctcttaagtgtgctggaattctgcattgctgtggccctctctgcctttggatgtaaagtgctttgttgtagccccagtgagtttgtgctaattacaccatcaaattctcacatggcagaaatagcatctcccacaccacttaagacagtttgatg

SEQ ID NO: 152923 - DNA, 350 bp, Homo sapiens
  Payload ID: 10080
  Gene Symbol: MS4A4E
  Gene Name: membrane-spanning 4-domains, subfamily A, member 4E
  Uniprot ID: Q96PG1
  ENST ID: ENST00000425663
  CDS Start-End: 1-270
atgacaaccatgcaaggaatggaacagaccactccaggggctggccctgatgtgccccagctgggaaacatagatgtcatacattcatatctgtgtaaaggattgcaagagaagttcttcaagaggaaacccaaagtccttgggtatccttatcagttgcagcaggaattagaacaacaaaaggtctggaattatctgaagaatttaagctggagaataatgggatcatatttgtgttttggcgagagatcagagttgaaaccactataaggagacaagttagaagactattgaaataagataaaggttggaggtagtctaggaaagaatatcaccagttcagtcttggc

SEQ ID NO: 152924 - DNA, 1125 bp, Homo sapiens
  Payload ID: 10080
  Gene Symbol: MS4A4E
  Gene Name: membrane-spanning 4-domains, subfamily A, member 4E
  ENST ID: ENST00000532442
  CDS Start-End: 148-360
agtgcagatttaaactgagtgaggtgtggagtgggggaagctgactgtgtctggaacaaagaactttgaggaacttgcccagagccctgcactcatcagacctgcagcagacattgcaggcctgaagaaagcaccttttctgctgccatgacaaccatgcaaggaatggaacagaccactccaggggctggccctgatgtgccccagctgggaaacatagatgtcatacattcatatctgtgtaaaggattgcaagagaagttcttcaagaggaaacccaaagtccttggggttttgtgtggacataagttttcaactcattcgggttgtgcggattctgattgccttgatgagccttagcatgggaataataatgatgtgtgttgcatttagttcttatgaagaacatcccatttttgtgtatgttgcgtacacaatttgggggtcagtgatgtatccttatcagttgcagcaggaattagaacaacaaaaggtctgtatttatcgagtgctcaatggtgcccaggctggagtgcagtggcgtgatctcggctccctacaacctccacctcccagccgcctgccttggcctcccaaagtgccgagagtgcagcctctgcccggccgccaccccgtctgggaagtgaggagcgtctctgcctggccgcctatcgtctgggacgtgaggagcccctctgcctggctgcccagtctggaaagtgaggagcgtctctgcccggctgccatcccatctaggaagtggggagcgcctcttcccggccaccatcccatctgggaggtgaggagtgtctccgcccggccgcccatcttctgagatgtggggagcgcctttgccccaccgccctgtctgggatgtgaggagcacctctgcccggccgcgaccccgtctgggaggtgaggagcgtctctgcccagccgccccatctgagaagggaggagaccctccgcctggcaaccgccccgtctgagaagtgaggagcccctccgcccggcagccaccccgtctgggaagtgaggagcgtctccgccaggcagccaccccgtccgggagggaggtgggggtcagcccccgccaggccagctgccccatccgggagggaggtg

SEQ ID NO: 152925 - DNA, 460 bp, Homo sapiens
  Payload ID: 10080
  Gene Symbol: MS4A4E
  Gene Name: membrane-spanning 4-domains, subfamily A, member 4E
  Uniprot ID: Q96PG1
  ENST ID: ENST00000526086
  CDS Start-End: 1-333
atgacaaccatgcaaggaatggaacagaccactccaggggctggccctgatgtgccccagctgggaaacatagatgtcatacattcatatctgtgtaaaggattgcaagagaagttcttcaagaggaaacccaaagtccttggggttttgtgtggacataagttttcaactcattcggtatccttatcagttgcagcaggaattagaacaacaaaaggtctggaattatctgaagaatttaagctggagaataatgggatcatatttgtgttttggcgagagatcagagttgaaaccactataaggagacaagttagaagactattgaaataagataaaggtagacagcagtgtaaagtaattaacagagatatatctgaggatgatgttggattgcttaattaattttcatttctttctaggttggaggtagtctaggaaagaatatcaccagttcagt

SEQ ID NO: 152926 - DNA, 384 bp, Homo sapiens
  Payload ID: 10080
  Gene Symbol: MS4A4E
  Gene Name: membrane-spanning 4-domains, subfamily A, member 4E
  ENST ID: ENST00000526153
  CDS Start-End: 1-202
gcaaggaatggaacagaccactccaggggctggccctgatgtgccccagctgggaaacatagatgtcatacattcatatctgtgtaaaggattgcaagagaagttcttcaagaggaaacccaaagtccttggggttttgtgtggacataagttttcaactcattcgggttgtgcggattctgattgccttgatgagccttagcatgggaataataatgatgtgtgttgcatttagttcttatgaagaacatcccatttttgtgtatgttgcgtacacaatttgggggtcagtgatgtatccttatcagttgcagcaggaattagaacaacaaaaggtctggttggaggtagtctaggaaagaatatcaccagttcagtcttggc

SEQ ID NO: 152927 - DNA, 555 bp, Homo sapiens
  Payload ID: 10080
  Gene Symbol: MS4A4E
  Gene Name: membrane-spanning 4-domains, subfamily A, member 4E
  Uniprot ID: Q96PG1
  ENST ID: ENST00000528394
  CDS Start-End: 1-399
atgacaaccatgcaaggaatggaacagaccactccaggggctggccctgatgtgccccagctgggaaacatagatgtcatacattcatatctgtgtaaaggattgcaagagaagttcttcaagaggaaacccaaagtccttggggttgtgcggattctgattgccttgatgagccttagcatgggaataataatgatgtgtgttgcatttagttcttatgaagaacatcccatttttgtgtatgttgcgtacacaatttgggggtcagtgatgtatccttatcagttgcagcaggaattagaacaacaaaaggtctggaattatctgaagaatttaagctggagaataatgggatcatatttgtgttttggcgagagatcagagttgaaaccactataaggagacaagttagaagactattgaaataagataaaggtagacagcagtgtaaagtaattaacagagatatatctgaggatgatgttggattgcttaattaattttcatttctttctaggttggaggtagtctaggaaagaatatcaccagttcagt

SEQ ID NO: 152928 - DNA, 722 bp, Homo sapiens
  Payload ID: 10081
  Gene Symbol: MS4A5
  Gene Name: membrane-spanning 4-domains, subfamily A, member 5
  Uniprot ID: Q9H3V2
  ENST ID: ENST00000300190
  CDS Start-End: 87-689
caggcagcctcagcacaagaaaagaacatggtctagactgaagtaccaactaaatcatctcctttcaaattatcaccgacaccatcatggattcaagcaccgcacacagtccggtgtttctggtatttcctccagaaatcactgcttcagaatatgagtccacagaactttcagccacgaccttttcaactcaaagccccttgcaaaaattatttgctagaaaaatgaaaatcttagggactatccagatcctgtttggaattatgaccttttcttttggagttatcttccttttcaccttgttaaaaccatatccaaggtttccctttatatttctttcaggatatccattctggggctctgttttgttcattaattctggagccttcctaattgcagtgaaaagaaaaaccacagaaactctgataatattgagccgaataatgaattttcttagtgccctgggagcaatagctggaatcattctcctcacatttggtttcatcctagatcaaaactacatttgtggttattctcaccaaaatagtcagtgtaaggctgttactgtcctgttcttgggaattttgattacattgatgactttcagcattattgaattattcatttctctgcctttctcaattttggggtgccactcagaggattgtgattgtgaacaatgttgttgactagcactgtgagaataaagatgtgttaaaata

SEQ ID NO: 152929 - DNA, 279 bp, Homo sapiens
  Payload ID: 10081
  Gene Symbol: MS4A5
  Gene Name: membrane-spanning 4-domains, subfamily A, member 5
  ENST ID: ENST00000528093
  CDS Start-End: 1-103
aactcaaagccccttgcaaaaattatttgctagaaaaatgaaaatcttaggggatatccattctggggctctgttttgttcattaattctggagccttcctaattgcagtgaaaagaaaaaccacagaaactctgggaattttgattacattgatgactttcagcattattgaattattcatttctctgcctttctcaattttggggtgccactcagaggattgtgattgtgaacaatgttgttgactagcactgtgagaataaagatgtgttaaaata

SEQ ID NO: 152930 - DNA, 403 bp, Homo sapiens
  Payload ID: 10081
  Gene Symbol: MS4A5
  Gene Name: membrane-spanning 4-domains, subfamily A, member 5
  ENST ID: ENST00000528905
  CDS Start-End: 1-370
actttcagccacgaccttttcaactcaaagccccttgcaaaaattatttgctagaaaaatgaaaatcttagggactatccagatcctgtttggaattatgaccttttcttttggagttatcttccttttcaccttgttaaaaccatatccaaggtttccctttatatttctttcaggatatccattctggggctctgttttgttcattaattctggagccttcctaattgcagtgaaaagaaaaaccacagaaactctgggaattttgattacattgatgactttcagcattattgaattattcatttctctgcctttctcaattttggggtgccactcagaggattgtgattgtgaacaatgttgttgactagcactgtgagaataaagatgtgttaaaata

SEQ ID NO: 152931 - DNA, 480 bp, Homo sapiens
  Payload ID: 10081
  Gene Symbol: MS4A5
  Gene Name: membrane-spanning 4-domains, subfamily A, member 5
  ENST ID: ENST00000531403
  CDS Start-End: 33-236
tcatctcctttcaaattatcaccgacaccatcatggattcaagcaccgcacacagtccggtgtttctggtatttcctccagaaatcactgcttcagaatatgagtccacagaactttcagccacgaccttttcaactcaaagccccttgcaaaaattatttgctagaaaaatgaaaatcttaggggatatccattctggggctctgttttgttcattaattctggagccttcctaattgcagtgaaaagaaaaaccacagaaactctgatcaaaactacatttgtggttattctcaccaaaatagtcagtgtaaggctgttactgtcctgttcttgggaattttgattacattgatgactttcagcattattgaattattcatttctctgcctttctcaattttggggtgccactcagaggattgtgattgtgaacaatgttgttgactagcactgtgagaataaagatgtgttaaaata

SEQ ID NO: 152932 - DNA, 584 bp, Homo sapiens
  Payload ID: 10081
  Gene Symbol: MS4A5
  Gene Name: membrane-spanning 4-domains, subfamily A, member 5
  ENST ID: ENST00000533885
  CDS Start-End: 71-415
aagaaaagaacatggtctagactgaagtaccaactaaatcatctcctttcaaattatcaccgacaccatcatggattcaagcaccgcacacagtccggtgtttctggtatttcctccagaaatcactgcttcagaatatgagtccacagaactttcagccacgaccttttcaactcaaagccccttgcaaaaattatttgctagaaaaatgaaaatcttagggactatccagatcctgtttggaattatgaccttttcttttggagttatcttccttttcaccttgttaaaaccatatccaaggtttccctttatatttctttcaggatatccattctggggctctgttttgttcattaattctggagccttcctaattgcagtgaaaagaaaaaccacagaaactctgaaataaatgaggggggaggagccaagatggccaaataggaacagctccggtctacagctcccagcgtgagagacgcagaagacgggtgatttctgcatttccatctgagtactgtgcttgatgaccctgcagctccagactagactaaaaagagaggggacacaagggaacttga

SEQ ID NO: 152933 - DNA, 1736 bp, Homo sapiens
  Payload ID: 10082
  Gene Symbol: MS4A6A
  Gene Name: membrane-spanning 4-domains, subfamily A, member 6A
  Uniprot ID: Q9H2W1
  ENST ID: ENST00000426738
  CDS Start-End: 474-1235
attccgaagggttctgtgctaggaaccttacacgtgttgtctcacataatccttaaaactcagaaatgattttaaattaaatagcacagagaggaaaactgactggagagggagcctttgcttaggtaggcaactttaactggtttattagcacattcccctgaagggaaagggggtgtgattgctcctgaagagaccaaagagactgggctcctttttaatcaaagctcaggaggagagctgcattccactgtttcacagatgctgtgagggtgacaaagatgcagggcacccactggaaacacagacggcactctgcgaaagaggaaggggcgccaggagcttggattagaaaactgaagcttcaagaacagacttgcctaacaacaggaaacttgtatgtctcgaagtggcaattcacacataaggctccatgactcctgaactctcacaaatattagttggctcttttcatggttttactgaagttgctagaagtttacagaaaaggaagtgcaggaacatttcacaaatctacaatctttggcaacaccatcatgacatcacaacctgttcccaatgagaccatcatagtgctcccatcaaatgtcatcaacttctcccaagcagagaaacccgaacccaccaaccaggggcaggatagcctgaagaaacatctacacgcagaaatcaaagttattgggactatccagatcttgtgtggcatgatggtattgagcttggggatcattttggcatctgcttccttctctccaaattttacccaagtgacttctacactgttgaactctgcttacccattcataggaccctttttttttatcatctctggctctctatcaatcgccacagagaaaaggttaaccaagcttttggtgcatagcagcctggttggaagcattctgagtgctctgtctgccctggtgggtttcattatcctgtctgtcaaacaggccaccttaaatcctgcctcactgcagtgtgagttggacaaaaataatataccaacaagaagttatgtttcttacttttatcatgattcactttataccacggactgctatacagccaaagccagtctggctggaactctctctctgatgctgatttgcactctgctggaattctgcctagctgtgctcactgctgtgctgcggtggaaacaggcttactctgacttccctggggtgagtgtgctggccggcttcacttaaccttgcctagtgtatcttatccctgcactgtgttgagtatgtcaccaagagtggtagaaggaacaatcagtcagtcatgagatacacatgggagggcatttgcattgtgatggaagacagagaagaaaagcagatggcaattgagtagctgataagctgaaaattcactggatatgaaaatagttaatcatgagaaatcaactgattcaatcttcctattttgtcagcgaagggaatgagactctgggaagttaaatgactggcctggcattatgctatgagtttgtgcctttgctgaggacactagaacctggcttgcctcccttataagcagaaacaatttctgccacaaccactagtctctttaatagtattgacttggtaaagggcatttacacacgtaactggatccagtgaatgtcttatgctctgcatttgcccctggtgatcttaaaattcgtttgcctttttaaagctatattaaaaatgtattgttgaatc

SEQ ID NO: 152934 - DNA, 863 bp, Homo sapiens
  Payload ID: 10082
  Gene Symbol: MS4A6A
  Gene Name: membrane-spanning 4-domains, subfamily A, member 6A
  Uniprot ID: Q9H2W1
  ENST ID: ENST00000420732
  CDS Start-End: 78-614
gagaaaccagagttaaaacctctttggagcttctgaggactcagctggaaccaacgggcacagttggcaacaccatcatgacatcacaacctgttcccaatgagaccatcatagtgctcccatcaaatgtcatcaacttctcccaagcagagaaacccgaacccaccaaccaggggcaggatagcctgaagaaacatctacacgcagaaatcaaagttattgggactatccagatcttgtgtggcatgatggtattgagcttggggatcattttggcatctgcttccttctctccaaattttacccaagtgacttctacactgttgaactctgcttacccattcataggaccctttttttttatcatctctggctctctatcaatcgccacagagaaaaggttaaccaagcttttggtgcatagcagcctggttggaagcattctgagtgctctgtctgccctggtgggtttcattatcctgtctgtcaaacaggccaccttaaatcctgcctcactgcagtggaactctctctctgatgctgatttgcactctgctggaattctgcctagctgtgctcactgctgtgctgcggtggaaacaggcttactctgacttccctgggagtgtacttttcctgcctcacagttacattggtaattctggcatgtcctcaaaaatgactcatgactgtggatatgaagaactattgacttcttaagaaaaaagggagaaatattaatcagaaagttgattcttatgataatatggaaaagttaaccattatagaaaagcaaagcttgagtttcctaaatgtaagcttttaaagtaatgaacattaaaaaaaaccattatttcactgtc

SEQ ID NO: 152935 - DNA, 1284 bp, Homo sapiens
  Payload ID: 10082
  Gene Symbol: MS4A6A
  Gene Name: membrane-spanning 4-domains, subfamily A, member 6A
  Uniprot ID: Q9H2W1
  ENST ID: ENST00000412309
  CDS Start-End: 19-780
tattagttggctcttttcatggttttactgaagttgctagaagtttacagaaaaggaagtgcaggaacatttcacaaatctacaatctttggcaacaccatcatgacatcacaacctgttcccaatgagaccatcatagtgctcccatcaaatgtcatcaacttctcccaagcagagaaacccgaacccaccaaccaggggcaggatagcctgaagaaacatctacacgcagaaatcaaagttattgggactatccagatcttgtgtggcatgatggtattgagcttggggatcattttggcatctgcttccttctctccaaattttacccaagtgacttctacactgttgaactctgcttacccattcataggaccctttttttttatcatctctggctctctatcaatcgccacagagaaaaggttaaccaagcttttggtgcatagcagcctggttggaagcattctgagtgctctgtctgccctggtgggtttcattatcctgtctgtcaaacaggccaccttaaatcctgcctcactgcagtgtgagttggacaaaaataatataccaacaagaagttatgtttcttacttttatcatgattcactttataccacggactgctatacagccaaagccagtctggctggaactctctctctgatgctgatttgcactctgctggaattctgcctagctgtgctcactgctgtgctgcggtggaaacaggcttactctgacttccctggggtgagtgtgctggccggcttcacttaaccttgcctagtgtatcttatccctgcactgtgttgagtatgtcaccaagagtggtagaaggaacaatcagtcagtcatgagatacacatgggagggcatttgcattgtgatggaagacagagaagaaaagcagatggcaattgagtagctgataagctgaaaattcactggatatgaaaatagttaatcatgagaaatcaactgattcaatcttcctattttgtcagcgaagggaatgagactctgggaagttaaatgactggcctggcattatgctatgagtttgtgcctttgctgaggacactagaacctggcttgcctcccttataagcagaaacaatttctgccacaaccactagtctctttaatagtattgacttggtaaagggcatttacacacgtaactggatccagtgaatgtcttatgctctgcatttgcccctggtgatcttaaaattcgtttgcctttttaaagctatattaaaaatgtattgttgaatcaaa

SEQ ID NO: 152936 - DNA, 1136 bp, Homo sapiens
  Payload ID: 10082
  Gene Symbol: MS4A6A
  Gene Name: membrane-spanning 4-domains, subfamily A, member 6A
  Uniprot ID: Q9H2W1
  ENST ID: ENST00000532169
  CDS Start-End: 515-940
cactgtttcacagatgctgtgagggtgacaaagatgcagggcacccactggaaacacagacggcactctgcgaaagaggaaggggcgccaggagcttgggtgagcaaggttggaggtgattctgcccctctccccaggctttctgtattagaaaactgaagcttcaagaacagacttgcctaacaacaggaaacttgtatgtctcgaagtggcaattcacacataaggctccatgactcctgaactctcacaaatattagttggctcttttcatggttttactgaagttgctagaagtttacagaaaaggaagtgcaggaacatttcacaaatctacaatctgtgagtatcacatcctgtatagctgtaaacactggaataaggaagggctgatgactttcagaagatgaaggtaagtagaaaccgttgatgggactgagaaaccagagttaaaacctctttggagcttctgaggactcagctggaaccaacgggcacagttggcaacaccatcatgacatcacaacctgttcccaatgagaccatcatagtgctcccatcaaatgtcatcaacttctcccaagcagagaaacccgaacccaccaaccaggggcaggatagcctgaagaaacatctacacgcagaaatcaaagttattgggactatccagatcttgtgtggcatgatggtattgagcttggggatcattttggcatctgcttccttctctccaaattttacccaagtgacttctacactgttgaactctgcttacccattcataggacccttttttgtgagtagagtttctgaggagggcaggatggggcaaagaggggaggaagatgccaatagcttagacttcccacctgccagcttgctatgtttgatctgccaggagcaaggagtcaacggtgaatcttgttctcctgtcgggtaggatgacaggggttgcttgattttagatcaatttcttatcagactcaaataaacatttcttttgaagatcatcttattcttcacattatcatcttgagctatgatgaagctagtgacttctctccaggtttaggcgaaaaaaaaatccatgaattaggataaagttgggaaggaacattttatacaaaaaaaaaaaa

SEQ ID NO: 152937 - DNA, 1806 bp, Homo sapiens
  Payload ID: 10082
  Gene Symbol: MS4A6A
  Gene Name: membrane-spanning 4-domains, subfamily A, member 6A
  Uniprot ID: Q9H2W1
  ENST ID: ENST00000528851
  CDS Start-End: 142-819
ctggaataaggaagggctgatgactttcagaagatgaaggtaagtagaaaccgttgatgggactgagaaaccagagttaaaacctctttggagcttctgaggactcagctggaaccaacgggcacagttggcaacaccatcatgacatcacaacctgttcccaatgagaccatcatagtgctcccatcaaatgtcatcaacttctcccaagcagagaaacccgaacccaccaaccaggggcaggatagcctgaagaaacatctacacgcagaaatcaaagttattgggactatccagatcttgtgtggcatgatggtattgagcttggggatcattttggcatctgcttccttctctccaaattttacccaagtgacttctacactgttgaactctgcttacccattcataggaccctttttttttatcatctctggctctctatcaatcgccacagagaaaaggttaaccaagcttttggtgcatagcagcctggttggaagcattctgagtgctctgtctgccctggtgggtttcattatcctgtctgtcaaacaggccaccttaaatcctgcctcactgcagtgtgagttggacaaaaataatataccaacaagaagttatgtttcttacttttatcatgattcactttataccacggactgctatacagccaaagccagtctggctggaactctctctctgatgctgatttgcactctgctggaattctgcctagctgtgctcactgctgtgctgcggtggaaacaggcttactctgacttccctggggtgagtgtgctggccggcttcacttaaccttgcctagtgtatcttatccctgcactgtgttgagtatgtcaccaagagtggtagaaggaacaatcagtcagtcatgagatacacatgggagggcatttgcattgtgatggaagacagagaagaaaagcagatggcaattgagtagctgataagctgaaaattcactggatatgaaaatagttaatcatgagaaatcaactgattcaatcttcctattttgtcagcgaagggaatgagactctgggaagttaaatgactggcctggcattatgctatgagtttgtgcctttgctgaggacactagaacctggcttgcctcccttataagcagaaacaatttctgccacaaccactagtctctttaatagtattgacttggtaaagggcatttacacacgtaactggatccagtgaatgtcttatgctctgcatttgcccctggtgatcttaaaattcgtttgcctttttaaagctatattaaaaatgtattgttgaatcaaacccctatggacttatggctttatttaactgaattaaaaagccttgatttatccaaaattgtattatagagtgtagaatgaatactagggtgataaattgcaattatttgaagaacctggtgatatgctctacttatcttggattagctaagaattctatgtatacagttggaaaaatggcatatatacatctatcttgaacctgattgaagtctgaagacctaacatattttgtttcttctagagtgtacttttcctgcctcacagttacattggtaattctggcatgtcctcaaaaatgactcatgactgtggatatgaagaactattgacttcttaagaaaaaagggagaaatattaatcagaaagttgattcttatgataatatggaaaagttaaccattatagaaaagcaaagcttgagtttcctaaatgtaagcttttaaagtaatgaacattaaaaaaaaccattatttcactgtca

SEQ ID NO: 152938 - DNA, 567 bp, Homo sapiens
  Payload ID: 10082
  Gene Symbol: MS4A6A
  Gene Name: membrane-spanning 4-domains, subfamily A, member 6A
  ENST ID: ENST00000531531
  CDS Start-End: 337-567
cattcccctgaagggaaagggggtgtgattgctcctgaagagaccaaagagactgggctcctttttaatcaaagctcaggaggagagctgcattccactgtttcacagatgctgtgagggtgacaaagatgcagggcacccactggaaacacagacggcactctgcgaaagaggaaggggcgccaggagcttgggtgagcaaggttggagattagaaaactgaagcttcaagaacagacttgcctaacaacaggaaacttgtatgtctcgaagtggcaattcacacataaggctccatgactcctgaactctcacaaatattagttggctcttttcatggttttactgaagttgctagaagtttacagaaaaggaagtgcaggaacatttcacaaatctacaatctttggcaacaccatcatgacatcacaacctgttcccaatgagaccatcatagtgctcccatcaaatgtcatcaacttctcccaagcagagaaacccgaacccaccaaccaggggcaggatagcctgaagaaacatctacacgcagaaatcaaagttattggg

SEQ ID NO: 152939 - DNA, 577 bp, Homo sapiens
  Payload ID: 10082
  Gene Symbol: MS4A6A
  Gene Name: membrane-spanning 4-domains, subfamily A, member 6A
  ENST ID: ENST00000534596
  CDS Start-End: 275-577
tccactgtttcacagatgctgtgagggtgacaaagatgcagggcacccactggaaacacagacggcactctgcgaaagaggaaggggcgccaggagcttgggtgagcaaggttggaggtgattctgcccctctccccaggctttctgtattagaaaactgaagcttcaagaacagacttgcctaacaacaggaaacttgtatgtctcgaagtggcaattcacacataaggctccatgactcctgaactctcacaaatattagttggctcttttcatggttttactgaagttgctagaagtttacagaaaaggaagtgcaggaacatttcacaaatctacaatctttggcaacaccatcatgacatcacaacctgttcccaatgagaccatcatagtgctcccatcaaatgtcatcaacttctcccaagcagagaaacccgaacccaccaaccaggggcaggatagcctgaagaaacatctacacgcagaaatcaaagttattgggactatccagatcttgtgtggcatgatggtattgagcttggggatcattttggcatctgcttccttctctcca

SEQ ID NO: 152940 - DNA, 790 bp, Homo sapiens
  Payload ID: 10082
  Gene Symbol: MS4A6A
  Gene Name: membrane-spanning 4-domains, subfamily A, member 6A
  ENST ID: ENST00000527254
  CDS Start-End: 105-467
aggtaagtagaaaccgttgatgggactgagaaaccagagttaaaacctctttggagcttctgaggactcagctggaaccaacgggcacagttggcaacaccatcatgacatcacaacctgttcccaatgagaccatcatagtgctcccatcaaatgtcatcaacttctcccaagcagagaaacccgaacccaccaaccaggggcaggatagcctgaagaaacatctacacgcagaaatcaaagttattgggactatccagatcttgtgtggcatgatggtattgagcttggggatcattttggcatctgcttccttctctccaaattttacccaagtgacttctacactgttgaactctgcttacccattcataggacccttttttagtatggtgatgaatttttgggtggtgatgatgagtttatcatctctggctctctatcaatcgccacagagaaaaggttaaccaagcttttggtgcatagcagcctggttggaagcattctgagtgctctgtctgccctggtgggtttcattatcctgtctgtcaaacaggccaccttaaatcctgcctcactgcagtgtgagttggacaaaaataatataccaacaagaagttatgtttcttacttttatcatgattcactttataccacggactgctatacagccaaagccagtctggctggaactctctctctgatgctgatttgcactctgctggaattctgcctagctgtgctcactgctgtgctgcggtggaaacaggcttactctgacttccctggg

SEQ ID NO: 152941 - DNA, 1160 bp, Homo sapiens
  Payload ID: 10082
  Gene Symbol: MS4A6A
  Gene Name: membrane-spanning 4-domains, subfamily A, member 6A
  ENST ID: ENST00000529054
  CDS Start-End: 219-1049
gtgttgtctcacataatccttaaaactcagaaatgattttaaattaaatagcacagagaggaaaactgactggagagggagcctttgcttagattagaaaactgaagcttcaagaacagacttgcctaacaacaggaaacttgtatgtctcgaagtggcaattcacacataaggctccatgactcctgaactctcacaaatattagttggctcttttcatggttttactgaagttgctagaagtttacagaaaaggaagtgcaggaacatttcacaaatctacaatctttggcaacaccatcatgacatcacaacctgttcccaatgagaccatcatagtgctcccatcaaatgtcatcaacttctcccaagcagagaaacccgaacccaccaaccaggggcaggatagcctgaagaaacatctacacgcagaaatcaaagttattgggactatccagatcttgtgtggcatgatggtattgagcttggggatcattttggcatctgcttccttctctccaaattttacccaagtgacttctacactgttgaactctgcttacccattcataggaccctttttttttatcatctctggctctctatcaatcgccacagagaaaaggttaaccaagcttttggtgcatagcagcctggttggaagcattctgagtgctctgtctgccctggtgggtttcattatcctgtctgtcaaacaggccaccttaaatcctgcctcactgcagtgtgagttggacaaaaataatataccaacaagaagttatgtttcttacttttatcatgattcactttataccacggactgctatacagccaaagccagtctggctggaactctctctctgatgctgatttgcactctgctggaattctgcctagctgtgctcactgctgtgctgcggtggaaacaggcttactctgacttccctgggagtgtacttttcctgcctcacagttacattggtaattctggcatgtcctcaaaaatgactcatgactgtggatatgaagaactattgacttcttaagaaaaaagggagaaatattaatcagaaagttgattcttatgataatatggaaaagttaaccattatagaaaagcaaagcttgagtttcctaaatgtaagcttttaaagtaa

SEQ ID NO: 152942 - DNA, 586 bp, Homo sapiens
  Payload ID: 10082
  Gene Symbol: MS4A6A
  Gene Name: membrane-spanning 4-domains, subfamily A, member 6A
  ENST ID: ENST00000533989
  CDS Start-End: 1-341
tctcccaagcagagaaacccgaacccaccaaccaggggcaggatagcctgaagaaacatctacacgcagaaatcaaagttattgggtttatcatctctggctctctatcaatcgccacagagaaaaggttaaccaagcttttggtgcatagcagcctggttggaagcattctgagtgctctgtctgccctggtgggtttcattatcctgtctgtcaaacaggccaccttaaatcctgcctcactgcagtggaactctctctctgatgctgatttgcactctgctggaattctgcctagctgtgctcactgctgtgctgcggtggaaacaggcttactctgacttccctgggagtgtacttttcctgcctcacagttacattggtaattctggcatgtcctcaaaaatgactcatgactgtggatatgaagaactattgacttcttaagaaaaaagggagaaatattaatcagaaagttgattcttatgataatatggaaaagttaaccattatagaaaagcaaagcttgagtttcctaaatgtaagcttttaaagtaatgaacattaaaaaaaaccattatttcac

SEQ ID NO: 152943 - DNA, 780 bp, Homo sapiens
  Payload ID: 10082
  Gene Symbol: MS4A6A
  Gene Name: membrane-spanning 4-domains, subfamily A, member 6A
  ENST ID: ENST00000533023
  CDS Start-End: 69-413
gagttaaaacctctttggagcttctgaggactcagctggaaccaacgggcacagttggcaacaccatcatgacatcacaacctgttcccaatgagaccatcatagtgctcccatcaaatgtcatcaacttctcccaagcagagaaacccgaacccaccaaccaggggcaggatagcctgaagaaacatctacacgcagaaatcaaagttattggggtgcatagcagcctggttggaagcattctgagtgctctgtctgccctggtgggtttcattatcctgtctgtcaaacaggccaccttaaatcctgcctcactgcagtggaactctctctctgatgctgatttgcactctgctggaattctgcctagctgtgctcactgctgtgctgcggtggaaacaggcttactctgacttccctggggtgagtgtgctggccggcttcacttaaccttgcctagtgtatcttatccctgcactgtgttgagtatgtcaccaagagtggtagaaggaacaatcagtcagtcatgagatacacatgggagggcatttgcattgtgatggaagacagagaagaaaagcagatggcaattgagtagctgataagctgaaaattcactggatatgaaaatagttaatcatgagaaatcaactgattcaatcttcctattttgtcagcgaagggaatgagactctgggaagttaaatgactggcctggcattatgctatgagtttgtgcctttgctgaggacactagaacctggcttgcctcccttataa

SEQ ID NO: 152944 - DNA, 1383 bp, Homo sapiens
  Payload ID: 10082
  Gene Symbol: MS4A6A
  Gene Name: membrane-spanning 4-domains, subfamily A, member 6A
  Uniprot ID: Q9H2W1
  ENST ID: ENST00000530839
  CDS Start-End: 494-1240
attccgaagggttctgtgctaggaaccttacacgtgttgtctcacataatccttaaaactcagaaatgattttaaattaaatagcacagagaggaaaactgactggagagggagcctttgcttagattagaaaactgaagcttcaagaacagacttgcctaacaacaggaaacttgtatgtctcgaagtggcaattcacacataaggctccatgactcctgaactctcacaaatattagttggctcttttcatggttttactgaagttgctagaagtttacagaaaaggaagtgcaggaacatttcacaaatctacaatctgtgagtatcacatcctgtatagctgtaaacactggaataaggaagggctgatgactttcagaagatgaaggtaagtagaaaccgttgatgggactgagaaaccagagttaaaacctctttggagcttctgaggactcagctggaaccaacgggcacagttggcaacaccatcatgacatcacaacctgttcccaatgagaccatcatagtgctcccatcaaatgtcatcaacttctcccaagcagagaaacccgaacccaccaaccaggggcaggatagcctgaagaaacatctacacgcagaaatcaaagttattgggactatccagatcttgtgtggcatgatggtattgagcttggggatcattttggcatctgcttccttctctccaaattttacccaagtgacttctacactgttgaactctgcttacccattcataggaccctttttttttatcatctctggctctctatcaatcgccacagagaaaaggttaaccaagcttttggtgcatagcagcctggttggaagcattctgagtgctctgtctgccctggtgggtttcattatcctgtctgtcaaacaggccaccttaaatcctgcctcactgcagtgtgagttggacaaaaataatataccaacaagaagttatgtttcttacttttatcatgattcactttataccacggactgctatacagccaaagccagtctggctggaactctctctctgatgctgatttgcactctgctggaattctgcctagctgtgctcactgctgtgctgcggtggaaacaggcttactctgacttccctgggagtgtacttttcctgcctcacagttacattggtaattctggcatgtcctcaaaaatgactcatgactgtggatatgaagaactattgacttcttaagaaaaaagggagaaatattaatcagaaagttgattcttatgataatatggaaaagttaaccattatagaaaagcaaagcttgagtttcctaaatgtaagcttttaaagtaatgaacattaaaaaaaaccattatttcactgtc

SEQ ID NO: 152945 - DNA, 682 bp, Homo sapiens
  Payload ID: 10082
  Gene Symbol: MS4A6A
  Gene Name: membrane-spanning 4-domains, subfamily A, member 6A
  ENST ID: ENST00000533409
  CDS Start-End: 614-682
gatacattgaagtcagcttccaaagaatgccacccaaggttttgaaggggcacagtgcctctgtcctcacaaaaccagcctgcatatgagtttactgaattcatttaggtcctgctgaatctttcccatttgttccttctctgtttcaatatttcaatgcttccctggaggggcccaacctttctggagggcaaagatctgttgttagagaaaaagagcagccagaggaggaagatgacttgaggattagaaaactgaagcttcaagaacagacttgcctaacaacaggaaacttgtatgtctcgaagtggcaattcacacataaggctccatgactcctgaactctcacaaatattagttggctcttttcatggttttactgaagttgctagaagtttacagaaaaggaagtgcaggaacatttcacaaatctacaatctgtgagtatcacatcctgtatagctgtaaacactggaataaggaagggctgatgactttcagaagatgaaggtaagtagaaaccgttgatgggactgagaaaccagagttaaaacctctttggagcttctgaggactcagctggaaccaacgggcacagttggcaacaccatcatgacatcacaacctgttcccaatgagaccatcatagtgctcccatcaaatgtcatcaacttctcccaa

SEQ ID NO: 152946 - DNA, 711 bp, Homo sapiens
  Payload ID: 10083
  Gene Symbol: MS4A6E
  Gene Name: membrane-spanning 4-domains, subfamily A, member 6E
  Uniprot ID: Q96DS6
  ENST ID: ENST00000300182
  CDS Start-End: 66-509
aacttgggagctctgtacttttaagagctaaatctattttttcttccgtagttggcaacaccattatgacatcacaacctatttccaatgagaccatcataatgctcccatcaaatgtcatcaacttctcccaagcagagaaacccgaacccaccaaccaggggcaggatagcctgaagaaacgtctacaggcaaaagtcaaagttattggggtgcatagcagcctggctggaagcattctgagtgctctgtctgccctggtgggtttcattctcctgtctgtcaacccggctgcattaaatcctgcctcattgcagtgtaagttggacgaaaaggatataccaaccagacttcttctttcttatgattatcattcaccttacaccatggactgccatagagccaaagccagtctggctggaactctgtctctgatgctggtttctactgtgttggagttctgcctagctgtgctcactgctgtgctgcagtggaaacagactgtctgacttccctggttactcatgtcctcaaagacgactcatgatgctggatatgaagaactattgacttcttgggaaaaaacggagaaatattaattggaaagttgatttttatgataatatggaaaacctaaccattataaaaaagcaaacttgagtttcctaaatgtaagcatttaaagtaatgcatatttgttttaaaaaatta

SEQ ID NO: 152947 - DNA, 566 bp, Homo sapiens
  Payload ID: 10083
  Gene Symbol: MS4A6E
  Gene Name: membrane-spanning 4-domains, subfamily A, member 6E
  ENST ID: ENST00000532756
  CDS Start-End: 1-369
aaacccgaacccaccaaccaggggcaggatagcctgaagaaacgtctacaggcaaaagtcaaagttattggggtgcatagcagcctggctggaagcattctgagtgctctgtctgccctggtgggtttcattctcctgtctgtcaacccggctgcattaaatcctgcctcattgcagtgtaagttggacgaaaaggatataccaaccagacttcttctttcttatgattatcattcaccttacaccatggactgccatagagccaaagccagtctggctggaactctgtctctgatgctggtttctactgtgttggagttctgcctagctgtgctcactgctgtgctgcagtggaaacagactgtctgacttccctggttactcatgtcctcaaagacgactcatgatgctggatatgaagaactattgacttcttgggaaaaaacggagaaatattaattggaaagttgatttttatgataatatggaaaacctaaccattataaaaaagcaaacttgagtttcctaaatagttctgccatagaatcatggagtcaacatcccag

SEQ ID NO: 152948 - DNA, 483 bp, Homo sapiens
  Payload ID: 10083
  Gene Symbol: MS4A6E
  Gene Name: membrane-spanning 4-domains, subfamily A, member 6E
  ENST ID: ENST00000530509
  CDS Start-End: 1-180
gaacccaccaaccaggggcaggatagcctgaagaaacgtctacaggcaaaagtcaaagttattgggagtttattaaagaagctgtattgcatgaagggaggagagaaagaagggatctatcttggattgggagggaaacacagagttttggtttctagaattgcctctgcacttatgtgatctgaggtgcatagcagcctggctggaagcattctgagtgctctgtctgccctggtgggtttcattctcctgtctgtcaacccggctgcattaaatcctgcctcattgcagtctgaaagaagtgtgatatcttaaatcaggagataagaaatatagggagatggagagtgtaactgagaattatcgcaggagaattctctctctttggaagaagaaaaacaatgaagtttggctaacagaaataatgtgtctgaagttgaaaaattaaggggtatgtgcatggccagcaacgcattgagagga

SEQ ID NO: 152949 - DNA, 1869 bp, Homo sapiens
  Payload ID: 10084
  Gene Symbol: MS4A7
  Gene Name: membrane-spanning 4-domains, subfamily A, member 7
  Uniprot ID: Q9GZW8
  ENST ID: ENST00000300184
  CDS Start-End: 197-919
aaaattcacatcctgtgtaatcataaatactgctctaagaaagggacaggaagtctcagaggctggagagcagagcaccaagatcgttctggcaggaacagccagtgggaggttccagctgagcgctccccagaggtgagctgatccccagccacagcacacaggaccaggctgcgagaacagcatcatcagcatcatgctattacaatcccaaaccatgggggtttctcacagctttacaccaaagggcatcactatccctcaaagagagaaacctggacacatgtaccaaaacgaagattacctgcagaacgggctgccaacagaaaccaccgttcttgggactgtccagatcctgtgttgcctgttgatttcaagtctgggggccatcttggtttttgctccctacccctcccacttcaatccagcaatttccaccactttgatgtctgggtacccatttttaggagctctgtgttttggcattactggatccctctcaattatctctggaaaacaatcaactaagccctttgacctgagcagcttgacctcaaatgcagtgagttctgttactgcaggagcaggcctcttcctccttgctgacagcatggtagccctgaggactgcctctcaacattgtggctcagaaatggattatctatcctcattgccttattcggagtactattatccaatatatgaaatcaaagattgtctcctgaccagtgtcagtttaacaggtgtcctagtggtgatgctcatcttcactgtgctggagctcttattagctgcatacagttctgtcttttggtggaaacagctctactccaacaaccctgggagttcattttcctcgacccagtcacaagatcatatccaacaggtcaaaaagagttcttcacggtcttggatataagtaactcttggcctcagaggaaggaaaagcaactcaacactcatggtcaagtgtgattagactttcctgaaatctctgccattttagatactgtgaaacaaactaaaaaaaaaaaagcttttgttttgtatttgtttactatgagtcgttatttaatttctcttgaaaataatttcctcaaagcccaagtcaataaatgttatcagccagtcttccaaaatggtcataaactttataaactgctttgggtaaactgagcagaaggtgatacacagaagggaaaatgtgcactcatgctagtgtgaatttggtaagttgcgtgactctgcaggctgtttctgtattattttcacactcatattgcttaaatattacatattagggattgtaagaaaactttaattaaaaattaaagactatatataattaaactactctgccctggacactctctgagaaacagatctactgggccctttttcatgagccattaggtggaagacagcaaagagatcttctcaagtgcttaggattacctctcaacacacagcaagcatgtccctgcctcccatgaatcttaccatgtaaatccaaatctctgcaatcctgtggcaccaaccagtggtgctcattctattgtttaaaaatggccttcttggctgggcgcggtggctcactcctgtaatcccagcactttggtaggccgaggtggacggatcacccgaggtcaggagtttgagaccagcctggccaacaaggtgaaaccctgtctctactaaaaatacaaaaaattagccaggcatggtggtgcgcacctgtagttccagctacttgggaggctgaggcagaagaatcacttgaacccgggaaggggaggttgcagtgagcggagactgcaccactgcattccagcccggcctacaagaacaaaactccatctcaaaataaat

SEQ ID NO: 152950 - DNA, 2871 bp, Homo sapiens
  Payload ID: 10084
  Gene Symbol: MS4A7
  Gene Name: membrane-spanning 4-domains, subfamily A, member 7
  Uniprot ID: Q9GZW8
  ENST ID: ENST00000358246
  CDS Start-End: 194-781
attcacatcctgtgtaatcataaatactgctctaagaaagggacaggaagtctcagaggctggagagcagagcaccaagatcgttctggcaggaacagccagtgggaggttccagctgagcgctccccagaggtgagctgatccccagccacagcacacaggaccaggctgcgagaacagcatcatcagcatcatgctattacaatcccaaaccatgggggtttctcacagctttacaccaaagggcatcactatccctcaaagagagaaacctggacacatgtaccaaaacgaagattacctgcagaacgggctgccaacagaaaccaccgttcttgggtttggcattactggatccctctcaattatctctggaaaacaatcaactaagccctttgacctgagcagcttgacctcaaatgcagtgagttctgttactgcaggagcaggcctcttcctccttgctgacagcatggtagccctgaggactgcctctcaacattgtggctcagaaatggattatctatcctcattgccttattcggagtactattatccaatatatgaaatcaaagattgtctcctgaccagtgtcagtttaacaggtgtcctagtggtgatgctcatcttcactgtgctggagctcttattagctgcatacagttctgtcttttggtggaaacagctctactccaacaaccctgggagttcattttcctcgacccagtcacaagatcatatccaacaggtcaaaaagagttcttcacggtcttggatataagtaactcttggcctcagaggaaggaaaagcaactcaacactcatggtcaagtgtgattagactttcctgaaatctctgccattttagatactgtgaaacaaactaaaaaaaaaaaagcttttgttttgtatttgtttactatgagtcgttatttaatttctcttgaaaataatttcctcaaagcccaagtcaataaatgttatcagccagtcttccaaaatggtcataaactttataaactgctttgggtaaactgagcagaaggtgatacacagaagggaaaatgtgcactcatgctagtgtgaatttggtaagttgcgtgactctgcaggctgtttctgtattattttcacactcatattgcttaaatattacatattagggattgtaagaaaactttaattaaaaattaaagactatatataattaaactactctgccctggacactctctgagaaacagatctactgggccctttttcatgagccattaggtggaagacagcaaagagatcttctcaagtgcttaggattacctctcaacacacagcaagcatgtccctgcctcccatgaatcttaccatgtaaatccaaatctctgcaatcctgtggcaccaaccagtggtgctcattctattgtttaaaaatggccttcttggctgggcgcggtggctcactcctgtaatcccagcactttggtaggccgaggtggacggatcacccgaggtcaggagtttgagaccagcctggccaacaaggtgaaaccctgtctctactaaaaatacaaaaaattagccaggcatggtggtgcgcacctgtagttccagctacttgggaggctgaggcagaagaatcacttgaacccgggaaggggaggttgcagtgagcggagactgcaccactgcattccagcccggcctacaagaacaaaactccatctcaaaataaataaaaaaataaataaaaataaaaatagactatatatagtctttgaattcatttattttaaataaatgaataaaataaaataaaaaagaatattcagtcgttggcacataaactatgttctcttctgtcatttcagggtaggagtcaatgaagacatcttagtcttaacaagttacagataatctctgactggcatgttttctgcttctagcttggagctaaatgctgctcatgctgaaaagaataatgtctatttctttgtttgggtattagctctattttgatctatagcacagttttgtaattcagatcatcacccctgcactttgtaccacatgggcgtattctttcttcccagtcattgctgcaattatcttgtctgttctttgtgtaatatgttctgtgtgagcctctgcattaaactcgatttcttgggcaattatggaaattccagtgtggctgcagtttaactttgcactctctatgcatatgaggtttcctaaataaatgaggagtagcatagtttaaaatatatatatcttataactttctacaacaaagaattattgagtccaaatgtcatcagtgctcattttgagataccctgctatcgatggtcgctacaaaccaggaaatactcaagttattatgtgtatacattggttttagttttatgaaacaatttaccttcatgatctcatagttaaaattgtaataaatttaggaatataaaggatcaatatgggaagcaaaatttctaaaggcagtttctgttgttttaattagtatttgtgtagttcaaaccaggaaggatttgactatcattagattttgcttaactttatgaaagctaaaatattctctgttataaaggggcaactccatctggtcctatagcatctttactactgatttttttttgtttaatttgaaaatgcaaagaattgttaaatgttcttaaatgttctcactacaaaaaaagaaaaaagataactacgtgaggtgatggatatgttaattagctggattgtggtaatcattttggaatgtatatgtatatcaaaacatgtagtacaccctaaatatatataatttttatttgtcaaatatacctcaataaagatggaaaaaaatcgaaattc

SEQ ID NO: 152951 - DNA, 268 bp, Homo sapiens
  Payload ID: 10084
  Gene Symbol: MS4A7
  Gene Name: membrane-spanning 4-domains, subfamily A, member 7
  ENST ID: ENST00000528215
  CDS Start-End: 151-268
atcgttctggcaggaacagccagtgggaggttccagctgagcgctccccagaggtgagctgatccccagccacagcacacaggaccaggctgcgagaacagctttacaccaaagggcatcactatccctcaaagagagaaacctggacacatgtaccaaaacgaagattacctgcagaacgggctgccaacagaaaccaccgttcttgggtttggcattactggatccctctcaattatctctggaaaacaatcaactaagccctttg

SEQ ID NO: 152952 - DNA, 730 bp, Homo sapiens
  Payload ID: 10084
  Gene Symbol: MS4A7
  Gene Name: membrane-spanning 4-domains, subfamily A, member 7
  ENST ID: ENST00000530234
  CDS Start-End: 140-436
agaggctggagagcagagcaccaagatcgttctggcaggaacagccagtgggaggttccagctgagcgctccccagaggtgagctgatccccagccacagcacacaggaccaggctgcgagaacagcatcatcagcatcatgctattacaatcccaaaccatgggggtttctcacagctttacaccaaagggcatcactatccctcaaagagagaaacctggacacatgtaccaaaacgaagattacctgcagaacgggctgccaacagaaaccaccgttcttgggactgtccagatcctgtgttgcctgttgatttcaagtctgggggccatcttggtttttgctccctacccctcccacttcaatccagcaatttccaccactttgatgtctgggtacccatttttaggagctctgtgtggtaggagtcaatgaagacatcttagtcttaacaagttacagataatctctgactggcatgttttctgcttctagcttggagctaaatgctgctcatgctgaaaagaataatgtctatttctttgtttgggtattagctctattttgatctatagcacagttttgtaattcagatcatcacccctgcactttgtaccacatgggcgtattctttcttcccagtcattgctgcaattatcttgtctgttctttgtgtaatatgttctgtgtgagcctctgcattaaactcgatttcttgggcaattatgg

SEQ ID NO: 152953 - DNA, 657 bp, Homo sapiens
  Payload ID: 10084
  Gene Symbol: MS4A7
  Gene Name: membrane-spanning 4-domains, subfamily A, member 7
  ENST ID: ENST00000530614
  CDS Start-End: 151-657
caggaagtctcagaggctggagagcagagcaccaagatcgttctggcaggaacagccagtgggaggttccagctgagcgctccccagaggtgagctgatccccagccacagcacacaggaccaggctgcgagaacagcatcatcagcatcatgctattacaatcccaaaccatgggggtttctcacagctttacaccaaagggcatcactatccctcaaagagagaaacctggacacatgtaccaaaacgaagattacctgcagaacgggctgccaacagaaaccaccgttcttgggtttggcattactggatccctctcaattatctctggaaaacaatcaactaagccctttgacctgagcagcttgacctcaaatgcagtgagttctgttactgcaggagcaggcctcttcctccttgctgacagcatggtagccctgaggactgcctctcaacattgtggctcagaaatggattatctatcctcattgccttattcggagtactattatccaatatatgaaatcaaagattgtctcctgaccagtgtcagtttaacaggtgtcctagtggtgatgctcatcttcactgtgctggagctcttattagctgcatacagttctgtcttttggtggaaacagctctactccaacaac

SEQ ID NO: 152954 - DNA, 1378 bp, Homo sapiens
  Payload ID: 10084
  Gene Symbol: MS4A7
  Gene Name: membrane-spanning 4-domains, subfamily A, member 7
  Uniprot ID: Q9GZW8
  ENST ID: ENST00000534016
  CDS Start-End: 130-717
atcataaatactgctctaagaaagggacaggaagtctcagaggctggagagcagagcaccaagatcgttctggcaggaacagccagtgggaggttccagctgagcgctccccagagcatcatcagcatcatgctattacaatcccaaaccatgggggtttctcacagctttacaccaaagggcatcactatccctcaaagagagaaacctggacacatgtaccaaaacgaagattacctgcagaacgggctgccaacagaaaccaccgttcttgggtttggcattactggatccctctcaattatctctggaaaacaatcaactaagccctttgacctgagcagcttgacctcaaatgcagtgagttctgttactgcaggagcaggcctcttcctccttgctgacagcatggtagccctgaggactgcctctcaacattgtggctcagaaatggattatctatcctcattgccttattcggagtactattatccaatatatgaaatcaaagattgtctcctgaccagtgtcagtttaacaggtgtcctagtggtgatgctcatcttcactgtgctggagctcttattagctgcatacagttctgtcttttggtggaaacagctctactccaacaaccctgggagttcattttcctcgacccagtcacaagatcatatccaacaggtcaaaaagagttcttcacggtcttggatataagtaactcttggcctcagaggaaggaaaagcaactcaacactcatggtcaagtgtgattagactttcctgaaatctctgccattttagatactgtgaaacaaactaaaaaaaaaaaagcttttgttttgtatttgtttactatgagtcgttatttaatttctcttgaaaataatttcctcaaagcccaagtcaataaatgttatcagccagtcttccaaaatggtcataaactttataaactgctttgggtaaactgagcagaaggtgatacacagaagggaaaatgtgcactcatgctagtgtgaatttggtaagttgcgtgactctgcaggctgtttctgtattattttcacactcatattgcttaaatattacatattagggattgtaagaaaactttaattaaaaattaaagactatatataattaaactactctgccctggacactctctgagaaacagatctactgggccctttttcatgagccattaggtggaagacagcaaagagatcttctcaagtgcttaggattacctctcaacacacagcaagcatgtccctgcctcccatgaatcttaccatgtaaatccaaatctctgcaatcctgtggcaccaaccagtggtgctcattctattgtttaaaaatggccttcttggct

SEQ ID NO: 152955 - DNA, 633 bp, Homo sapiens
  Payload ID: 10084
  Gene Symbol: MS4A7
  Gene Name: membrane-spanning 4-domains, subfamily A, member 7
  ENST ID: ENST00000530027
  CDS Start-End: 151-633
caggaagtctcagaggctggagagcagagcaccaagatcgttctggcaggaacagccagtgggaggttccagctgagcgctccccagaggtgagctgatccccagccacagcacacaggaccaggctgcgagaacagcatcatcagcatcatgctattacaatcccaaaccatgggggtttctcacagctttacaccaaagggcatcactatccctcaaagagagaaacctggacacatgtaccaaaacgaagattacctgcagaacgggctgccaacagaaaccaccgttcttggggacctgagcagcttgacctcaaatgcagtgagttctgttactgcaggagcaggcctcttcctccttgctgacagcatggtagccctgaggactgcctctcaacattgtggctcagaaatggattatctatcctcattgccttattcggagtactattatccaatatatgaaatcaaagattgtctcctgaccagtgtcagtttaacaggtgtcctagtggtgatgctcatcttcactgtgctggagctcttattagctgcatacagttctgtcttttggtggaaacagctctactccaacaaccctgggagttcattttcctcgacccagtcacaa

SEQ ID NO: 152956 - DNA, 1353 bp, Homo sapiens
  Payload ID: 10085
  Gene Symbol: MS4A8
  Gene Name: membrane-spanning 4-domains, subfamily A, member 8
  Uniprot ID: Q9BY19
  ENST ID: ENST00000300226
  CDS Start-End: 204-956
aaacaggaaataaatacgaatgaaactgagctctaagcagcatgtaacctggcctgcatccaggaaatagaggacttcggatccttctaaccctaccacccaactggccccagtacattcattctctcaggaaaaaaaacaaggtccccacagcaaagaaaaggaataggatcaagagatacgtggctgctggcagagcaagcatgaattcgatgacttcagcagttccggtggccaattctgtgttggtggtggcaccccacaatggttatcctgtgaccccaggaattatgtctcacgtgcccctgtatccaaacagccagccgcaagtccacctagttcctgggaacccacctagtttggtgtcgaatgtgaatgggcagcctgtgcagaaagctctgaaagaaggcaaaaccttgggggccatccagatcatcattggcctggctcacatcggcctcggctccatcatggcgacggttctcgtaggggaatacctgtctatttcattctacggaggctttcccttctggggaggcttgtggtttatcatttcaggatctctctccgtggcagcagaaaatcagccatattcttattgcctgctgtctggcagtttgggcttgaacatcgtcagtgcaatctgctctgcagttggagtcatactcttcatcacagatctaagtattccccacccatatgcctaccccgactattatccttacgcctggggtgtgaaccctggaatggcgatttctggcgtgctgctggtcttctgcctcctggagtttggcatcgcatgcgcatcttcccactttggctgccagttggtctgctgtcaatcaagcaatgtgagtgtcatctatccaaacatctatgcagcaaacccagtgatcaccccagaaccggtgacctcaccaccaagttattccagtgagatccaagcaaataagtaaggctacagattctggaagcatctttcactgggaccaaaagaagtcctcctccctttctgggcttccataacccaggtcgttcctgttctgacagctgaggaaacgtctctcccactgtttgtactctcaccttcattcttcaattcagtctaggaaaccatgctgtttctctatcaagaagaagacagagattttaaacagatgttaaccaagagggactccctagggcacatgcatcagcacatatgtgggcatccagcctctggggccttggcacacacacattcgtgtgctctgctgcatgtgagcttgtgggttagaggaacaaatatctagacattcaatcttcactctttcaattgtgcattcatttaataaatagatactgagcattcaa

SEQ ID NO: 152957 - DNA, 677 bp, Homo sapiens
  Payload ID: 10085
  Gene Symbol: MS4A8
  Gene Name: membrane-spanning 4-domains, subfamily A, member 8
  ENST ID: ENST00000525458
  CDS Start-End: 1-491
cccacaatggttatcctgtgaccccaggaattatgtctcacgtgcccctgtatccaaacagccagccgcaagtccacctagttcctgggaacccacctagtttggtgtcgaatgtgaatgggcagcctgtgcagaaagctctgaaagaaggcaaaaccttgggggccatccagatcatcattggcctggctcacatcggcctcggctccatcatggcgacggttctcgtaggggaatacctgtctatttcattctacggaggctttcccttctggggaggcttgtggtttatcatttcaggatctctctccgtggcagcagaaaatcagccatattcttattgcctgctgtctggcagtttgggcttgaacatcgtcagtgcaatctgctctgcagttggagtcatactcttcatcacagatctaagtattccccacccatatgcctaccccgactattatccttacgcctggggtgtgttctgccaatgattgatcttggaatgagaactcgccccatgcccaccacccattccaccttcaagcctcagtcatcccatctgaacatggagggtcggactgcatctgagctttgcaaataatgacccaaggaatggagatactccggggtttccacatcaggaattatttttcatcaaataaaaaaaatctcagctg

SEQ ID NO: 152958 - DNA, 548 bp, Homo sapiens
  Payload ID: 10085
  Gene Symbol: MS4A8
  Gene Name: membrane-spanning 4-domains, subfamily A, member 8
  ENST ID: ENST00000532816
  CDS Start-End: 31-297
aagagatacgtggctgctggcagagcaagcatgaattcgatgacttcagcagttccggtggccaattctgtgttggtggtggcaccccacaatggttatcctgtgaccccaggaattatgtctcacgtgcccctgtatccaaacagccagccgcaagtccacctagttcctgggaacccacctagtttggtgtcgaatgtgaatgggcagcctgtgcagaaagctctgaaagaaggcaaaaccttgggggcattttcggaaagagaaagaaaagcaacaaaaaagcagcacgcttgaaggttgatcctgttgccaggatccacgcccagccctgtggcctctgaagaaaggggtcccagcaagaccaaaatagaccacaaggtggagtcagaatccaataagatcgaatcaaatatttgcccaacaggaaacaaagcaggccatccagatcatcattggcctggctcacatcggcctcggctccatcatggcgacggttctcgtaggggaatacctgtctatttcattctacggaggctttcccttct

SEQ ID NO: 152959 - DNA, 746 bp, Homo sapiens
  Payload ID: 10085
  Gene Symbol: MS4A8
  Gene Name: membrane-spanning 4-domains, subfamily A, member 8
  ENST ID: ENST00000529752
  CDS Start-End: 75-746
ggaaaaaaaacaaggtccccacagcaaagaaaaggaataggatcaagagatacgtggctgctggcagagcaagcatgaattcgatgacttcagcagttccggtggccaattctgtgttggtggtggcaccccacaatggttatcctgtgaccccaggaattatgtctcacgtgcccctgtatccaaacagccagccgcaagtccacctagttcctgggaacccacctagtttggtgtcgaatgtgaatgggcagcctgtgcagaaagctctgaaagaaggcaaaaccttgggggccatccagatcatcattggcctggctcacatcggcctcggctccatcatggcgacggttctcgtaggggaatacctgtctatttcattctacggaggctttcccttctggggaggcttgtggtttatcatttcaggatctctctccgtggcagcagaaaatcagccatattcttattgcctgctgtctggcagtttgggcttgaacatcgtcagtgcaatctgctctgcagttggagtcatactcttcatcacagatctaaaaccctggaatggcgatttctggcgtgctgctggtcttctgcctcctggagtttggcatcgcatgcgcatcttcccactttggctgccagttggtctgctgtcaatcaagcaatgtgagtgtcatctatccaaacatctatgcagcaaacccagtgatcaccccagaaccggtgacctcaccaccaagtta

SEQ ID NO: 152960 - DNA, 7556 bp, Homo sapiens
  Payload ID: 10086
  Gene Symbol: MN1
  Gene Name: meningioma (disrupted in balanced translocation) 1
  Uniprot ID: Q10571
  ENST ID: ENST00000302326
  CDS Start-End: 956-4918
gcgcggaggcagggaaccggagccttggagcgacccaacccctcgtctcgctgccctcccgcgcctgcaacggtgcgcggagactccggcgaactcagacacccaacggcggagaacagaagcggcaggcggcggacgtggccgcgaagctgcgcgccgaacgcagcgcacccgctgccgagcagaggagccgcgcctttccccgaccctcggctccagcccccggcgcctgccgcctcgcagcccctctgcgtcctcggctcgggggccggcaccggcgatgccgagcggagcctccagtcctccgacccgctgaagaagcagcagccgctcgcccggagcctacggggattgtgcgagcggatcgtgctcggtggaggctcgggctgcggggcgcggggactccggggggcggggggagggaccgctctgtcggtgcccggcgccagccgcggctttgaagggtctccctcccctgcccttagcagctctgccacggactccgggaggctgcgggcggcgtcctgagggctccccagcagacccaatcggacttgagaaggtgatcgctctgctctcccaacccccttccctccccattccccccacttaactttttgtctccgttcatccgcggcttcgtcccctccccgcagacccacccgcggctgtgacaaccgcccggggcatgggccccccaacacggctcctagaggccccgcggcctcgcaagatgtgagaggccctccccgggcagaatcggagcttcaggagaggagctaataccccgccccccgtccctcacatcaggcggggtggaggtgcgcgctgagcccccgcggtgctgagcgtcccggagcgcccaatcctgggctggaacgagtagctggccggaggcgcgccgcggagagccggctgtcatgccctattgatccccctctgccccccgccaagtatgtttgggctggaccaattcgagccccaggtcaacagcaggaacgctggccagggcgagaggaactttaacgagaccggactgagcatgaacacccactttaaggccccggctttccacactggggggccccctggccctgtggatcctgctatgagcgcgctgggcgaacccccgatcttgggcatgaacatggagccctacggcttccacgcgcgcggccactcggagttgcacgcaggggggctgcaagcgcagcctgtgcacggcttctttggcggccagcagcctcaccacggccacccgggaagtcatcatccccaccagcatcacccccactttgggggcaacttcggtggcccggaccccggggcctcgtgcctgcacgggggtcgcctgctcggctacggcggcgcagccggaggcctgggcagccagccgcccttcgccgagggctatgagcacatggcggagagccaggggcctgagagcttcggcccgcagcgaccggggaacctcccggacttccacagttcaggtgcctccagccacgccgtgccggccccatgcctgccgctggaccagagccctaaccgagccgcctccttccacggcctgccgtcctccagcggctccgattcccacagtctggagccacggagggtgacgaaccaaggagccgtcgactcgctggaatacaattacccgggcgaggcgccctcgggacattttgacatgttttcgccctctgactccgaagggcagctgcctcattatgcagcgggtcgccaggttcctgggggcgctttcccgggcgcctcggccatgcccagagctgcgggcatggtgggcttgtccaaaatgcacgcccagccaccgcagcagcagccccagcagcagcagcagccccagcagcagcagcagcagcatggtgtgttctttgagaggttcagtggggccagaaagatgcctgtgggtctggagccctcagtgggctccaggcacccgttaatgcagcctccccagcaggccccgccaccccctcagcagcagcccccgcagcagccgccacagcagcagccgccgccgccacccgggcttctagtccgacaaaattcgtgcccgcctgcgctccctcggccccagcagggcgaggcgggcacgcccagcggcggcctgcaggacggaggccccatgctgcccagccagcacgcgcaattcgagtatcccatccaccggctggagaaccggagcatgcacccttattccgagcctgttttcagcatgcagcatcctcctccgcagcaggcgcccaaccagcggctgcagcatttcgacgcgcccccctacatgaacgtggccaagaggccgcgcttcgactttccgggcagcgcgggagtggaccgctgcgcttcgtggaacggcagcatgcacaacggcgctctggataatcacctctccccttccgcctacccaggcctacccggcgagttcacaccgcctgtgcccgacagcttcccttcggggccgcccctgcagcatccggccccggaccaccagtccctgcaacagcagcagcagcagcagcagcagcagcaacagcagcagcagcagcagcaacagcaacagcaacagcagcagcagcagcagcgccaaaacgcggccctcatgattaagcagatggcgtcgcggaatcagcagcagcggctgcgccagcccaacctggctcagctaggccaccccggggacgtgggccagggcggcctggtgcatggcggcccggtgggcggcttggcccagccgaactttgagcgcgaaggcggcagcacgggcgccgggcgtctgggcaccttcgagcagcaggcgccgcacttggcgcaagagagcgcgtggttctcaggtccgcatccgccgcccggagacctgctgccccgtaggatgggcggctcgggtctgcccgctgactgtggcccgcacgaccccagcctggcgccccctcctccgcctggtggctcgggggtgctgttccggggccctctgcaggagccgatgaggatgcccggagagggccacgtgcccgcgctgccttcaccgggcctgcagttcgggggcagtctgggaggcctgggtcagctgcagtcgcccggggcgggcgtggggctccccagcgctgcttcggagcgccggcccccgccgccggactttgctacgtctgcgctcgggggccagccgggctttccgtttggtgcagccggccggcagtccacgccgcacagcggtccaggcgtgaactcgccccccagcgcgggagggggcggtggcagctctggtggcggcggtggcgggggtgcctacccgccgcagcctgatttccagcccagccagcgcacctcggccagtaaattgggcgcgctctcgctgggctccttcaacaagcccagctccaaggacaacctgttcggccagagctgcctggctgcgctctccaccgcttgccagaacatgatcgccagcctcggggcccccaacctcaacgtgaccttcaacaagaagaacccgccagagggcaagaggaaactgagccagaacgagaccgacggcgcggcagtggccggcaacccgggctcggattacttcccaggagggactgctcctggggccccaggacccggaggcccgtccgggaccagtagcagcggctccaaagcctcggggccgcccaaccctccagcccagggggacggcaccagcctctcccccaactacaccctggaatccacgtcggggaatgacggcaagccggtctccgggggcggcggccggggacggggtcgcagaaaaagggacagtggtcacgtgagccctggcaccttctttgacaagtactcggcggctccggacagcgggggcgcacctggggtgagcccagggcagcagcaagcgtcaggcgcagccgtcgggggaagctccgcaggcgagacgcgcggggcaccgacgccccacgaaaaggcgctcacgtcgccatcctgggggaagggggctgagttgctcctgggggatcagccggacctcattgggtccctggacggcggggccaagtcggacagtagttcgccaaacgtgggtgagttcgcctcggacgaggtgagcacgagctacgccaatgaggacgaggtgtcgtccagctctgacaacccccaggcactagttaaagcgagcaggagtcccctggtgaccggctcgcccaaactccctccccgtggggtaggcgccggggaacacggaccgaaggcgcccccgcccgccctcggcctgggcatcatgtctaactctacctcgacccctgacagctacggcggcggtgggggcccgggccatccgggcactccgggcctggagcaggtccgcaccccgacgagcagcagcggcgccccgccacccgacgagatccaccccctggagatccttcaggcgcagatccagctacagaggcagcagttcagcatctccgaggaccagcctctggggctgaagggtggcaagaagggtgagtgcgccgtcggggcctcaggggcgcagaatggcgacagcgagctgggcagctgctgctccgaggcggtcaagagcgccatgagcaccattgacctggactcgctgatggcagagcacagcgctgcctggtacatgcccgctgacaaggccctggtggacagcgcggacgacgacaagacgttggcgccctgggagaaggccaaaccccagaaccccaacagcaaagaagcccacgacctccctgcaaacaaggcctcagcatcccagcctggcagccacttgcagtgcctgtctgtccactgcacagacgacgtgggtgacgccaaggctcgagcctccgtgcccacctggcggtccctgcattctgacatctccaacagatttgggacattcgtggctgccctaacttgaatgacaagaaagatcccctcctctaccaggcccttcctctccccctgtctgtttccttccccctcaaccttaccccacccctctgttaatttgaaagggccactattgctgagtggatgagttttttttttttctctaggttggtacctgcttagtggcatatggaccggaaagggttaatttaaagggggggaacctcaaaagtttttttaaaaaagaaacttgtctgccacagtatgttaccagtgttaacccttctgcagttagcaaacttttgcttaagcctttttcctctagatactccccatgtttcggtaatcttggcatacattttttagatgacctctttccttgttttgttttcatgctgctgtatgtccaagtattgttatttcataataagacaagagttgctttcttttttattctttttccttttcttaccccctccccttttattttctttttgctttgttcactgcttattaaaatggaaatcctggagaatagtagttctggaatattgccgggtgaaagtccaattgtcatcacaatgttatatattgacaccccagtgtcatcagtcaggcaggagccaaacaatgaatgcccctcttaggtattccgcctgggattttgttttgtctgttccctaagaaaatatattttcattcctgcaaacacagtgctcagccttcagttcccttccacttgagttctctcttctcctgctggaagccgcccctctctgcgatggacgtgaggacgtgtccagctctgctctgtgggaaggagttggaatgttcgacagcagtgttttctctccttttctgggcctcctcgcaaatgcccaggccctgcattttcacgctgtgctaagcagcctttggtctgcatgggggatggtgtgctcccagcctgcagtctttggagcaaggctgctgcccgtgccttgggtgctggagttggaggaggctgttctcagccctttcccttttctgaaagctgttcctggccgggcatcccagggaagaaggaggggactgcgtgtatctcctccacctctcccattccatccccagtccagcctgggcaaccccacccctgggagggatgaggcaccctcttgctcagcctgctcagccttctctgagcctttgcagggatctgcagactcctgagggctagaggacagagaaagagaatagaatgaaatgactttgattcctgcgccttttagttttgaactctggaattcctctgccccctccccaacatttttttggaatctcaccctgttgcaaaactagagccatgtcccaagcatctcacaaaggaataactgctctgagcagagatgagtggtggttggcaggggcaggcaactttgggtgctgctgatgcctgcaaaagccatttatggcttgtggtggggggcacatagattccccggtgggttagacaggaagtaactgatatcacttcacccaaatatataaccgtgatggttatctatttaatttcagtttttgttaacgagcgtgtcttactaaaacgctccactttgagctcccccaccccctccaggtcctcagagtttgcagatctgggctttctaaagcaagtgacctgaaggctctgggctcaccatacaacacccacgttgtttatttcaaagaacttttcagcgaagggagaggagctttcagaaaaacctcactctttcccctcccttctcccctctttccttctgccggtccttttggctggggtctgagtctgcggttctcgcctgggcagtcttgacgaggagcaaaccccgccttcagagggcagacaaagcaggtggcatgaattgatcagcgagaaaggtgtgagccgaggcagttcctgcgttctgctacaaaaggaatggaaagggaagggaatttccccccaccatgggctgtgggagagttgaccgtattctgggcaagactccatgacccctctgattctgcagtgtacagctgtttgagagcctcatcattttacttttgaaacaggaatgatttctccttaattgcttaaggccggggagcaaagtgtcttaacttctgtctttgactttcccagcgttgagtcatcaacactttgccaattagctcatggtcctggcaacctcagaaacccctgaagttttaaaaactttctcgctccccacgaccccagaatgaaacagctttaaaaatagccttaagcaaaaggatgttatttcattaaatttggtttaatggaaagaataaaagtaaatgaaaaacacaccctacacactagactccgaacactggtaatcagtactgcatagcaaactctttgggaaagaaaacgaaaatgttattgcacatgtaaaatatgaaaacttaactctgctgtgtgttaggcaatcctgtaatcttttttgactcttaaaagaaattcatttctgaaatgcttggttggaagactgtgacaatagctcatgaaattgagtgttatttttttctttcttttttaaaaaaatatgtaaagtgcagtcttctgtattcctgcatattgtatatacctgtatatgttttcctgagcagttaaataacaataaatatgacgttaatggtga

SEQ ID NO: 152961 - DNA, 620 bp, Homo sapiens
  Payload ID: 10086
  Gene Symbol: MN1
  Gene Name: meningioma (disrupted in balanced translocation) 1
  ENST ID: ENST00000424656
  CDS Start-End: 1-316
ggactcgctgatggcagagcacagcgctgcctggtacatgcccgctgacaaggccctggtggacagcgcggacgacgacaagacgttggcgccctgggagaaggccaaaccccagaaccccaacagcaaagaagcccacgacctccctgcaaacaaggcctcagcatcccagcctggcagccacttgcagtgcctgtctgtccactgcacagacgacgtgggtgacgccaaggctcgagcctccgtgcccacctggcggtccctgcattctgacatctccaacagatttgggacattcgtggctgccctaacttgaatgacaagaaagatcccctcctctaccaggcccttcctctccccctgtctgtttccttccccctcaaccttaccccacccctctgttaatttgaaagggccactattgctgagtggatgagttttttttttttctctagtgctcagccttcagttcccttccacttgagttctctcttctcctgctggaagccgcccctctctgcgatggacgtgaggacgtgtccagctctgctctgtgggaaggagttggaatgttcgacagcagtgttttctctccttttctgggcctcctcgcaaatgcc

SEQ ID NO: 152962 - DNA, 3263 bp, Homo sapiens
  Payload ID: 10087
  Gene Symbol: MGEA5
  Gene Name: meningioma expressed antigen 5 (hyaluronidase)
  Uniprot ID: O60502
  ENST ID: ENST00000357797
  CDS Start-End: 397-2946
aggcagcagcagagggagagctcggggcttggaggggaaacagcggaagacctaagattatcgggagggcagcagaggcagagaacgaggacaggacccttggccgtcttcttccagggaacgagaggtcacagcctcgctctccgcttaggcttctggcgccccagcttaaagccgaggctgcggctgacaaagggctcgcgccggtgccgccgcccttctcatccgggcattcgggtccctgcggagagggagggggaagggcagagggggaggggaaggagccggaggggcgcacacttggagctgaagccctctccagggctccgggccggtgccccaacggacagaggtcgaggaggacccgcagaggtggcagcggccgggggcaggaggatggtgcagaaggagagtcaagcgacgttggaggagcgggagagcgagctcagctccaaccctgccgcctctgcgggggcatcgctggagccgccggcagctccggcacccggagaagacaaccccgccggggctgggggagcggcggtggccggggctgcaggaggggctcggcggttcctctgcggtgtggtggaaggattttatggaagaccttgggttatggaacagagaaaagaactctttagaaggctccagaaatgggaattaaatacatacttgtatgccccaaaagatgactacaaacataggatgttttggcgagagatgtattcagtggaggaagctgagcaacttatgactctcatctctgctgcacgagaatatgagatagagttcatctatgcgatctcacctggattggatatcactttttctaaccccaaggaagtatccacattgaaacgtaaattggaccaggtttctcagtttgggtgcagatcatttgctttgctttttgatgatatagaccataatatgtgtgcagcagacaaagaggtattcagttcttttgctcatgcccaagtctccatcacaaatgaaatctatcagtacctaggagagccagaaactttcctcttctgtcccacagaatactgtggcactttctgttatccaaatgtgtctcagtctccatatttaaggactgtgggtgaaaagcttctacctggaattgaagtgctttggacaggtcccaaagttgtttctaaagaaattccagtagagtccatcgaagaggtttctaagattattaagagagctccagtaatctgggataacattcatgctaatgattatgatcagaagagactgtttctgggcccgtacaaaggaagatccacagaactcatcccacggttaaaaggagtcctcactaatccaaattgtgaatttgaagccaactacgttgctatccacacccttgccacctggtacaaatcaaacatgaatggagtgagaaaagatgtagtgatgagtaggcaagttgcacacagtggagctaaagcaagtgtagttgatgggactcctttagttgcagcaccctctttaaatgccacaaccgtagtaacaacagtttatcaggagcccattatgagccagggagcagccttgagtggtgagcctactactctgaccaaggaagaagaaaagaaacagcctgatgaagaacccatggacatggtggtggaaaaacaagaagaaacggaccacaagaatgacaatcaaatactgagtgaaattgttgaagcgaaaatggcagaggaattgaaaccaatggacactgataaagagagcatagctgaatcaaaatccccagagatgtccatgcaagaagattgtattagtgacattgcccccatgcaaactgatgaacagacaaacaaggagcagtttgtgccaggtccaaatgaaaagcctttgtacactgcggaaccagtgaccctggaggatttgcagttacttgctgatctattctaccttccttacgagcatggacccaaaggagcacagatgttacgggaatttcaatggcttcgagcaaatagtagtgttgtcagtgtcaattgcaaaggaaaagactctgaaaaaattgaagaatggcggtcacgagcagccaagtttgaagagatgtgtggactagtgatgggaatgttcactcggctctccaattgtgccaacaggacaattctttatgacatgtactcctatgtttgggatatcaagagtataatgtctatggtgaagtcttttgtacagtggttagggtgtcgtagtcattcttcagcacaattcttaattggagaccaagaaccctgggcctttagaggtggtctagcaggagagttccagccacctccactgactcctacctccaaagtttatactatcagaccttattttcctaaggatgaggcatccgtgtacaagatttgcagagaaatgtatgacgatggagtgggtttaccctttcaaagtcagcctgatcttattggagacaagttagtaggagggctgctttccctcagcctggattactgctttgtcctagaagatgaagatggcatatgtggttatgccttgggcactgtagatgtgaccccctttattaaaaaatgtaaaatttcctggatccccttcatgcaggagaagtataccaagccaaatggtgacaaggaactctctgaggctgagaaaataatgttgagtttccatgaagaacaggaagtactgccagaaactttccttgctaatttcccttctctgataaagatggacattcacaaaaaagtaactgacccaagtgtggccaaaagcatgatggcttgcctcctgtcttcactgaaggctaatggctcccggggagctttctgtgaagtgagaccagatgataaaagaattctggaattttacagcaagttaggatgttttgaaattgcaaaaatggaaggatttccaaaggatgtggttatacttggtcggagcctgtgacatttgttgacactgtgaactgtccaaaagtctcttaactgcaccttgtgaatggtagttgaggtcttcatacagttcagcctctagaatggtaacaaatcagccaattggattcgaaacaaagaagactatgtaaaactcacccatcacactttgagactactcactggttggaagaatatagtattgcagcaaatcctgtatgaaagagagatgtgggcttcctttttgagtcttgtgttaggtgctgagaccttttacatgggcttatacagggagagagtcttcaataaatgtagtcagcactattttctgca

SEQ ID NO: 152963 - DNA, 5155 bp, Homo sapiens
  Payload ID: 10087
  Gene Symbol: MGEA5
  Gene Name: meningioma expressed antigen 5 (hyaluronidase)
  Uniprot ID: O60502
  ENST ID: ENST00000361464
  CDS Start-End: 397-3147
aggcagcagcagagggagagctcggggcttggaggggaaacagcggaagacctaagattatcgggagggcagcagaggcagagaacgaggacaggacccttggccgtcttcttccagggaacgagaggtcacagcctcgctctccgcttaggcttctggcgccccagcttaaagccgaggctgcggctgacaaagggctcgcgccggtgccgccgcccttctcatccgggcattcgggtccctgcggagagggagggggaagggcagagggggaggggaaggagccggaggggcgcacacttggagctgaagccctctccagggctccgggccggtgccccaacggacagaggtcgaggaggacccgcagaggtggcagcggccgggggcaggaggatggtgcagaaggagagtcaagcgacgttggaggagcgggagagcgagctcagctccaaccctgccgcctctgcgggggcatcgctggagccgccggcagctccggcacccggagaagacaaccccgccggggctgggggagcggcggtggccggggctgcaggaggggctcggcggttcctctgcggtgtggtggaaggattttatggaagaccttgggttatggaacagagaaaagaactctttagaaggctccagaaatgggaattaaatacatacttgtatgccccaaaagatgactacaaacataggatgttttggcgagagatgtattcagtggaggaagctgagcaacttatgactctcatctctgctgcacgagaatatgagatagagttcatctatgcgatctcacctggattggatatcactttttctaaccccaaggaagtatccacattgaaacgtaaattggaccaggtttctcagtttgggtgcagatcatttgctttgctttttgatgatatagaccataatatgtgtgcagcagacaaagaggtattcagttcttttgctcatgcccaagtctccatcacaaatgaaatctatcagtacctaggagagccagaaactttcctcttctgtcccacagaatactgtggcactttctgttatccaaatgtgtctcagtctccatatttaaggactgtgggtgaaaagcttctacctggaattgaagtgctttggacaggtcccaaagttgtttctaaagaaattccagtagagtccatcgaagaggtttctaagattattaagagagctccagtaatctgggataacattcatgctaatgattatgatcagaagagactgtttctgggcccgtacaaaggaagatccacagaactcatcccacggttaaaaggagtcctcactaatccaaattgtgaatttgaagccaactacgttgctatccacacccttgccacctggtacaaatcaaacatgaatggagtgagaaaagatgtagtgatgactgacagtgaagatagtactgtgtccatccagataaaattagaaaatgaaggcagtgatgaagatattgaaactgatgtactctatagtccacagatggctctaaagctagcattaacagaatggttgcaagagtttggtgtgcctcatcaatacagcagtaggcaagttgcacacagtggagctaaagcaagtgtagttgatgggactcctttagttgcagcaccctctttaaatgccacaaccgtagtaacaacagtttatcaggagcccattatgagccagggagcagccttgagtggtgagcctactactctgaccaaggaagaagaaaagaaacagcctgatgaagaacccatggacatggtggtggaaaaacaagaagaaacggaccacaagaatgacaatcaaatactgagtgaaattgttgaagcgaaaatggcagaggaattgaaaccaatggacactgataaagagagcatagctgaatcaaaatccccagagatgtccatgcaagaagattgtattagtgacattgcccccatgcaaactgatgaacagacaaacaaggagcagtttgtgccaggtccaaatgaaaagcctttgtacactgcggaaccagtgaccctggaggatttgcagttacttgctgatctattctaccttccttacgagcatggacccaaaggagcacagatgttacgggaatttcaatggcttcgagcaaatagtagtgttgtcagtgtcaattgcaaaggaaaagactctgaaaaaattgaagaatggcggtcacgagcagccaagtttgaagagatgtgtggactagtgatgggaatgttcactcggctctccaattgtgccaacaggacaattctttatgacatgtactcctatgtttgggatatcaagagtataatgtctatggtgaagtcttttgtacagtggttagggtgtcgtagtcattcttcagcacaattcttaattggagaccaagaaccctgggcctttagaggtggtctagcaggagagttccagcgtttgctgccaattgatggggcaaatgatctcttttttcagccacctccactgactcctacctccaaagtttatactatcagaccttattttcctaaggatgaggcatccgtgtacaagatttgcagagaaatgtatgacgatggagtgggtttaccctttcaaagtcagcctgatcttattggagacaagttagtaggagggctgctttccctcagcctggattactgctttgtcctagaagatgaagatggcatatgtggttatgccttgggcactgtagatgtgaccccctttattaaaaaatgtaaaatttcctggatccccttcatgcaggagaagtataccaagccaaatggtgacaaggaactctctgaggctgagaaaataatgttgagtttccatgaagaacaggaagtactgccagaaactttccttgctaatttcccttctctgataaagatggacattcacaaaaaagtaactgacccaagtgtggccaaaagcatgatggcttgcctcctgtcttcactgaaggctaatggctcccggggagctttctgtgaagtgagaccagatgataaaagaattctggaattttacagcaagttaggatgttttgaaattgcaaaaatggaaggatttccaaaggatgtggttatacttggtcggagcctgtgacatttgttgacactgtgaactgtccaaaagtctcttaactgcaccttgtgaatggtagttgaggtcttcatacagttcagcctctagaatggtaacaaatcagccaattggattcgaaacaaagaagactatgtaaaactcacccatcacactttgagactactcactggttggaagaatatagtattgcagcaaatcctgtatgaaagagagatgtgggcttcctttttgagtcttgtgttaggtgctgagaccttttacatgggcttatacagggagagagtcttcaataaatgtagtcagcactattttctgcatccagtgtggttgcgtttctcacctgagagtaatcaagataacatctgtcatcttccttggtttattgagtgaaatgcctctcagtcttaggggacatggcagagatgaaagaaagaaagagtgggtttcagaagtgtcagggtggagtgattccaagtgggatggttgtggcattagtttaagctgaataaataatttcaatttggggcagttattctgctttttgtaaagccgtggccaattgtctcctgtaatgactgttggttcaggcatgttgtactttgtagggacaaatgtgcatttgtttgtggcaaaagcctacaattgacaaacttgtaaatttctttgtatataaactagctgtaacctgactatcctttgtgtttactgtttttgtaaatttttttcctctataaatgaaagggtgttggttcagaatggcactttgaataatgtaaaccagtgaaaagtggattttctttacttttgtctttgggtttggggttgtttttgttctttttgaagttttattatttttaaagtgcctcccacctaggcgtaggccatgaccatttggggtacgagagcctaattttgtaggacttaatctgttgaaaagtgcagttacttctggaaattaacctcaatattaggtcagcatgtgaaatgttggatttgacatgtcaggtagggttcagggactgattggtcccatttgccctcaggtcagttgtttaatctcaagacctgttactactgattttattaaatcagagtctttaattcttgcatgtttgtatctaatttctgaatgaatgagcacactttaaccagttatttacagttacctttttcctttaaccggattgtgaaagcttcatgtattttaatttagattctgtgtttttaagggttctgagcatgaagctggcagatagtcggcaggactcattttttcatcatggctggctgatttctccatagattgataacagtattttgttatcttgcttctctgtagttttgcatcagctgtttaactttgagctgagtgaggggagaggggtaaagagaaagaaacttaagttttctttcacagaactccaccattgtgggctttgagagagccctaaagcattgtacctagtggtacctagtgacttccaaccaaagcctttgagtatgcactaaataggtgagaagaaaggagagaaggtttttaggttagaaacctttaaccgatagaaggatatggtatgttgtaaagctggaaccaagtttgcatttttgagggcttgagatgaagggaagactcttaccagatagtaagacagctgagttttcctcagttttctcgtcttaacactagtggacaattctagcattttgtttggaggatttcagagttaacctcatggaattcaggattttttagcaagtttgcttttggttttatcttggcttttagtaatcatgttggctggtctggtcacaggtgactgtgaaacagatgccctggtcttgctttcatcactctaggatcatgaagtgctatgctatttcctggttatgaatattaaggttggaattacatttttattgattgtttggatcagagctcagttcctgtagaaaacgaactgtaaaagaccatgcaagaggcaaaataaaacttgaagtgaatgcttgt

SEQ ID NO: 152964 - DNA, 3314 bp, Homo sapiens
  Payload ID: 10087
  Gene Symbol: MGEA5
  Gene Name: meningioma expressed antigen 5 (hyaluronidase)
  Uniprot ID: O60502
  ENST ID: ENST00000370094
  CDS Start-End: 397-2430
aggcagcagcagagggagagctcggggcttggaggggaaacagcggaagacctaagattatcgggagggcagcagaggcagagaacgaggacaggacccttggccgtcttcttccagggaacgagaggtcacagcctcgctctccgcttaggcttctggcgccccagcttaaagccgaggctgcggctgacaaagggctcgcgccggtgccgccgcccttctcatccgggcattcgggtccctgcggagagggagggggaagggcagagggggaggggaaggagccggaggggcgcacacttggagctgaagccctctccagggctccgggccggtgccccaacggacagaggtcgaggaggacccgcagaggtggcagcggccgggggcaggaggatggtgcagaaggagagtcaagcgacgttggaggagcgggagagcgagctcagctccaaccctgccgcctctgcgggggcatcgctggagccgccggcagctccggcacccggagaagacaaccccgccggggctgggggagcggcggtggccggggctgcaggaggggctcggcggttcctctgcggtgtggtggaaggattttatggaagaccttgggttatggaacagagaaaagaactctttagaaggctccagaaatgggaattaaatacatacttgtatgccccaaaagatgactacaaacataggatgttttggcgagagatgtattcagtggaggaagctgagcaacttatgactctcatctctgctgcacgagaatatgagatagagttcatctatgcgatctcacctggattggatatcactttttctaaccccaaggaagtatccacattgaaacgtaaattggaccaggtttctcagtttgggtgcagatcatttgctttgctttttgatgatatagaccataatatgtgtgcagcagacaaagaggtattcagttcttttgctcatgcccaagtctccatcacaaatgaaatctatcagtacctaggagagccagaaactttcctcttctgtcccacagaatactgtggcactttctgttatccaaatgtgtctcagtctccatatttaaggactgtgggtgaaaagcttctacctggaattgaagtgctttggacaggtcccaaagttgtttctaaagaaattccagtagagtccatcgaagaggtttctaagattattaagagagctccagtaatctgggataacattcatgctaatgattatgatcagaagagactgtttctgggcccgtacaaaggaagatccacagaactcatcccacggttaaaaggagtcctcactaatccaaattgtgaatttgaagccaactacgttgctatccacacccttgccacctggtacaaatcaaacatgaatggagtgagaaaagatgtagtgatgactgacagtgaagatagtactgtgtccatccagataaaattagaaaatgaaggcagtgatgaagatattgaaactgatgtactctatagtccacagatggctctaaagctagcattaacagaatggttgcaagagtttggtgtgcctcatcaatacagcagtaggcaagttgcacacagtggagctaaagcaagtgtagttgatgggactcctttagttgcagcaccctctttaaatgccacaaccgtagtaacaacagtttatcaggagcccattatgagccagggagcagccttgagtggtgagcctactactctgaccaaggaagaagaaaagaaacagcctgatgaagaacccatggacatggtggtggaaaaacaagaagaaacggaccacaagaatgacaatcaaatactgagtgaaattgttgaagcgaaaatggcagaggaattgaaaccaatggacactgataaagagagcatagctgaatcaaaatccccagagatgtccatgcaagaagattgtattagtgacattgcccccatgcaaactgatgaacagacaaacaaggagcagtttgtgccaggtccaaatgaaaagcctttgtacactgcggaaccagtgaccctggaggatttgcagttacttgctgatctattctaccttccttacgagcatggacccaaaggagcacagatgttacgggaatttcaatggcttcgagcaaatagtagtgttgtcagtgtcaattgcaaaggaaaagactctgaaaaaattgaagaatggcggtcacgagcagccaagtttgaagagatgtgtggactagtgatgggaatgttcactcggctctccaattgtgccaacaggacaattctttatgacatgtactcctatgtttgggatatcaagagtataatgtctatggtgaagtcttttgtacagtggttaggtaggtgcaccaggaataatctcttctcctcaaatatattgtccctttaaaaaaaattatcccacagggagaaaaacatttagggaattggcacatttccaagtctcttcaattcgttgcctaggtttctttcaaaaataggcattattgaagacttgagatgcaagtcttagtaaatacatcaagcacattaatttttctcccttgggctaattcagcataagtatcttaaaagtatgttagaaagtactgactttaacttgctctgactgaatgctttctggatggaaccctgtataccacttttatctgatttggagatgagacactatgaaatgtgactccacaagctttctgctgcttgctgtgtcttgataacattaatgctatgtttaacagaacaattgctgaaatgacctaaagggcctggcaagaggaagccatcctcccagccctgtgcgcatgcgagctttagtgtaaggctattctggtgctattcagtattatttcacgtggctttttctttatccttctaccaagtattggttttaccaggggatagaaattgtaatcccctaaacatctctgctacattaaatggacttttgtatgtctcctttgaacactgattttttttttttaaattgtcaaacttggtaaaaagcaccagcatggccaagtttctctagggacttcatttcattttcaggttttcaatccagctataaggaatatgtaatggacttatatacagcacacagcaggcagcaaggctgactgacatgtcatagttttcatagtagtcacaaatactatgatgggtttcatggtcttggttgtgaaatagatatctgaaacaccgtgagcttagaataaaaagtagtagtgagattttccactttctgcctgtatacctttgagctcttaaatattt

SEQ ID NO: 152965 - DNA, 5043 bp, Homo sapiens
  Payload ID: 10087
  Gene Symbol: MGEA5
  Gene Name: meningioma expressed antigen 5 (hyaluronidase)
  Uniprot ID: O60502
  ENST ID: ENST00000439817
  CDS Start-End: 444-3035
ggtctgcagcgcaagcgcagtgcggataaacaggaagcgggcggtggaggcagcagcagagggagagctcggggcttggaggggaaacagcggaagacctaagattatcgggagggcagcagaggcagagaacgaggacaggacccttggccgtcttcttccagggaacgagaggtcacagcctcgctctccgcttaggcttctggcgccccagcttaaagccgaggctgcggctgacaaagggctcgcgccggtgccgccgcccttctcatccgggcattcgggtccctgcggagagggagggggaagggcagagggggaggggaaggagccggaggggcgcacacttggagctgaagccctctccagggctccgggccggtgccccaacggacagaggtcgaggaggacccgcagaggtggcagcggccgggggcaggaggatggtgcagaaggagagtcaagcgacgttggaggagcgggagagcgagctcagctccaaccctgccgcctctgcgggggcatcgctggagccgccggcagctccggcacccggagaagacaaccccgccggggctgggggagcggcggtggccggggctgcaggaggggctcggcggttcctctgcggtgtggtggaaggattttatggaagaccttgggttatggaacagagaaaagaactctttagaaggctccagaaatgggaattaaatacatacttgtatgccccaaaagatgactacaaacataggatgttttggcgagagatgtattcagtggaggaagctgagcaacttatgactctcatctctgctgcacgagaatatgagatagagttcatctatgcgatctcacctggattggatatcactttttctaaccccaaggaagtatccacattgaaacgtaaattggaccaggtttctcagtttgggtgcagatcatttgctttgctttttgatgatatagaccataatatgtgtgcagcagacaaagaggtattcagttcttttgctcatgcccaagtctccatcacaaatgaaatctatcagtacctaggagagccagaaactttcctcttctgtcccacagaatactgtggcactttctgttatccaaatgtgtctcagtctccatatttaaggactgtgggtgaaaagcttctacctggaattgaagtgctttggacaggtcccaaagttgtttctaaagaaattccagtagagtccatcgaagaggtttctaagattattaagagagctccagtaatctgggataacattcatgctaatgattatgatcagaagagactgtttctgggcccgtacaaaggaagatccacagaactcatcccacggttaaaaggagtcctcactaatccaaattgtgaatttgaagccaactacgttgctatccacacccttgccacctggtacaaatcaaacatgaatggagtgagaaaagatgtagtgatgagtaggcaagttgcacacagtggagctaaagcaagtgtagttgatgggactcctttagttgcagcaccctctttaaatgccacaaccgtagtaacaacagtttatcaggagcccattatgagccagggagcagccttgagtggtgagcctactactctgaccaaggaagaagaaaagaaacagcctgatgaagaacccatggacatggtggtggaaaaacaagaagaaacggaccacaagaatgacaatcaaatactgagtgaaattgttgaagcgaaaatggcagaggaattgaaaccaatggacactgataaagagagcatagctgaatcaaaatccccagagatgtccatgcaagaagattgtattagtgacattgcccccatgcaaactgatgaacagacaaacaaggagcagtttgtgccaggtccaaatgaaaagcctttgtacactgcggaaccagtgaccctggaggatttgcagttacttgctgatctattctaccttccttacgagcatggacccaaaggagcacagatgttacgggaatttcaatggcttcgagcaaatagtagtgttgtcagtgtcaattgcaaaggaaaagactctgaaaaaattgaagaatggcggtcacgagcagccaagtttgaagagatgtgtggactagtgatgggaatgttcactcggctctccaattgtgccaacaggacaattctttatgacatgtactcctatgtttgggatatcaagagtataatgtctatggtgaagtcttttgtacagtggttagggtgtcgtagtcattcttcagcacaattcttaattggagaccaagaaccctgggcctttagaggtggtctagcaggagagttccagcgtttgctgccaattgatggggcaaatgatctcttttttcagccacctccactgactcctacctccaaagtttatactatcagaccttattttcctaaggatgaggcatccgtgtacaagatttgcagagaaatgtatgacgatggagtgggtttaccctttcaaagtcagcctgatcttattggagacaagttagtaggagggctgctttccctcagcctggattactgctttgtcctagaagatgaagatggcatatgtggttatgccttgggcactgtagatgtgaccccctttattaaaaaatgtaaaatttcctggatccccttcatgcaggagaagtataccaagccaaatggtgacaaggaactctctgaggctgagaaaataatgttgagtttccatgaagaacaggaagtactgccagaaactttccttgctaatttcccttctctgataaagatggacattcacaaaaaagtaactgacccaagtgtggccaaaagcatgatggcttgcctcctgtcttcactgaaggctaatggctcccggggagctttctgtgaagtgagaccagatgataaaagaattctggaattttacagcaagttaggatgttttgaaattgcaaaaatggaaggatttccaaaggatgtggttatacttggtcggagcctgtgacatttgttgacactgtgaactgtccaaaagtctcttaactgcaccttgtgaatggtagttgaggtcttcatacagttcagcctctagaatggtaacaaatcagccaattggattcgaaacaaagaagactatgtaaaactcacccatcacactttgagactactcactggttggaagaatatagtattgcagcaaatcctgtatgaaagagagatgtgggcttcctttttgagtcttgtgttaggtgctgagaccttttacatgggcttatacagggagagagtcttcaataaatgtagtcagcactattttctgcatccagtgtggttgcgtttctcacctgagagtaatcaagataacatctgtcatcttccttggtttattgagtgaaatgcctctcagtcttaggggacatggcagagatgaaagaaagaaagagtgggtttcagaagtgtcagggtggagtgattccaagtgggatggttgtggcattagtttaagctgaataaataatttcaatttggggcagttattctgctttttgtaaagccgtggccaattgtctcctgtaatgactgttggttcaggcatgttgtactttgtagggacaaatgtgcatttgtttgtggcaaaagcctacaattgacaaacttgtaaatttctttgtatataaactagctgtaacctgactatcctttgtgtttactgtttttgtaaatttttttcctctataaatgaaagggtgttggttcagaatggcactttgaataatgtaaaccagtgaaaagtggattttctttacttttgtctttgggtttggggttgtttttgttctttttgaagttttattatttttaaagtgcctcccacctaggcgtaggccatgaccatttggggtacgagagcctaattttgtaggacttaatctgttgaaaagtgcagttacttctggaaattaacctcaatattaggtcagcatgtgaaatgttggatttgacatgtcaggtagggttcagggactgattggtcccatttgccctcaggtcagttgtttaatctcaagacctgttactactgattttattaaatcagagtctttaattcttgcatgtttgtatctaatttctgaatgaatgagcacactttaaccagttatttacagttacctttttcctttaaccggattgtgaaagcttcatgtattttaatttagattctgtgtttttaagggttctgagcatgaagctggcagatagtcggcaggactcattttttcatcatggctggctgatttctccatagattgataacagtattttgttatcttgcttctctgtagttttgcatcagctgtttaactttgagctgagtgaggggagaggggtaaagagaaagaaacttaagttttctttcacagaactccaccattgtgggctttgagagagccctaaagcattgtacctagtggtacctagtgacttccaaccaaagcctttgagtatgcactaaataggtgagaagaaaggagagaaggtttttaggttagaaacctttaaccgatagaaggatatggtatgttgtaaagctggaaccaagtttgcatttttgagggcttgagatgaagggaagactcttaccagatagtaagacagctgagttttcctcagttttctcgtcttaacactagtggacaattctagcattttgtttggaggatttcagagttaacctcatggaattcaggattttttagcaagtttgcttttggttttatcttggcttttagtaatcatgttggctggtctggtcacaggtgactgtgaaacagatgccctggtcttgctttcatcactctaggatcatgaagtgctatgctatttcctggttatgaatattaaggttggaattacatttttattgattgtttggatcagagctcagttcctgtagaaaacgaactgtaaaagaccatgcaagaggcaaaataaaacttgaagtgaatgcttgt

SEQ ID NO: 152966 - DNA, 769 bp, Homo sapiens
  Payload ID: 10087
  Gene Symbol: MGEA5
  Gene Name: meningioma expressed antigen 5 (hyaluronidase)
  ENST ID: ENST00000429860
  CDS Start-End: 1-769
gctgcaggaggggctcggcggttcctctgcggtgtggtggaaggattttatggaagaccttgggttatggaacagagaaaagaactctttagaaggctccagaaatgggaattaaatacatacttgtatgccccaaaagatgactacaaacataggatgttttggcgagagatgtattcagtggaggaagctgagcaacttatgactctcatctctgctgcacgagaatatgagatagagttcatctatgcgatctcacctggattggatatcactttttctaaccccaaggaagtatccacattgaaacgtaaattggaccaggtttctcagtttgggtgcagatcatttgctttgctttttgatgatatagaccataatatgtgtgcagcagacaaagaggtattcagttcttttgctcatgcccaagtctccatcacaaatgaaatctatcagtacctaggagagccagaaactttcctcttctgtcccacaggtcccaaagttgtttctaaagaaattccagtagagtccatcgaagaggtttctaagattattaagagagctccagtaatctgggataacattcatgctaatgattatgatcagaagagactgtttctgggcccgtacaaaggaagatccacagaactcatcccacggttaaaaggagtcctcactaatccaaattgtgaatttgaagccaactacgttgctatccacacccttgccacctggtacaaatcaaacatgaatggagtgagaaaag

SEQ ID NO: 152967 - DNA, 2892 bp, Homo sapiens
  Payload ID: 10088
  Gene Symbol: MEP1A
  Gene Name: meprin A, alpha (PABA peptide hydrolase)
  Uniprot ID: Q16819
  ENST ID: ENST00000230588
  CDS Start-End: 10-2250
cttgcagcaatggcttggattagatccacttgcattctcttttttaccttgctttttgcccacatagcagctgtaccgattaagtatcttcctgaagaaaatgtacatgatgcagattttggtgaacagaaggatatttcagaaatcaatttagctgcaggcttggacctctttcaaggggacatcctcttgcagaaatccagaaatggcctgagagacccaaacaccaggtggacgttccccattccttacatcttggctgataatttggggctgaatgctaaaggagccattctgtatgcctttgagatgttccgtctcaagtcctgtgtggatttcaagccctatgaaggagagagctcatatatcatatttcaacagtttgatgggtgctggtctgaggttggtgaccaacatgtgggacagaacatttccattggccaaggatgtgcctataaggccatcatagaacacgagatcctgcatgctttgggattttaccacgagcagtcaaggacggaccgggatgattatgtgaacatctggtgggaccaaattctttcaggttaccagcacaactttgacacctatgatgatagcttaatcacagacctcaatacaccctatgattatgagtctttgatgcactaccagcctttctcatttaacaagaatgcaagtgttcccaccatcacagccaagatccctgagtttaactccattatcggacagcgcctggatttcagtgccattgatttagagaggctgaaccgaatgtacaattgcaccacaactcacactcttttggaccactgtacttttgagaaggcaaacatctgtggaatgattcagggcaccagagatgacactgactgggcccatcaggacagtgctcaggctggagaagtggatcacaccttgttgggacaatgcacaggtgccggctacttcatgcagttcagcaccagctcggggtccgcggaagaggcagccctactggagtctcggattctttacccaaagaggaagcagcagtgcctgcaatttttctataaaatgacgggaagtccttcagacagactcgttgtctgggtcaggagggatgacagcacaggcaatgttcgcaagttggtgaaggtgcagacttttcaaggagatgatgaccacaattggaaaattgcccatgtggtgctcaaagaggaacagaagtttcgctaccttttccagggcacaaaaggcgaccctcagaactcaactgggggaatttacctagatgacatcactctgacagaaaccccctgccccacaggggtctggacagtccggaatttctcccaagtccttgagaacaccagcaaaggggacaagcttcagagccctcgattctacaattcggagggatatggttttggggtaactttatacccaaatagcagagaaagctctggttacttgagacttgcttttcatgtgtgcagtggggagaacgatgctatcctggagtggccggtagaaaacagacaggtgataattaccatccttgaccaggagcctgatgtccggaacaggatgtcctcaagcatggtgttcactacctcgaagtcgcacacatctccagcgataaatgacactgtcatctgggacaggccgtccagggtgggaacctatcatacggactgtaattgttttagaagcatcgacttgggctggagtggtttcatttcccaccaaatgctgaaaaggaggagtttcctgaaaaatgatgacctcatcatatttgtggactttgaagatatcacccacctcagccagactgaagttcccactaaaggcaaaagactgagcccccaaggcctcattctccaaggccaggagcagcaggtctccgaagaaggttcgggaaaggccatgttagaggaagccctacctgtcagcctgagccaggggcagcccagccgacagaagcggtcggtggagaacacaggccccctggaggaccataactggccacagtacttcagagacccatgtgacccaaacccttgccaaaatgacggcatctgtgtgaacgtgaaggggatggcgagctgcaggtgcatctctggacatgctttcttctacacgggggagcgctgtcaggccgtgcaggtgcacggcagtgtcctgggcatggtgatcggaggcacggctggcgtgatcttcttgaccttctccatcatcgccatcctttcccaaaggccaaggaagtgacctgcctgctggcattggccagaccacagcagcacctcctccatgcaggccttaactttcccatggtcaatgcagtttttatcagccttgctttggataggacctccaaggactaaggcctccagccccatgtgtgacccttgtcatctctctgccccacataattctgttactttgctatgtgctcctaatgtatctagtgtgtcctgtgacaacactcatcacacttcattgtaaatcacttgttttattgactgtctttcctatagactgtaagctccatgagggcaggcacatgttgttctcattgaccgtgctggccccagtgcctagatgcatggctggcacattgttggcactcaacaatggttgaatgaataaaacaataaatgaatgaataactaagatatagaaactctcatttatattgcagattgaatatatatgatgaaattcttatgttgaatatgttagaatcaaatactcatttttcattagatacagtagtgtcatcactcttttaagatcttgttaaagatttcaaataaaggtacttctgggcagccaggctgcacagcatttgctttcctctgagattctaagagaaggcctttaataaatttaataaatattgagttagca

SEQ ID NO: 152968 - DNA, 2971 bp, Homo sapiens
  Payload ID: 10088
  Gene Symbol: MEP1A
  Gene Name: meprin A, alpha (PABA peptide hydrolase)
  ENST ID: ENST00000611727
  CDS Start-End: 1-2325
atggcttggattagatccacttgcattctcttttttaccttgctttttgcccacatagcagctgtaccggtaagtcgagtcctgctttttggatatttagaaatattaattctagtatacattatccattttctgtatatttatttttttcagattaagtatcttcctgaagaaaatgtacatgatgcagattttggtgaacagaaggatatttcagaaatcaatttagctgcaggcttggacctctttcaaggggacatcctcttgcagaaatccagaaatggcctgagagacccaaacaccaggtggacgttccccattccttacatcttggctgataatttggggctgaatgctaaaggagccattctgtatgcctttgagatgttccgtctcaagtcctgtgtggatttcaagccctatgaaggagagagctcatatatcatatttcaacagtttgatgggtgctggtctgaggttggtgaccaacatgtgggacagaacatttccattggccaaggatgtgcctataaggccatcatagaacacgagatcctgcatgctttgggattttaccacgagcagtcaaggacggaccgggatgattatgtgaacatctggtgggaccaaattctttcaggttaccagcacaactttgacacctatgatgatagcttaatcacagacctcaatacaccctatgattatgagtctttgatgcactaccagcctttctcatttaacaagaatgcaagtgttcccaccatcacagccaagatccctgagtttaactccattatcggacagcgcctggatttcagtgccattgatttagagaggctgaaccgaatgtacaattgcaccacaactcacactcttttggaccactgtacttttgagaaggcaaacatctgtggaatgattcagggcaccagagatgacactgactgggcccatcaggacagtgctcaggctggagaagtggatcacaccttgttgggacaatgcacaggtgccggctacttcatgcagttcagcaccagctcggggtccgcggaagaggcagccctactggagtctcggattctttacccaaagaggaagcagcagtgcctgcaatttttctataaaatgacgggaagtccttcagacagactcgttgtctgggtcaggagggatgacagcacaggcaatgttcgcaagttggtgaaggtgcagacttttcaaggagatgatgaccacaattggaaaattgcccatgtggtgctcaaagaggaacagaagtttcgctaccttttccagggcacaaaaggcgaccctcagaactcaactgggggaatttacctagatgacatcactctgacagaaaccccctgccccacaggggtctggacagtccggaatttctcccaagtccttgagaacaccagcaaaggggacaagcttcagagccctcgattctacaattcggagggatatggttttggggtaactttatacccaaatagcagagaaagctctggttacttgagacttgcttttcatgtgtgcagtggggagaacgatgctatcctggagtggccggtagaaaacagacaggtgataattaccatccttgaccaggagcctgatgtccggaacaggatgtcctcaagcatggtgttcactacctcgaagtcgcacacatctccagcgataaatgacactgtcatctgggacaggccgtccagggtgggaacctatcatacggactgtaattgttttagaagcatcgacttgggctggagtggtttcatttcccaccaaatgctgaaaaggaggagtttcctgaaaaatgatgacctcatcatatttgtggactttgaagatatcacccacctcagccagactgaagttcccactaaaggcaaaagactgagcccccaaggcctcattctccaaggccaggagcagcaggtctccgaagaaggttcgggaaaggccatgttagaggaagccctacctgtcagcctgagccaggggcagcccagccgacagaagcggtcggtggagaacacaggccccctggaggaccataactggccacagtacttcagagacccatgtgacccaaacccttgccaaaatgacggcatctgtgtgaacgtgaaggggatggcgagctgcaggtgcatctctggacatgctttcttctacacgggggagcgctgtcaggccgtgcaggtgcacggcagtgtcctgggcatggtgatcggaggcacggctggcgtgatcttcttgaccttctccatcatcgccatcctttcccaaaggccaaggaagtgacctgcctgctggcattggccagaccacagcagcacctcctccatgcaggccttaactttcccatggtcaatgcagtttttatcagccttgctttggataggacctccaaggactaaggcctccagccccatgtgtgacccttgtcatctctctgccccacataattctgttactttgctatgtgctcctaatgtatctagtgtgtcctgtgacaacactcatcacacttcattgtaaatcacttgttttattgactgtctttcctatagactgtaagctccatgagggcaggcacatgttgttctcattgaccgtgctggccccagtgcctagatgcatggctggcacattgttggcactcaacaatggttgaatgaataaaacaataaatgaatgaataactaagatatagaaactctcatttatattgcagattgaatatatatgatgaaattcttatgttgaatatgttagaatcaaatactcatttttcattagatacagtagtgtcatcactcttttaagatcttgttaaagatttcaaataaaggtacttctgggcagccaggctgcacagcatttgctttcctctgagattctaagagaaggcctttaataaatttaataaatattgagttagcacctt

SEQ ID NO: 152969 - DNA, 2312 bp, Homo sapiens
  Payload ID: 10089
  Gene Symbol: MEP1B
  Gene Name: meprin A, beta
  Uniprot ID: Q16820
  ENST ID: ENST00000269202
  CDS Start-End: 48-2153
tcaaccctgaatgtcatagttagctactttcaactggaagctacaacatggatttatggaatctgtcttggtttctgttcttggatgctcttctcgtgatttctggcttggcaactccagaaaactttgatgtagatggcggaatggaccaggacatatttgatatcaatgaaggtttgggactggatctttttgagggtgacatcagacttgatagggcacaaattagaaattccatcattggagaaaagtatagatggcctcataccattccatatgttctagaagatagcttggaaatgaatgctaagggagttatcctcaatgcatttgaacgttatcgccttaaaacatgtattgactttaagccttgggctggagaaacaaactatatatcagtgttcaagggcagtggctgctggtcttcagtaggaaataggcgggttgggaagcaagaactttccatcggggcaaactgtgaccgaatagcaacagttcaacacgagttcctccacgctctgggattctggcatgagcagtcgcgttctgaccgggatgactatgtcaggataatgtgggacagaattctgtcaggcagagagcacaattttaacacctatagtgacgatatatcagattccctgaatgttccctatgattacacttcagtaatgcactacagtaaaactgcattccaaaatggaacagagccgacaattgtcacaagaatctcagactttgaggatgtgatcggccaacgaatggatttcagtgactctgatctcctaaagttgaatcaactgtataactgctcctcttccttgagttttatggactcgtgcagttttgaactggaaaatgtgtgtggcatgatccaaagttcaggagataatgctgactggcaacgggtttcacaggttcccagggggccagagagtgatcactccaacatgggccagtgccaaggttctggtttcttcatgcatttcgatagcagctctgtaaatgtgggggccacagcagtgctggaaagtagaacgctgtaccctaaaagaggatttcagtgcctgcaattttacttatataacagtggcagtgaaagtgatcaactgaacatctatatcagggagtattctgcagacaatgtggatggcaatttaacccttgtggaagaaataaaagaaatacccactgggagctggcaactttatcatgtaacattgaaagtgaccaagaagtttagagtggtgtttgaaggacgcaaaggctctggtgcatcactgggtggtctgtctattgatgacatcaatctttcggaaacacggtgccctcatcatatctggcatataaggaatttcacacagttcattggcagcccaaatggaactctgtatagccctccattttactcttctaaaggttatgcctttcagatttacttaaatctagcccatgtgactaatgcagggatatatttccacttgatctctggagccaatgatgatcaattacagtggccatgtccttggcaacaagccacaatgacacttttggatcaaaatcctgacattcgacagcgtatgtccaatcagcggagtataactacagacccatttatgaccaccgataatggaaactatttctgggacaggccttctaaagtgggaacagtggctttgttctctaatggaactcagtttagaagaggtgggggctatggaaccagtgcctttataacccacgaaaggctgaaaagcagagattttataaaaggagatgatgtttatatcctactgacagtggaagacatatctcacctcaactctacacaaatccagctaacaccagcccctagtgttcaagacctctgctcaaaaaccacctgtaaaaatgacggtgtctgcactgttcgagatggcaaagctgagtgcaggtgccagtcaggggaagactggtggtacatgggagaaaggtgtgaaaagagaggctccacccgagacaccatagtcattgctgtttcatctactgttgctgtgtttgccttgatgctgatcatcacccttgtcagtgtctattgcaccaggaagaaatatcgtgaaaggatgagctcaaatcgaccaaatttgactccgcaaaatcagcatgctttttgaagattaactcgacaatatggccagctaatgaaattaaaaaggattcttcatcatggatttcgcctaagtgatattacagccacctcattcttctaaaagtggatatttttctgtaaatagctggaaatattataaatcactattttggtcaaagtcaaa

SEQ ID NO: 152970 - DNA, 483 bp, Homo sapiens
  Payload ID: 10089
  Gene Symbol: MEP1B
  Gene Name: meprin A, beta
  ENST ID: ENST00000581184
  CDS Start-End: 142-483
gaagaagcgaactgccatggtactgtagctgcaacatcaactcctgcctgggtctttagcctgctggcctaccctgcagattttggacttgccagcctccacaatcatgcaactccagaaaactttgatgtagatggcggaatggaccaggacatatttgatatcaatgaaggtttgggactggatctttttgagggtgacatcagacttgatagggcacaaattagaaattccatcattggagaaaagtatagatggcctcataccattccatatgttctagaagatagcttggaaatgaatgctaagggagttatcctcaatgcatttgaacgttatcgccttaaaacatgtattgactttaagccttgggctggagaaacaaactatatatcagtgttcaagggcagtggctgctggtcttcagtaggaaataggcgggttgggaagcaagaactttccatcggggcaaactgtgaccga

SEQ ID NO: 152971 - DNA, 2308 bp, Homo sapiens
  Payload ID: 10089
  Gene Symbol: MEP1B
  Gene Name: meprin A, beta
  ENST ID: ENST00000581447
  CDS Start-End: 47-2149
caaccctgaatgtcatagttagctactttcaactggaagctacaacatggatttatggaatctgtcttggtttctgttcttggatgctcttctcgtgatttctggcttggcaactccagaaaactttgatgtagatggcggaatggaccaggacatatttgatatcaatgaaggtttgggactggatctttttgagggtgacatcagacttgatagggcacaaattagaaattccatcattggagaaaagtatagatggcctcataccattccatatgttctagaagatagcttggaaatgaatgctaagggagttatcctcaatgcatttgaacgttatcgccttaaaacatgtattgactttaagccttgggctggagaaacaaactatatatcagtgttcaagggcagtggctgctggtcttcagtaggaaataggcgggttgggaagcaagaactttccatcggggcaaactgtgaccgaatagcaacagttcaacacgagttcctccacgctctgggattctggcatgagcagtcgcgttctgaccgggatgactatgtcaggataatgtgggacagaattctgtcaggcagagagcacaattttaacacctatagtgacgatatatcagattccctgaatgttccctatgattacacttcagtaatgcactacagtaaaactgcattccaaaatggaacagagccgacaattgtcacaagaatctcagactttgaggatgtgatcggccaacgaatggatttcagtgactctgatctcctaaagttgaatcaactgtataactgctcctcttccttgagttttatggactcgtgcagttttgaactggaaaatgtgtgtggcatgatccaaagttcaggagataatgctgactggcaacgggtttcacaggttcccagggggccagagagtgatcactccaacatgggccagtgccaaggttctggtttcttcatgcatttcgatagcagctctgtaaatgtgggggccacagcagtgctggaaagtagaacgctgtaccctaaaagaggatttcagtgcctgcaattttacttatataacagtggcagtgaaagtgatcaactgaacatctatatcagggagtattctgcagacaatgtggatggcaatttaacccttgtggaagaaataaaagaaatacccactgggagctggcaactttatcatgtaacattgaaagtgaccaagaagtttagagtggtgtttgaaggacgcaaaggctctggtgcatcactgggtggtctgtctattgatgacatcaatctttcggaaacacggtgccctcatcatatctggcatataaggaatttcacacagttcattggcagcccaaatggaactctgtatagccctccattttactcttctaaaggttatgcctttcagatttacttaaatctagcccatgtgactaatgcagggatatatttccacttgatctctggagccaatgatgatcaattacagtggccatgtccttggcaacaagccacaatgacacttttggatcaaaatcctgacattcgacagcgtatgtccaatcagcggagtataactacagacccatttatgaccaccgataatggaaactatttctgggacaggccttctaaagtgggaacagtggctttgttctctaatggaactcagtttagaagaggtgggggctatggaaccagtgcctttataacccacgaaaggctgaaaagcagagattttataaaaggagatgatgtttatatcctactgacagtggaagacatatctcacctcaactctacacaaatccagctaacaccagcccctagtgttcaagacctctgctcaaaaaccacctgtaaaaatgacggtgtctgcactgttcgagatggcaaagctgagtgcaggtgccagtcaggggaagactggtggtacatgggagaaaggtgtgaaaagagaggctccacccgagacaccatagtcattgctgtttcatctactgttgctgtgtttgccttgatgctgatcatcacccttgtcagtgtctattgcaccaggaagaaatatcgtgaaaggatgagctcaaatcgaccaaatttgactccgcaaaatcatgctttttgaagattaactcgacaatatggccagctaatgaaattaaaaaggattcttcatcatggatttcgcctaagtgatattacagccacctcattcttctaaaagtggatatttttctgtaaatagctggaaatattataaatcactattttggtcaaagtcaaa

SEQ ID NO: 152972 - DNA, 3954 bp, Homo sapiens
  Payload ID: 10090
  Gene Symbol: MERTK
  Gene Name: MER proto-oncogene, tyrosine kinase
  Uniprot ID: Q12866
  ENST ID: ENST00000295408
  CDS Start-End: 258-3257
aacctgctgggcccgccgggactcgcccccctgcccgctcctctcctccagccccggccggcctcggctcggcccccggcccgccccttccagccctcggcacctcccgccggccgcttggctccgccactcggcactcactgcccgggccgcccggacagggagcttcgctggcgcgcttggccggcgacaggacaggttcgggacgtccatctgtccatccgtccggagagaaattacagatccgcagccccgggatggggccggccccgctgccgctgctgctgggcctcttcctccccgcgctctggcgtagagctatcactgaggcaagggaagaagccaagccttacccgctattcccgggaccttttccagggagcctgcaaactgaccacacaccgctgttatcccttcctcacgccagtgggtaccagcctgccttgatgttttcaccaacccagcctggaagaccacatacaggaaacgtagccattccccaggtgacctctgtcgaatcaaagcccctaccgcctcttgccttcaaacacacagttggacacataatactttctgaacataaaggtgtcaaatttaattgctcaatcagtgtacctaatatataccaggacaccacaatttcttggtggaaagatgggaaggaattgcttggggcacatcatgcaattacacagttttatccagatgatgaagttacagcaataatcgcttccttcagcataaccagtgtgcagcgttcagacaatgggtcgtatatctgtaagatgaaaataaacaatgaagagatcgtgtctgatcccatctacatcgaagtacaaggacttcctcactttactaagcagcctgagagcatgaatgtcaccagaaacacagccttcaacctcacctgtcaggctgtgggcccgcctgagcccgtcaacattttctgggttcaaaacagtagccgtgttaacgaacagcctgaaaaatccccctccgtgctaactgttccaggcctgacggagatggcggtcttcagttgtgaggcccacaatgacaaagggctgaccgtgtccaagggagtgcagatcaacatcaaagcaattccctccccaccaactgaagtcagcatccgtaacagcactgcacacagcattctgatctcctgggttcctggttttgatggatactccccgttcaggaattgcagcattcaggtcaaggaagctgatccgctgagtaatggctcagtcatgatttttaacacctctgccttaccacatctgtaccaaatcaagcagctgcaagccctggctaattacagcattggtgtttcctgcatgaatgaaataggctggtctgcagtgagcccttggattctagccagcacgactgaaggagccccatcagtagcacctttaaatgtcactgtgtttctgaatgaatctagtgataatgtggacatcagatggatgaagcctccgactaagcagcaggatggagaactggtgggctaccggatatcccacgtgtggcagagtgcagggatttccaaagagctcttggaggaagttggccagaatggcagccgagctcggatctctgttcaagtccacaatgctacgtgcacagtgaggattgcagccgtcaccagagggggagttgggcccttcagtgatccagtgaaaatatttatccctgcacacggttgggtagattatgccccctcttcaactccggcgcctggcaacgcagatcctgtgctcatcatctttggctgcttttgtggatttattttgattgggttgattttatacatctccttggccatcagaaaaagagtccaggagacaaagtttgggaatgcattcacagaggaggattctgaattagtggtgaattatatagcaaagaaatccttctgtcggcgagccattgaacttaccttacatagcttgggagtcagtgaggaactacaaaataaactagaagatgttgtgattgacaggaatcttctaattcttggaaaaattctgggtgaaggagagtttgggtctgtaatggaaggaaatcttaagcaggaagatgggacctctctgaaagtggcagtgaagaccatgaagttggacaactcttcacagcgggagatcgaggagtttctcagtgaggcagcgtgcatgaaagacttcagccacccaaatgtcattcgacttctaggtgtgtgtatagaaatgagctctcaaggcatcccaaagcccatggtaattttacccttcatgaaatacggggacctgcatacttacttactttattcccgattggagacaggaccaaagcatattcctctgcagacactattgaagttcatggtggatattgccctgggaatggagtatctgagcaacaggaattttcttcatcgagatttagctgctcgaaactgcatgttgcgagatgacatgactgtctgtgttgcggacttcggcctctctaagaagatttacagtggcgattattaccgccaaggccgcattgctaagatgcctgttaaatggatcgccatagaaagtcttgcagaccgagtctacacaagtaaaagtgatgtgtgggcatttggcgtgaccatgtgggaaatagctacgcggggaatgactccctatcctggggtccagaaccatgagatgtatgactatcttctccatggccacaggttgaagcagcccgaagactgcctggatgaactgtatgaaataatgtactcttgctggagaaccgatcccttagaccgccccaccttttcagtattgaggctgcagctagaaaaactcttagaaagtttgcctgacgttcggaaccaagcagacgttatttacgtcaatacacagttgctggagagctctgagggcctggcccagggctccacccttgctccactggacttgaacatcgaccctgactctataattgcctcctgcactccccgcgctgccatcagtgtggtcacagcagaagttcatgacagcaaacctcatgaaggacggtacatcctgaatgggggcagtgaggaatgggaagatctgacttctgccccctctgctgcagtcacagctgaaaagaacagtgttttaccgggggagagacttgttaggaatggggtctcctggtcccattcgagcatgctgcccttgggaagctcattgcccgatgaacttttgtttgctgacgactcctcagaaggctcagaagtcctgatgtgaggagaggtgcggggagacattccaaaaatcaagccaattcttctgctgtaggagaatccaattgtacctgatgtttttggtatttgtcttccttaccaagtgaactccatggccccaaagcaccagatgaatgttgttaagtaagctgtcattaaaaatacataatatatatttatttaaagagaaaaaatatgtgtatatcatggaaaaagacaaggatattttaataaaacattacttatttcatttcacttatcttgcatatcttaaaattaagcttcagctgctccttgatattaacatttgtacagagttgaagttgttttttcaagttcttttctttttcatgactattaaatgtaaaaatatttgtaaaatgaaatgccatatttgacttggcttctggtcttgatgtatttgataagaatgattcattcaatgtttaaagttgtataactgattaattttctgatatggcttcctaataaaatatgaataaggaaggatatgttgaacttacttgagacttgaaagacagtggtcggcagcggccttgtggcctttgcaaaggaattcccttaatgcctggtccttggggcaattgctctgaccattcttggcattgctttatagagatatggaaaaaccacaccagggtctgtagataaggaataaagaatattgaaggattgaaaaa

SEQ ID NO: 152973 - DNA, 3189 bp, Homo sapiens
  Payload ID: 10090
  Gene Symbol: MERTK
  Gene Name: MER proto-oncogene, tyrosine kinase
  ENST ID: ENST00000409780
  CDS Start-End: 215-2686
cgcccggacagggagcttcgctggcgcgcttggccggcgacaggacaggttcgggacgtccatctgtccatccgtccggagagaaattacagatccgcagccccgggatggggccggccccgctgccgctgctgctgggcctcttcctccccgcgctctggcgtagagcataaccagtgtgcagcgttcagacaatgggtcgtatatctgtaagatgaaaataaacaatgaagagatcgtgtctgatcccatctacatcgaagtacaaggacttcctcactttactaagcagcctgagagcatgaatgtcaccagaaacacagccttcaacctcacctgtcaggctgtgggcccgcctgagcccgtcaacattttctgggttcaaaacagtagccgtgttaacgaacagcctgaaaaatccccctccgtgctaactgttccaggcctgacggagatggcggtcttcagttgtgaggcccacaatgacaaagggctgaccgtgtccaagggagtgcagatcaacatcaaagcaattccctccccaccaactgaagtcagcatccgtaacagcactgcacacagcattctgatctcctgggttcctggttttgatggatactccccgttcaggaattgcagcattcaggtcaaggaagctgatccgctgagtaatggctcagtcatgatttttaacacctctgccttaccacatctgtaccaaatcaagcagctgcaagccctggctaattacagcattggtgtttcctgcatgaatgaaataggctggtctgcagtgagcccttggattctagccagcacgactgaaggagccccatcagtagcacctttaaatgtcactgtgtttctgaatgaatctagtgataatgtggacatcagatggatgaagcctccgactaagcagcaggatggagaactggtgggctaccggatatcccacgtgtggcagagtgcagggatttccaaagagctcttggaggaagttggccagaatggcagccgagctcggatctctgttcaagtccacaatgctacgtgcacagtgaggattgcagccgtcaccagagggggagttgggcccttcagtgatccagtgaaaatatttatccctgcacacggttgggtagattatgccccctcttcaactccggcgcctggcaacgcagatcctgtgctcatcatctttggctgcttttgtggatttattttgattgggttgattttatacatctccttggccatcagaaaaagagtccaggagacaaagtttgggaatgcattcacagaggaggattctgaattagtggtgaattatatagcaaagaaatccttctgtcggcgagccattgaacttaccttacatagcttgggagtcagtgaggaactacaaaataaactagaagatgttgtgattgacaggaatcttctaattcttggaaaaattctgggtgaaggagagtttgggtctgtaatggaaggaaatcttaagcaggaagatgggacctctctgaaagtggcagtgaagaccatgaagttggacaactcttcacagcgggagatcgaggagtttctcagtgaggcagcgtgcatgaaagacttcagccacccaaatgtcattcgacttctaggtgtgtgtatagaaatgagctctcaaggcatcccaaagcccatggtaattttacccttcatgaaatacggggacctgcatacttacttactttattcccgattggagacaggaccaaagcatattcctctgcagacactattgaagttcatggtggatattgccctgggaatggagtatctgagcaacaggaattttcttcatcgagatttagctgctcgaaactgcatgttgcgagatgacatgactgtctgtgttgcggacttcggcctctctaagaagatttacagtggcgattattaccgccaaggccgcattgctaagatgcctgttaaatggatcgccatagaaagtcttgcagaccgagtctacacaagtaaaagtgatgtgtgggcatttggcgtgaccatgtgggaaatagctacgcggggaatgactccctatcctggggtccagaaccatgagatgtatgactatcttctccatggccacaggttgaagcagcccgaagactgcctggatgaactgtatgaaataatgtactcttgctggagaaccgatcccttagaccgccccaccttttcagtattgaggctgcagctagaaaaactcttagaaagtttgcctgacgttcggaaccaagcagacgttatttacgtcaatacacagttgctggagagctctgagggcctggcccagggctccacccttgctccactggacttgaacatcgaccctgactctataattgcctcctgcactccccgcgctgccatcagtgtggtcacagcagaagttcatgacagcaaacctcatgaaggacggtacatcctgaatgggggcagtgaggaatgggaagatctgacttctgccccctctgctgcagtcacagctgaaaagaacagtgttttaccgggggagagacttgttaggaatggggtctcctggtcccattcgagcatgctgcccttgggaagctcattgcccgatgaacttttgtttgctgacgactcctcagaaggctcagaagtcctgatgtgaggagaggtgcggggagacattccaaaaatcaagccaattcttctgctgtaggagaatccaattgtacctgatgtttttggtatttgtcttccttaccaagtgaactccatggccccaaagcaccagatgaatgttgttaagtaagctgtcattaaaaatacataatatatatttatttaaagagaaaaaatatgtgtatatcatggaaaaagacaaggatattttaataaaacattacttatttcatttcacttatcttgcatatcttaaaattaagcttcagctgctccttgatattaacatttgtacagagttgaagttgttttttcaagttcttttctttttcatgactattaaatgtaaaaatatttgtaaaatgaaatgccatatttgacttggcttctggtcttgatgtatttgataagaatgattcattcaatgtttaaagttgtataactgattaattttctgatatggcttcctaataaaatatgaataaggaa

SEQ ID NO: 152974 - DNA, 3600 bp, Homo sapiens
  Payload ID: 10090
  Gene Symbol: MERTK
  Gene Name: MER proto-oncogene, tyrosine kinase
  Uniprot ID: Q12866
  ENST ID: ENST00000421804
  CDS Start-End: 129-3128
ctcggcactcactgcccgggccgcccggacagggagcttcgctggcgcgcttggccggcgacaggacaggttcgggacgtccatctgtccatccgtccggagagaaattacagatccgcagccccgggatggggccggccccgctgccgctgctgctgggcctcttcctccccgcgctctggcgtagagctatcactgaggcaagggaagaagccaagccttacccgctattcccgggaccttttccagggagcctgcaaactgaccacacaccgctgttatcccttcctcacgccagtgggtaccagcctgccttgatgttttcaccaacccagcctggaagaccacatacaggaaacgtagccattccccaggtgacctctgtcgaatcaaagcccctaccgcctcttgccttcaaacacacagttggacacataatactttctgaacataaaggtgtcaaatttaattgctcaatcagtgtacctaatatataccaggacaccacaatttcttggtggaaagatgggaaggaattgcttggggcacatcatgcaattacacagttttatccagatgatgaagttacagcaataatcgcttccttcagcataaccagtgtgcagcgttcagacaatgggtcgtatatctgtaagatgaaaataaacaatgaagagatcgtgtctgatcccatctacatcgaagtacaaggacttcctcactttactaagcagcctgagagcatgaatgtcaccagaaacacagccttcaacctcacctgtcaggctgtgggcccgcctgagcccgtcaacattttctgggttcaaaacagtagccgtgttaacgaacagcctgaaaaatccccctccgtgctaactgttccaggcctgacggagatggcggtcttcagttgtgaggcccacaatgacaaagggctgaccgtgtccaagggagtgcagatcaacatcaaagcaattccctccccaccaactgaagtcagcatccgtaacagcactgcacacagcattctgatctcctgggttcctggttttgatggatactccccgttcaggaattgcagcattcaggtcaaggaagctgatccgctgagtaatggctcagtcatgatttttaacacctctgccttaccacatctgtaccaaatcaagcagctgcaagccctggctaattacagcattggtgtttcctgcatgaatgaaataggctggtctgcagtgagcccttggattctagccagcacgactgaaggagccccatcagtagcacctttaaatgtcactgtgtttctgaatgaatctagtgataatgtggacatcagatggatgaagcctccgactaagcagcaggatggagaactggtgggctaccggatatcccacgtgtggcagagtgcagggatttccaaagagctcttggaggaagttggccagaatggcagccgagctcggatctctgttcaagtccacaatgctacgtgcacagtgaggattgcagccgtcaccagagggggagttgggcccttcagtgatccagtgaaaatatttatccctgcacacggttgggtagattatgccccctcttcaactccggcgcctggcaacgcagatcctgtgctcatcatctttggctgcttttgtggatttattttgattgggttgattttatacatctccttggccatcagaaaaagagtccaggagacaaagtttgggaatgcattcacagaggaggattctgaattagtggtgaattatatagcaaagaaatccttctgtcggcgagccattgaacttaccttacatagcttgggagtcagtgaggaactacaaaataaactagaagatgttgtgattgacaggaatcttctaattcttggaaaaattctgggtgaaggagagtttgggtctgtaatggaaggaaatcttaagcaggaagatgggacctctctgaaagtggcagtgaagaccatgaagttggacaactcttcacagcgggagatcgaggagtttctcagtgaggcagcgtgcatgaaagacttcagccacccaaatgtcattcgacttctaggtgtgtgtatagaaatgagctctcaaggcatcccaaagcccatggtaattttacccttcatgaaatacggggacctgcatacttacttactttattcccgattggagacaggaccaaagcatattcctctgcagacactattgaagttcatggtggatattgccctgggaatggagtatctgagcaacaggaattttcttcatcgagatttagctgctcgaaactgcatgttgcgagatgacatgactgtctgtgttgcggacttcggcctctctaagaagatttacagtggcgattattaccgccaaggccgcattgctaagatgcctgttaaatggatcgccatagaaagtcttgcagaccgagtctacacaagtaaaagtgatgtgtgggcatttggcgtgaccatgtgggaaatagctacgcggggaatgactccctatcctggggtccagaaccatgagatgtatgactatcttctccatggccacaggttgaagcagcccgaagactgcctggatgaactgtatgaaataatgtactcttgctggagaaccgatcccttagaccgccccaccttttcagtattgaggctgcagctagaaaaactcttagaaagtttgcctgacgttcggaaccaagcagacgttatttacgtcaatacacagttgctggagagctctgagggcctggcccagggctccacccttgctccactggacttgaacatcgaccctgactctataattgcctcctgcactccccgcgctgccatcagtgtggtcacagcagaagttcatgacagcaaacctcatgaaggacggtacatcctgaatgggggcagtgaggaatgggaagatctgacttctgccccctctgctgcagtcacagctgaaaagaacagtgttttaccgggggagagacttgttaggaatggggtctcctggtcccattcgagcatgctgcccttgggaagctcattgcccgatgaacttttgtttgctgacgactcctcagaaggctcagaagtcctgatgtgaggagaggtgcggggagacattccaaaaatcaagccaattcttctgctgtaggagaatccaattgtacctgatgtttttggtatttgtcttccttaccaagtgaactccatggccccaaagcaccagatgaatgttgttaagtaagctgtcattaaaaatacataatatatatttatttaaagagaaaaaatatgtgtatatcatggaaaaagacaaggatattttaataaaacattacttatttcatttcacttatcttgcatatcttaaaattaagcttcagctgctccttgatattaacatttgtacagagttgaagttgttttttcaagttcttttctttttcatgactattaaatgtaaaaatatttgtaaaatgaaatgccatatttgacttggcttctggtcttgatgtatttgataagaatgattaattttctgatatggcttcctaataaaatatgaataagga

SEQ ID NO: 152975 - DNA, 2972 bp, Homo sapiens
  Payload ID: 10090
  Gene Symbol: MERTK
  Gene Name: MER proto-oncogene, tyrosine kinase
  ENST ID: ENST00000439966
  CDS Start-End: 73-363
ggcgacaggacaggttcgggacgtccatctgtccatccgtccggagagaaattacagatccgcagccccgggatggggccggccccgctgccgctgctgctgggcctcttcctccccgcgctctggcgtagagctatcactgaggcaagggaagaagccaagccttacccgctattcccgggaccttttccagggagcctgcaaactgaccacacaccgctgttatcccttcctcacgccagtgggtaccagcctgccttgatgttttcaccaacccagcctggaagaccacatacaggaaacgtagccattccccagcataaccagtgtgcagcgttcagacaatgggtcgtatatctgtaagatgaaaataaacaatgaagagatcgtgtctgatcccatctacatcgaagtacaaggacttcctcactttactaagcagcctgagagcatgaatgtcaccagaaacacagccttcaacctcacctgtcaggctgtgggcccgcctgagcccgtcaacattttctgggttcaaaacagtagccgtgttaacgaacagcctgaaaaatccccctccgtgctaactgttccaggcctgacggagatggcggtcttcagttgtgaggcccacaatgacaaagggctgaccgtgtccaagggagtgcagatcaacatcaaagcaattccctccccaccaactgaagtcagcatccgtaacagcactgcacacagcattctgatctcctgggttcctggttttgatggatactccccgttcaggaattgcagcattcaggtcaaggaagctgatccgctgagtaatggctcagtcatgatttttaacacctctgccttaccacatctgtaccaaatcaagcagctgcaagccctggctaattacagcattggtgtttcctgcatgaatgaaataggctggtctgcagtgagcccttggattctagccagcacgactgaaggagccccatcagtagcacctttaaatgtcactgtgtttctgaatgaatctagtgataatgtggacatcagatggatgaagcctccgactaagcagcaggatggagaactggtgggctaccggatatcccacgtgtggcagagtgcagggatttccaaagagctcttggaggaagttggccagaatggcagccgagctcggatctctgttcaagtccacaatgctacgtgcacagtgaggattgcagccgtcaccagagggggagttgggcccttcagtgatccagtgaaaatatttatccctgcacacggttgggtagattatgccccctcttcaactccggcgcctggcaacgcagatcctgtgctcatcatctttggctgcttttgtggatttattttgattgggttgattttatacatctccttggccatcagaaaaagagtccaggagacaaagtttgggaatgcattcacagaggaggattctgaattagtggtgaattatatagcaaagaaatccttctgtcggcgagccattgaacttaccttacatagcttgggagtcagtgaggaactacaaaataaactagaagatgttgtgattgacaggaatcttctaattcttggaaaaattctgggtgaaggagagtttgggtctgtaatggaaggaaatcttaagcaggaagatgggacctctctgaaagtggcagtgaagaccatgaagttggacaactcttcacagcgggagatcgaggagtttctcagtgaggcagcgtgcatgaaagacttcagccacccaaatgtcattcgacttctaggtgtgtgtatagaaatgagctctcaaggcatcccaaagcccatggtaattttacccttcatgaaatacggggacctgcatacttacttactttattcccgattggagacaggaccaaagcatattcctctgcagacactattgaagttcatggtggatattgccctgggaatggagtatctgagcaacaggaattttcttcatcgagatttagctgctcgaaactgcatgttgcgagatgacatgactgtctgtgttgcggacttcggcctctctaagaagatttacagtggcgattattaccgccaaggccgcattgctaagatgcctgttaaatggatcgccatagaaagtcttgcagaccgagtctacacaagtaaaagtgatgtgtgggcatttggcgtgaccatgtgggaaatagctacgcggggaatgactccctatcctggggtccagaaccatgagatgtatgactatcttctccatggccacaggttgaagcagcccgaagactgcctggatgaactgtatgaaataatgtactcttgctggagaaccgatcccttagaccgccccaccttttcagtattgaggctgcagctagaaaaactcttagaaagtttgcctgacgttcggaaccaagcagacgttatttacgtcaatacacagttgctggagagctctgagggcctggcccagggctccacccttgctccactggacttgaacatcgaccctgactctataattgcctcctgcactccccgcgctgccatcagtgtggtcacagcagaagttcatgacagcaaacctcatgaaggacggtacatcctgaatgggggcagtgaggaatgggaagatctgacttctgccccctctgctgcagtcacagctgaaaagaacagtgttttaccgggggagagacttgttaggaatggggtctcctggtcccattcgagcatgctgcccttgggaagctcattgcccgatgaacttttgtttgctgacgactcctcagaaggctcagaagtcctgatgtgaggagaggtgcggggagacattccaaaaatcaagccaattcttctgctgtaggagaatccaattgtacctgatgtttttggtatttgtcttccttaccaagtgaactccatggccccaaagcaccagatgaatgttg

SEQ ID NO: 152976 - DNA, 771 bp, Homo sapiens
  Payload ID: 10090
  Gene Symbol: MERTK
  Gene Name: MER proto-oncogene, tyrosine kinase
  ENST ID: ENST00000449344
  CDS Start-End: 1-771
catattcctctgcagacactattgaagttcatggtggatattgccctgggaatggagtatctgagcaacaggaattttcttcatcgagatttagctgctcgaaactgcatcacccacctggccatcttagcaagaagcccagcatcttgctcttactgcaggttgcgagatgacatgactgtctgtgttgcggacttcggcctctctaagaagatttacagtggcgattattaccgccaaggccgcattgctaagatgcctgttaaatggatcgccatagaaagtcttgcagaccgagtctacacaagtaaaagtgatgtgtgggcatttggcgtgaccatgtgggaaatagctacgcggggaatgactccctatcctggggtccagaaccatgagatgtatgactatcttctccatggccacaggttgaagcagcccgaagactgcctggatgaactgtatgaaataatgtactcttgctggagaaccgatcccttagaccgccccaccttttcagtattgaggctgcagctagaaaaactcttagaaagtttgcctgacgttcggaaccaagcagacgttatttacgtcaatacacagttgctggagagctctgagggcctggcccagggctccacccttgctccactggacttgaacatcgaccctgactctataattgcctcctgcactccccgcgctgccatcagtgtggtcacagcagaagttcatgacagcaaacctcatgaaggacggtacatcctgaatggg

SEQ ID NO: 152977 - DNA, 3104 bp, Homo sapiens
  Payload ID: 10090
  Gene Symbol: MERTK
  Gene Name: MER proto-oncogene, tyrosine kinase
  ENST ID: ENST00000616902
  CDS Start-End: 1338-3104
actcactgcccgggccgcccggacagggagcttcgctggcgcgcttggccggcgacaggacaggttcgggacgtccatctgtccatccgtccggagagaaattacagatccgcagccccgggatggggccggccccgctgccgctgctgctgggcctcttcctccccgcgctctggcgtagagctatcactgaggcaagggaagaagccaagccttacccgctattcccgggaccttttccagggagcctgcaaactgaccacacaccgctgttatcccttcctcacgccagtgggtaccagcctgccttgatgttttcaccaacccagcctggaagaccacatacaggaaacgtagccattccccaggtgacctctgtcgaatcaaagcccctaccgcctcttgccttcaaacacacagttggacacataatactttctgaacataaaggtgtcaaatttaattgctcaatcagtgtacctaatatataccaggacaccacaatttcttggtggaaagatgggaaggaattgcttggggcacatcatgcaattacacagttttatccagatgatgaagttacagcaataatcgcttccttcagcataaccagtgtgcagcgttcagacaatgggtcgtatatctgtaagatgaaaataaacaatgaagagatcgtgtctgatcccatctacatcgaagtacaaggacttcctcactttactaagcagcctgagagcatgaatgtcaccagaaacacagccttcaacctcacctgtcaggctgtgggcccgcctgagcccgtcaacattttctgggttcaaaacagtagccgtgttaacgaacagcctgaaaaatccccctccgtgctaactgttccaggcctgacggagatggcggtcttcagttgtgaggcccacaatgacaaagggctgaccgtgtccaagggagtgcagatcaacatcaaagcaattccctccccaccaactgaagtcagcatccgtaacagcactgcacacagcattctgatctcctgggttcctggttttgatggatactccccgttcaggaattgcagcattcaggtcaaggaagctgatccgctgagtaatggctcagtcatgatttttaacacctctgccttaccacatctgtaccaaatcaagcagctgcaagccctggctaattacagcattggtgtttcctgcatgaatgaaataggctggtctgcagtgagcccttggattctagccagcacgactgaaggagccccatcagtagcacctttaaatgtcactgtgtttctgaatgaatctagtgataatgtggacatcagatggatgaagcctccgactaagcagcaggatggagaactggtgggctaccggatatcccacgtgtggcagagtgcagggatttccaaagagctcttggaggaagttggccagaatggcagccgagctcggatctctgttcaagtccacaatgctacgtgcacagtgaggattgcagccgtcaccagagggggagttgggcccttcagtgatccagtgaaaatatttatccctgcacacggaggcagagattgcatactgctttgccatgtttttacccattcaagccttggcagacagaacttgcagtccttaccttgcagggctccaggacaaacccacatgacattttacaaaataaagaaatgcaaagtttctaacattttaaactacagtagaagtaaatttgttcttccctgttacaagttgggtagattatgccccctcttcaactccggcgcctggcaacgcagatcctgtgctcatcatctttggctgcttttgtggattttgattgggttgattttatacatctccttggccatcagaaaaagagtccaggagacaaagtttgggaatgcattcacagaggaggattctgaattagtggtgaattatatagcaaagaaatccttctgtcggcgagccattgaacttaccttacatagcttgggagtcagtgaggaactacaaaataaactagaagatgttgtgattgacaggaatcttctaattcttggaaaaattctgggtgaaggagagtttgggtctgtaatggaaggaaatcttaagcaggaagatgggacctctctgaaagtggcagtgaagaccatgaagttggacaactcttcacagcgggagatcgaggagtttctcagtgaggcagcgtgcatgaaagacttcagccacccaaatgtcattcgacttctagggttatgcatgattgatgctgtgtttgtaatttcaggtattattatcctgctttatgaaaatcaccgagactcttccaaagagcataggccagcctgtatttttttacatcatattcctctgcagacactattgaagttcatggtggatattgccctgggaatggagtatctgagcaacaggaattttcttcatcgagatttagctgctcgaaactgcatgttgcgagatgacatgactgtctgtgttgcggacttcggcctctctaagaagatttacagtggcgattattaccgccaaggccgcattgctaagatgcctgttaaatggatcgccatagaaagtcttgcagaccgagtctacacaagtaaaagtgatgtgtgggcatttggcgtgaccatgtgggaaatagctacgcggggaatgactccctatcctggggtccagaaccatgagatgtatgactatcttctccatggccacaggttgaagcagcccgaagccaggtgggcatgtgcagaggggaggtcgaggttgcagatgaaattgcccatttgtgggagtagggccaccaaaaaagtctcaataatttttataaaaagtagaatgaatgctgataaaaacaaaggcatggattgcacaaagagatgtactcttgctggagaaccgatccctgaccgccccaccttttcagtattgaggctgcagctagaaaaactcttagaaagtttgcctgacgttcggaaccaagcagacgttatttacgtcaatacacagttgctggagagctctgagggcctggccctccacccttgctccactggacttgaacatcgaccctga

SEQ ID NO: 152978 - DNA, 1504 bp, Homo sapiens
  Payload ID: 10091
  Gene Symbol: MPST
  Gene Name: mercaptopyruvate sulfurtransferase
  Uniprot ID: P25325
  ENST ID: ENST00000341116
  CDS Start-End: 306-1199
gctgcaggttggtggcgggaggaggggacagctgcgggcgcggggagggggcgccgcgccgcgggggccatggcggagccaggaagccgggagtccgagacccgggtcgccaatataaatgcttgatgagtgaatgaatgacttccgtctgggacttggttgcaaataaagccgagctgcatcttagggaggggtggagactttgcccctgtttgtgccttgaagccagcagggccttgccctaggatacctccacccaccctcctgcccagcaagtggaggcccgcagcccgagtgtcgccgccatggcttcgccgcagctctgccgcgcgctggtgtcggcgcaatgggtggcggaggcgctgcgggccccgcgcgctgggcagcctctgcagctgctggacgcctcctggtacctgccgaagctggggcgcgacgcgcgacgcgagttcgaggagcgccacatcccgggcgccgctttcttcgacatcgaccagtgcagcgaccgcacctcgccctacgaccacatgctgcccggggccgagcatttcgcggagtacgcaggccgcctgggcgtgggcgcggccacccacgtcgtgatctacgacgccagcgaccagggcctctactccgccccgcgcgtctggtggatgttccgcgccttcggccaccacgccgtgtcactgcttgatggcggcctccgccactggctgcgccagaacctcccgctcagctccggcaagagccaacctgctcccgccgagttccgcgctcagctcgaccccgccttcatcaagacctacgaggacatcaaggagaacctggaatcccggcgcttccaggtggtggactcccgagccactggcaggttccgcggcaccgagcccgagccccgagacggcattgaacctggccacatcccaggtaccgtgaacatccccttcacagacttcctgagccaggaggggctggagaagagccctgaggagatccgccatctgttccaggagaagaaagtggacctgtctaagccactggtggccacgtgtggctctggcgtcacagcctgccacgtggcactaggggcctacctctgcggcaagccagacgtgcccatctacgatggctcctgggtggagtggtacatgcgcgcccggcccgaggatgtcatctcagagggccgggggaagacccactgaagctgggcaggacacaggcgagctcaggtgatgccggccaccagcaatgcctggcctggtagctccgcttctgctttcaccaagagagtgtttcttcactcaactcaggtggcatttggggtgacatctcaaaggccaggaattccgttgacttgttggctgccagtaggggcgggaggaaaggcggaggcgagccctggaggagggaggccacaactccgagctgcccacctggtgctgagctggggccccgcctcctttctgttttatttttgaggaaataaaataaccaagtgctaaatctt

SEQ ID NO: 152979 - DNA, 2116 bp, Homo sapiens
  Payload ID: 10091
  Gene Symbol: MPST
  Gene Name: mercaptopyruvate sulfurtransferase
  Uniprot ID: P25325
  ENST ID: ENST00000397225
  CDS Start-End: 916-1809
ctctggtatgcaggaaagatagagaggagagggagggaggtgcgaagtcactgttgctgctgctagaagggccagagagagcccaggctggacaggcaaaacctggcctcgccagactcctggagcctgcacagagtgtgtgtctgagaagtccggattctggtgccagactgactgcctagtgagaagcctggcaccgccgggtcaggctagtgcactttttcttgtttgttttttgtttttgagacagagttttgctcttgttccccaggctggattgcaatggcacgatctcggctcactgcaacctccgcctcctgggttcaagcagttctcctgcctcagcctcccgagtagctgggattacaggtgccctccactaagcccggctaattttttgtatttttggtagagacggggtttcaccatgttggccagactggtttcaaacttctgacctcaggtgatccacctgcctgggcctcccaaagtgctgggattacaagcgtgagccaccgcaccaggccaggttagtgcacttctgtgagcctgagtgtcctccttgaaacggtgacaataatataccaggcctcttaagatcactcattcaacacatactggagagtctactgtgtcaggcattgttctaggatattgttaggattcagtggtacccagcaaggactcagtaaattccagctactgttcctattaggtcgccaatataaatgcttgatgagtgaatgaatgacttccgtctgggacttggttgcaaataaagccgagctgcatcttagggaggggtggagactttgcccctgtttgtgccttgaagccagcagggccttgccctaggatacctccacccaccctcctgcccagcaagtggaggcccgcagcccgagtgtcgccgccatggcttcgccgcagctctgccgcgcgctggtgtcggcgcaatgggtggcggaggcgctgcgggccccgcgcgctgggcagcctctgcagctgctggacgcctcctggtacctgccgaagctggggcgcgacgcgcgacgcgagttcgaggagcgccacatcccgggcgccgctttcttcgacatcgaccagtgcagcgaccgcacctcgccctacgaccacatgctgcccggggccgagcatttcgcggagtacgcaggccgcctgggcgtgggcgcggccacccacgtcgtgatctacgacgccagcgaccagggcctctactccgccccgcgcgtctggtggatgttccgcgccttcggccaccacgccgtgtcactgcttgatggcggcctccgccactggctgcgccagaacctcccgctcagctccggcaagagccaacctgctcccgccgagttccgcgctcagctcgaccccgccttcatcaagacctacgaggacatcaaggagaacctggaatcccggcgcttccaggtggtggactcccgagccactggcaggttccgcggcaccgagcccgagccccgagacggcattgaacctggccacatcccaggtaccgtgaacatccccttcacagacttcctgagccaggaggggctggagaagagccctgaggagatccgccatctgttccaggagaagaaagtggacctgtctaagccactggtggccacgtgtggctctggcgtcacagcctgccacgtggcactaggggcctacctctgcggcaagccagacgtgcccatctacgatggctcctgggtggagtggtacatgcgcgcccggcccgaggatgtcatctcagagggccgggggaagacccactgaagctgggcaggacacaggcgagctcaggtgatgccggccaccagcaatgcctggcctggtagctccgcttctgctttcaccaagagagtgtttcttcactcaactcaggtggcatttggggtgacatctcaaaggccaggaattccgttgacttgttggctgccagtaggggcgggaggaaaggcggaggcgagccctggaggagggaggccacaactccgagctgcccacctggtgctgagctggggccccgcctcctttctgttttatttttgaggaaataaaataaccaagtgctaaatcttgt

SEQ ID NO: 152980 - DNA, 1453 bp, Homo sapiens
  Payload ID: 10091
  Gene Symbol: MPST
  Gene Name: mercaptopyruvate sulfurtransferase
  Uniprot ID: P25325
  ENST ID: ENST00000404802
  CDS Start-End: 280-1173
ggaaggcgcgggcagcagcggctccgagtggccgcggcggtgggctgtgccggagtctcctccctttggtccgctgcaggtcgccaatataaatgcttgatgagtgaatgaatgacttccgtctgggacttggttgcaaataaagccgagctgcatcttagggaggggtggagactttgcccctgtttgtgccttgaagccagcagggccttgccctaggatacctccacccaccctcctgcccagcaagtggaggcccgcagcccgagtgtcgccgccatggcttcgccgcagctctgccgcgcgctggtgtcggcgcaatgggtggcggaggcgctgcgggccccgcgcgctgggcagcctctgcagctgctggacgcctcctggtacctgccgaagctggggcgcgacgcgcgacgcgagttcgaggagcgccacatcccgggcgccgctttcttcgacatcgaccagtgcagcgaccgcacctcgccctacgaccacatgctgcccggggccgagcatttcgcggagtacgcaggccgcctgggcgtgggcgcggccacccacgtcgtgatctacgacgccagcgaccagggcctctactccgccccgcgcgtctggtggatgttccgcgccttcggccaccacgccgtgtcactgcttgatggcggcctccgccactggctgcgccagaacctcccgctcagctccggcaagagccaacctgctcccgccgagttccgcgctcagctcgaccccgccttcatcaagacctacgaggacatcaaggagaacctggaatcccggcgcttccaggtggtggactcccgagccactggcaggttccgcggcaccgagcccgagccccgagacggcattgaacctggccacatcccaggtaccgtgaacatccccttcacagacttcctgagccaggaggggctggagaagagccctgaggagatccgccatctgttccaggagaagaaagtggacctgtctaagccactggtggccacgtgtggctctggcgtcacagcctgccacgtggcactaggggcctacctctgcggcaagccagacgtgcccatctacgatggctcctgggtggagtggtacatgcgcgcccggcccgaggatgtcatctcagagggccgggggaagacccactgaagctgggcaggacacaggcgagctcaggtgatgccggccaccagcaatgcctggcctggtagctccgcttctgctttcaccaagagagtgtttcttcactcaactcaggtggcatttggggtgacatctcaaaggccaggaattccgttgacttgttggctgccagtaggggcgggaggaaaggcggaggcgagccctggaggagggaggccacaactccgagctgcccacctggtgctgagctggggccccgcctcctttctgttttatttttgaggaa
